United States Patent Application Publication US 2022/0290142 A1 - sequence listing, part 13

SEQ ID NO: 14696 - DNA, 20884 bp, Homo sapiens
gaaaatgatgactgtgctgtgctctctacttcctgcggttactgcgtgattctaaagctgccactcggaacagcgagtcctctgccgtcgagagcagggaggggtagggtggacaggcgatgccgtggaaagacgtctcggtggaaactgccatggtggaaaggtggcgcgcttctcacggctgagttgctgcgcctgcagacggaagctccccacaggcagagctgcttggatgtgtgagtcatgaagccagagaagccccgctccatgagcagtgactccccaggtaagactttcagccagtcctgcgctggccagagtcgccgggcccgtgggaatcacggcggctccacgtctccgggacagcagggaatcccaggggcctggtagtgacaccggagggtcctcagggaacctctggtctggccctcatttcccaggggtagaaaaggaaatctgaaattggattaaaccatgcagcaaatatttactgaggctctgctatgggtcaggctgttttctgctgggtgcagcggggtgcagcgctcaggtaccccttccctcttagggcttcccactgggtagaggagggagatgttcagctcccagctcatctgtaaccaagctgtgcctcagttgtctccattcaggccctgggggtgagcccagcctttggcctgtggccccaatcccgctgctggggctcctcccccctgtgcccttcccctccccggtgcggcttcagtgcagccaggctctccttggtacccaggccagacagagtgatctgactttaactctctacagacagacaggaagagggcccaggagcaggagctggacagagcagagctgctcctgtcctgaggctccaggcccattcctttctgtctgggtttctccactgggctcttcctgccgaagccacccagtctgagctcccccactccctctcctggtacacaggcccttggttcacccctcagagggctccgggtgggaagatgcacagttagttggagactgaagggctccgtggccccaggagggccagcccctttctccataggatggcaccgaacacctcagctgccactggagggccaccctcccaggtccaagacgtccaacttcatgtgattttttaccacatttcattaattttgtggagcaaatgtcttcccattttacatctctgaaatccacgtctctgacattgctgttggcaggcggcacctgggatgtcgtcatcctggccataactagcctgtagtggacctgggtgatacacaggggcctcttggagctacggagtacctaaaataccatatagttaaccaaaaagtagcagaaaatatgtgagcatggatctcagccattttgcgggttggctgcaactgggacttaacctgccataaccttagatcagcctgccacacccaaggagggcctgcccccagacccagactcaagtttagacacagcctaaacgtgtacctctaaatctgcacaaactcagctgcccagatactggatttccttatctcttccgggaaatgcaagatgaaattgccctcctgttgggtattttcctgatcctttattctgaaaaagtggtcatccttttccccacaggccctgtgacctccctcctgtcttgcagctcctcctggcaccagtccccagggctctcctgttggtagttcctgcttttcttcttggaaattcctcgtggacctcgagatctttaccctaaaatagttctgttgaatttcaccctggcaatgtaaattgatagcttatcttcacagatgccagacaatggacaactcaccatcagtcctctgctcacctgagacaaatgcatgtctgattgcttcctctgccctattgtttatgtgaaaatgcagattcactgagccagactaaggcatcagtgactgttcctctacctgcctctcacatggagattgtgtattcagtgaaaggctgatcaaagacccaaaggaatgcaacagtttatctcttatctacctatgacctgcgagctgcccaccacccccagttgttgcgcctttccagacagaaccagtgtacatcttacacgtattaattgatgtcctgtgtctccctaatatgtatcaaagcaagctgtgcctcgaccaccttgggcacatatcctcaggacatcatcctgaggctgtgtcactggcatgtccttaaccttggcaaaataaactttctaaattgaaacctgtctcaggtactttgggttcataccacaagggagggttctcatgcacatgtgcctaataataacaactatcacaaaagactgcaaaaaccacaactttacacaaaggctatcgtaaccttcctcaaaaaaaaaaaaaaaacaaaaaacttctgttgcaaggacatctgcccagcaactgcttgtccaaccctggagtgctgtcacccttgttattgatctttgtagccaaagaattatctcaaaacaatgatgtgatcctcattttccctttaaaaacctttgtcttcctaggccgggcactgtggctcacgcgtgtaatcccagcactttgggaggccgaggcgggcggatcacaaggtcaggagatcaagaccatcctggccaacatggtgaaatgccgtctctactaaaaatacaaaaattagctgggtgtggtggcatgtgcctgtaatcccagctactccggaggctgaggcaggagaatcgcttaaacccgggaggcggaggttgcagtgagctaagatcacgccactgcactccagcctagtgaccaagtgagactgtctcaaaaaaataaataaataaaataaaaacctttgtcttcctttacttccctgaatacccacatagcttattgtggcatgcatattcccattgcaatgccctattcacaaatgaacatctttttcgttcagagtctccctgtgctttaggtagaccttgtctagatgctaactcgtagagaagaactcagcttgaatatcacccctgggggatgacctccattctctcctccttcctttattcagcgaggttatgaagcacctgccctgggccaggggcttttctgggcatggagtaggagtggacagaacacaaaacccctgtccaacacacctcacagacattaaggattgagtgctgagtatgcttggagtcaaactgtaaaagatttgaagatatttattcatgtcatagtcccaggagatcctgagaacacgtgctcaaactggtggtgctacagcttttggtttcgtacgttttagggagacataagccataaatcaatacatgtaagatgtaacattggttccggaaaggtgggacaactcgaaggtggggtggggcttccaggtcataggtggattcaaagattttctgggccgggggcagtgactcacacctgtaatcccgccactttgggaggctgaggtgggcggatcccttgaggtcaggagtgagagaccagcctggcaaatacggtgaaaccccgtctctactaaaaatacaaaaattagctgggcttggtggcgggcgcctgtaatcgcagctactagggaggctgaggcaggagaatcgcttgaatcttggaggtgaaggttgcagtgagccgaggtcgcgcccactacactccagcctgcgacagagcaaaactccatctcaaaaaaatttaattaattaaaaattaaattaaattaaaatactgtaaaatacttcgatatctttcagggcctgccatctgtcatgtcggtatcctattgctacggagagtccgcctagacagtcttaagtctgttttgacgttaatgctggtccgaattccaaagggaggaggagggtctagtgaggcgggtcccacccggcctttcccatcagagcccgaactcgcggttcaggttccctctaggacgcccttggccgagaggaggcctccaatggctggctggggggcttagaattttatttttggtttacagcgcagaagaagagcagtgaggccggggcgcgggtggggagggcaaggcggcggctcaaaaaaaaagccagcccctcgcggcccgacagagtctcggcgccccgcgggtcggtggagcctcaggggtgagcgcaggccggagacaggggaacccgccgcgggacaggggaaggccggacggaacgcgggtaagctgccgcagcttccggccgggccactagcgcggaccctacggccggggcgggacttccggcaaggcgcggaagcggcggtagctgcagctggcgaagttgggcgactggcggatgcaggccttgcggcacgtcgtgtgcgccctgtccggcggcgtggacagcgccgtggccgcgctgctgctgaggcggagaggtgaggcgtccgaggctcccgccccccgccgagcgaatgtgtccccggaaacctgtccccgtccgtcgtggcgttgtgcacgtctcctccctccctgggccgctggttgcgcgcgggtcggcaggaggataccccgtcctctgactttggttcggaggctcctcgccctccacctgtgtagtcggaggtgtgcgcgactgcagctccgactacctgggagcagttccgcgcccctctccacccacgcgcgcccacccacagtgagaagccggcgggccggggtggggtggggagggaagggtttctcacggatctgcggcgtccacattcacctgtgagaccgtggacactggtgaggggagctgggatcgccgggccgggggcctgacctctgcacacgctgtggccgcccggtgggaggtccttgtcctccccactcagcagactggacaactgccgcgcggcgggtctgcttgttcagcgtctcctgtgttctccgctcgctggaggacaaagttttctccaggagcatttgcatttcttccggcatctaaacggagccccacgggtgcttagcattcctcgggcccggcgctgaaatgagcacttgtttaacttcacctgtgtggctccccgcgggaggcctcattcacagagtcacgtttgtggagctctgctttgcgccatctttggctcctgaccttgggcaagtgaattaagccgtcccctgtaaaattcggctaacacctgcctcacggggtgactggagggattagatgacatagtacatactgatgagtacgtgctcagcacatacgaggtacgcagaaaacagtagtggctattagtttatattgttaataaccatagctattatggtaggtacagtaagtgccaaagagaagggtaggcggaccataagcagaaatagttgtgaggaagggagagtggaggaaagcatcctagagatggaggtgctcagctgagtcgaaagaagagtaggatgtcactaagcagagacttggaggtggaggcggccctcccggcacagtcagcagtgcaagcagaatcacagaggcctgcaagtgtgggctggttctggccagatggagatggaaggagaggagcctggagcacgtttagccctgattatggaagatgctataccaggggctttagactgttaggtagacattagtctggttgatctgggataggggtggtctttcgcgtgtggtggtgtagttttgacaaagctttgtcatcaaatttctgttgttttgggtactatatgaagccttcttcagcagtcatttgccctgtctttcattacattcagcctacctaaacgaaccagctttctcatacagggtctgcacctgtgtagtttgctaaggtggtgtagggctaaagttggcctttccaatatttgggtgaatattttgttacaatcgaaaaggtagaaaataggtcataaactaggtggtacagctcttacaaaatatcgaaaattttaattatctttatatctgatcacttagaatctaagtcttagatagtaactagaaataacttttgaaaagagtttccttttttgataactgaatggtgctttgaaaaattttgttgagtttcgactattccttcgtgtattccacacacactggctgatcccctcctgctaggtattgtgctgatacatagatggggacacaaagatgagaaaataccacctcgttaatcttggggactcaggcaccaagatggaaaccggatccctgaagccacatggcaaagcagggactgcccggcaggccaggcacagaggcacaggagcacagcgtgtggggaacttctcagagctcagaaatcactgccgttttaccgaaggttgatttatgtattctctttaattgaccttcccgcccgcaggttaccaggtgacaggggtgtttatgaagaactgggactcactggatgaacatggggtctgtactgccgacaaagactgtgaagatgcttacagagtttgccagatcttagacatccctttccatcaagtgtcctacgtaaaggagtattggaatgatgtgttcaggtgagtgcgggtcacagcacaaaggaagcttcctcacactgtggatccttgcagtggaaggatccggtaaccagccagaccgacgcctgtgctgcagcccagcgctctccctccacggtggtgctgaagactgcaagaggcctcagccaccctcggggctctgtgttagaggcgaggcctggaccccacagcacacccagctctctcactcctgtcattttgccacttgcctgaagtctctttaatgctttcttggaccttgagctgtttctgttgcccagttaggataggggagctaaggctgagggctcccctggaaggtgagcaccaatgcctgtgtgctatgtgggtcagcgattaggggatttctgagaaagaggtgatacatggcctgtgcctctgaaaacaagaaacaaacaaaaacttttctaaaatccaatataatctcaataattaagtgctgtgtgctaggcgtgtgccacatctaggaacattaagatgtcttcactgtgacctggctctgtaggagtttgcggtctagttgggaggacattatcttcacaagaggtgacagtgatgcgtggcacgcaggaagtaccagtgatgctatcagtcactgaacccagaggagggagaaacttgcagtgtggagtaatcaagaaggcttcaccggagaggaggggttgcaaacaaagttgtagagaagggactccaaatggggtaacgagagcagcgtgaaggggagaagaaatgctgattgtgtatttcaggaccgttgtaaagtttggctggacttttgttcctgcagtggaaggagtgtagggctcatcctctggtgagccctgactgtgatgaatgtcgggcagttgtcgaaggcgtctgacacagcaggccatgtgcgcgggacaggctgcccctgcctgagtgggctttaggggcagaagagccttgggttgagtcctgactgtagcttattatatgaccttgggcaatttacttgactttgtttttttaattgaaaaaaattctctttttttcctgccaacaaagacccagaagagatacttgacttttctaagccccaattttctcatctttaaaatgaggataacactgatgcctcacagggttatgaaagaattgagattaggttctagtatgtatgcctggtatattagtaagcagtcaataaacatagctgtttttcttttctatttttttttgagacagagcctcgctctgttgcccaggctggagtgcagtggcgcaatcttggctcactgcaacatctgcctcccaggttcaagcgattctcatgcctcagcctcccaagtagctgggattataggcatgcaccaccacgcccggataatttttgtatttttagtagagacagggtttcgccatgttggccgggctagtctcagactcctgacctcagaagatccactcgtctcagcctcccaaagtgctgggattacaggcgtgagccaccacgccagcctgctatttttattttcattattaaaaagatgagtctggggagctaagctatgaggacgcaaaggcataaaaatgatataatggactctggggtgagggataaaagactacacatcgggtacaatgtccactgcttgggtgacgggtacaccaaaatctcagaagtcaccactgaagaacttatccatgtgaccaaataccagctgttgcccaaaaaaccattgaaataacaataaaacgaaatttagagagattaagtaaattgactatggtcacctaaataatcaacggaagagcttgaatatgaaccctctgtgactctatgctataacatatgggtgtcgtatatattaacaacatggacaaaactgatggctgaattttcctggggaaagttacctgtagaatgcatgataaatgcattaaaaacttatctgtagaatgcatgataaatgcattaaaaacttctgcagttttctcggggacataagaaaaaaaaaagagtgtggcggccaaatacaggataaatctgggggaagaccaaaggcagagagtctcaggaagtgctgttgctggagatttggacttcatggggagggagtgtgggagtggaaggtgagggctggcttgttggacccagaggacaagtccaccgggcagtagatctgaggtgcttgttaaacacagacctggaccgaggtctgggggcggccctggaatctgctttaataagcacttcagctgtgctggtggtgtggggggttgtcagggtctttctttgagaaaaggtgtgatgcggcttagggactgatgtgtgtgggagaccagagaggagaggagtcagcagtagtttcaagatcaaggctgggtggctggggaaagctggtttaggggattcctcatgagtactgtagagtttgaggggacaacagggaatccaagtgagcttacacttcacctgccagcacagctttttcagaacgtacgagtggatgcgatttttgaagtttagctcagctgaggccagataggaagagtgacttgaatagtatggcaaattaggagcggagctgggattaaaccccagaattaggagcggagctgggattaaaacccagaattaggagcggagctgggattaaaccccagaattaggagcggagctgggattaaaccccagaattaggagcggagctgggattaaaccccagaattaggagcggagctgggattaaaccccagaattaggagcggagctgggattaaaccccagaattaggagcggagctgggattaaaccccagaattaggagcggagctgggattaaaacccagctttccaggccagtgcttgctgccgccttctggcgctgcttgatagggactgagagaaggaggcggccgggtagagtcttttcccatctctggggctgcccccgaggtcgcccctggctccagccagcctgccctctgccctcgcccagtaccagctgcccgtggaggcattggtctttccgctgaagactcacttctctagtagggctctctagctcagagatttcttttgcattctttcattcaagacccactggccttcaaggatcagagtccagatacgttttagctgctgagtcttttaaatctgtctccctcccgaggcacatgaaaggcttctcttctttccagttagagaagaggctgggctactccattgtttttgctaatgccaaaacacacgccttcccatctgctgtttacgaaagggttaacagtgtgtcttttcagaaactgattttaatgttcagcctcttcaacatttattgatgactgtgatatagaaagtttgttgggtctaggacacagacacagattgcaccttaagtagtttatagtttaatgagcttcctggtaactttctaataattaaagcaaaatggaaagagtgtaataatatcaagtgttgttgcaaatgtggaaaaacatgagtttttatgaacttctagggggactgagaagtaggaaaacagtttggtgcctgctaaagtggaagatatccaaggaacctctgaccctgtgcagatctgtgatatgtctgcaaaacacaaacctcttgatcagcactggttttttttttaacccttgttgattaatagagagttttaggttaaatgaaaaaaatcacttataccaaaaatacacccatttttaaactcccaaaataggcatcataaccctcttgaagtgaatcctcgaagactatgaaattcttggtaagttttgctggtatcatggcatctttttcccatgttcagtcagtctgttagagcagaagttcactgaattaggatagcctgatccactttaagcacccaagagtttgctagttctcagaagtgtgtgtttgtcacctgaggatagtatttttggtatatttgcccagtgacgcagcattccaggctgagattgcagaatggctcatggagcccttgtgtagggaagcctctgactgtgtttctcctctgttctcatcacggcagtcatcctcacggaagaaggcttctgtgacaaaggtgtggggggttttccccatacagcaagcagtggacaccgactgggtgtcctctgattcagttccgataccatctacttggagatagtgctggatcccaaaggttgggggttcagtcccccagacggactccccccacaacagcagtcgaaagtatgggcctctagaacttatgaccaactggcttccagttgggattcccataacttcctctttgggttcaattattaataatttgctggagtggttcacagaactcagaaaaacacatttaccagtttattataaaggatgttgcaaaggatacagatgaagagacgggttgggtgaggtatggggaaagggtcatggagtgtccacaccctccctggggaccaccctccaggagcctccacaagtgtagctgtgcagaagctctctgaacccagtactcctgggtttttatggaggcttcatgacatcgccattccttcccccaggatatacagtgggactgtgtctggggagggtcttaagacccacagtcagaaaggtagacgcttgtaatcctagcactttaggaggctgaggcaggagacttgcttgaggcctggagttcagtatcagcatgggcaacatggcaagacctcatctctataaaaaaagaaaaggttgcagtgggccaggtgcggtggctcacgcctctaattccagcattttgggaggctgaggcgggcagatcacttgaggccaggagttggagaccagcctggccaacatggtgaaaccccgtctctactaaaaatacaaaaattatctgggcatggtgctgcgcacctgtaatcacagctattcggaaggctgaggtgggagaatctgcaagggaagtctaaaggatttcatttccactgtcactcaggcatcttctcttcctcacctaagccctgctgtgttggaggagtcccagaggcagggttttagtgagaccctcacggccactccccactcctgaccccataagccctgtgagcctacacagagacggtggctcctgagccgtagtggcagagaataacaccttgtcgggtggcccatgcagcaggttataaacaaatgttcgatgactgacgttctcctgttttgcagaaaattatagttttggtatgacaaggggaaattacattaaacaagcaatttagtgaactttttttttttttttgaggaatgtttcacacttggaactgaagtcattttcttttattctagtgactttttgaatgagtatgaaaaaggaaggactcccaatcctgacatagtttgcaacaagcacatcaaatttagttgcttttttcattatgctgtggataatcttggtaagtaatttgggtttaaaacatttttttttttaaagacagggtctcgctctgtcacccaggctggattgcagtggtgcgatcatgactcactgcagcctcgacctcctgggctcaagagattctcccaccccaggctcctgagtagcttggaccacaggcatgccaccatggtggctaattttttgtggagatggtgtcacaactgtattgtccaggctggtctcagatttctggccttaagcagtcctcctgcctcggccttccaaagtgctgagattacaagcgtgagcccctgtgcctagcctgtttcttcttgtggaacctcctgatactgaattgcttgcttagaccacctcttgatgtctgtggctatgctttatgaattttaggttcttcttcctgtcccctgccattggggtcaccataatgagtttctgaagttctggctcaggcttcttggtttgctctgtcccactgcagctcaccctgttgtgtgttgctacgagataccattgtaagccaggggcccagtagtgtcggcactttcagcaatgatgtagattaggcttgcagattcaatatgtcagcaacctaaagctgagttgatgataatgatgaaagttagtttgtggagttaggaataaacaaatgcctacaaaaacaaaaaatcaaaaagaaaaatcttaaatttcaacattgggctaacaccaaaaacatgaaacttaatagagataaatgcaaagtttgctaactaggttcagtaattctcctaggacaagattggaaagacctagcttggttgccattgaatcttctgccattggttgcagaaaatctgggggatttaggtgcccccaggctgactgagccagtagtgtgatgtcttttgtcagagccagcacagacggagctcaccttgatgatcatagaatgtctaggaaggggtgatgcgtcccctgtggtccgtcctggttagaccgtattagttattcaggaaaagagtgatagactgatagaatgtgaattgatttttattttcagggtatctggaaatatgtcctccctgaactgttgaaattactttgggtcgtagtggcagtggtcaagcgtgtgagttaggatgacattctttgtgtgacaccagcagacagttaggactggcaggagaaagagttccctgaggtggaggcgcaggcagctgttcaggaagggaaggcttgcctttggagagcattaagctgtcacgaaagctttttagggagcccctaggtggctggctgtcaggcacgctgtggaaggaacttctgcagtgaatgtttccacacctggaagaaaggcatgaaccgtgcagcacaggatgagaggacatgacgcccagacttctgaactcaccgcgcttctcagaggcatcctgcgctttttctagtataagtgctgttctttgaggacacagatgtaaagtggattgttttctctaggagaacctcagtcaagatgagattatgtgtctctaaagtgcctttttcaggtcgttaatatgcagcagctaattcttgctgtgtcttctgtttacatggagctagtgtggctggtccaggatggctgtgtcttctgtttacactgagctagtgtggttggtccaggatggaatccattttgctgcacctttcataaaagtctcttgcaatactaaatatctgtaattttttctttttttgagatggagtctcactctgtctcccaggctggagtgcagtggtgtgatctcggctcactgcaacctccacctcctgagttcaagcaattctcctgcctcagcctcccaagtagctgggattacaggtgcccaccaacatgtctagctaatttttgtactttttttgtagagacggggtttcatcatgttggccaggctggtctcaaactcctgacctcaagtgatccacccacatcggcctcctaaaagtgctgggatgacaggcgtgagccgctgcgcctggcccaaatatctggaatttttacacaatgaaaaggttctggattcatatgcaccttgttaggctctttggctttgtgtaatatgaaaagaagaaacagtgtgctggatgattcttcactctgatgaaaataatacatatttattacagaaaatttaaaagaggagaaacgacacctataatttcactctcagaatcaaaggaatagacctgagatttttcttcaactgtttctgtacagtaaaaaccgtggaatcatggtgttacatcctcgccctgctgaacagtgccgggcattttcccgtgttagtaaacattctctgtaaggacccccattgttacggcagtgcattgtcattcacttcacattctcccagtgttgaacattttggttcttttttttttttttttcctcctgagacagcatcttgctctgttgcccagactagagtgctgtggtgcagtcttggcttcctgcagcctcaacctcccaggttgaagcaatcctcccacctcagcctcccaagtggctgggactacaggtgtgccccaccacgcctggctaatttttgtattttttgtaaaggtgggatttcaccatgttgcccaggctggtcttgaactcctgagcacaagcaatcatctgcccgcctcggcctcccagagtgctaggattacaggcatgagccaccgcgcctggcctcccttcgtattatcacaaaccctgaaaggaatattttgtgtttaaatctttctgtgcctttcagactgtttccttaagccagaaattaactttggaaaggctcttaaaggtgcaataacactttaagtagcaaggttgtatcagcttaagagttcaaggctgcttgtttgatgaaattggatgtgtgcgtctgttccctgggatctctatgtttgggtgcagggtggattgtgcagcccctcagcctaagacttggggtctatactcttcttttgtgccttggtttatgctgatcaaggcctgcaagtatgagtctaaaacctgatccttgtgttctaaaaacctcacaggggcagatgccattgccacaggtcactatgcaagaacttccctggaagatgaagaagtctttgagcagaagcacgttaagaagcccgaagggcttttcagaaatcggtttgaagttagaaatggtaagttcatgtgcccaggtcagagccaaattcttgtgaacagattgaaatctttggaggaatgacagtgggttgtgcctgaggatcactgccacccctccctctgtgctccagagtagcttgtatgggattcacatttgaaaaggtgcagttaccaagaggacattttcccggagggcctgtgattgggtagtaaacagtgtccctgccggccatggtgagggctggtggaaagtgacatcagatactgataatccagctctcgacactgtgtggtgatttgaatgttccaaaaatatctgggtaaatatttgacagtgataattggggtgctgtcagtctagccaaggacctgtacttagcaacaagttctcaagggcgtgcggttcaggcagactttcaacgtgctgtgagcacaggacctgctgtggatcgcatgggctcagcagtcaggctttgtagccgtatttacacgttagtttatgcgtgttagggagccaagtttcacctttctagaaaaaagtcaatggcagacagtgagctgggaagctgctggcctgtcctggtgtacattcgtgtgtagaaaagaggaattccctgtattgttgagtgaaaaaccaagtggggctcagagccgtgtttccgcacggagcgtccgtccatcagtggggacccctgaagggcagccttgctcttttgtccggaagttcagatgttggagggagccttgtcccgccatctggggaataggggtctctggggctggggcagggctttacatacacacatttcttttttaattattattattaattttatttttttgagagaggatctcactctgtcaaccgggctggagtacagtggcccgatcttggctcgctgcagcctccacctcctgggctcaagtgatcctcccacctcagccccaccaagtagctgggaccacaggtgtgcgccactatgctcggctttttcattttttgtagagatgaggtctcgttaatgttgtccgtgctggtcttgaattcctgggctcaagcgatcctcccacctcggcctctcaaagtgttgggattacaggtgtgagccaccaagcccggcctcacacgtttcacatcactcctcttagcagtccatgaggtgtatgctctcatcccgtttcacagatgaggaaaccgaggcccggatgaagccatctgacctgggtccctcgggtggcagagctggatttcagtgcacttccgctcactccccagcccctgctgcttctgctgggtcaggccccagctgagttctttcctcagcgttgctgagcccatcctgaaggctgcagtgatggggcagggccgtgcttggtcaagggagccctgagtgtgccaacagtcgtctgccgccctctgttccctcctcgccttccttccttatgccacagggtgatcaggtaactgtactgacttgagcccagagaagagcagcccactcccgtaagacagccccccatttcaggaagacatgggtttgaatgcagataagacagccccccatttcaggaagacatgggttggaatgcagagtcctgccacttgggaactccagggtggaattcaccaagtaattgtgcatttacggggcctgaggagatggagggttaatttccatgttgaatagatgcgcctgcttacctcctagaacattacctcctagaacactgtgtgccctgcagagccatcgacctttattataggccacgtgccctcggaaacttgggacagtactgatgcgttctgttgagtgcgtttggcatgtgggaattgtgatggtgcacagtgtcttggccttcactgggttttgtaggcacactaaggtttccatttcattcttcttcagttgccctggcccagcctgggtctctgggtagagcacctgcaggggcagtggacggcctgggctcagggtcggtcagcacctgagaccagcgctcctaggcctggcctgtgactgggctgattttcccccacacagcgtgctaccaccggcctggcagagccagcacggcagccggcgtgtcagtgaggctccagcacaggcagcctcctccaaatgttgttcattcctttctgtgctttttcctctatagcagttcagttagggtcgccagcttgcttttttgaaaatcatagatttttagtttgttttaaaatgacgcagaactaggagaaaatgcaaatggctcctagttttctgaggcttttacacacatgcagtgtttgactgcagttagtttgggattgaaagtggactctgaggccaggtgcggtggctcatgcctgtaatcacagcactttgggaagccaaggcaggcggatcatgaggtcaggagttccagaccagcctggccaacatggtgaaaccccatctctactacaaatacaaaaaaaaaagttagccgagtatggtggcacatgcctgtagtcccaggtactctggaggctgagacaggagaatcacttgaacccaggaggcggagattgccgtgagccgagatgtgccactgcactccagcctgggcgacagagcgagactccatctcaaaaaaaaaaaaaaaagtggactctggaaagtgctctgcttccgtggcgactggtcggctgaacttggtctcacttgtcactcagttctgctgtttgtacctgccaagtaagggagggggactcgggaggctgggcagcctccagccccaccgcctccacctgcatcactttgggcgagtcatatgtgatgaactgggccggctccagtctcccctctgtaacgtggggagaattctccctctcacggctaacgtgggaatcggcagatggaaaacactagctacgcagagtgtgtactgtacacgtggctctgccaagccaggaagggtaggtgtgctgtctgaccgtcacggcatgtggcgtgctctgagtgtaactcgaaaggagaagtttatgagaaagattgaaagaagccagaaaactgacgttcgtcttagttttttgccattgatcattgaactcgagagtggagaactggacggttctaagccaggtttactcacacctctgctccgttgccttaaagccagaaatggttctttacaatcacatagggaatgtcggaggaactgcagggtcacctaacagatgtcagctgagactctcaacaaaaaaacgtttttaccaagaaagctaatgccttcacaggtagggcgctgctggaggcatgtgctggccgccgggcagtgaacctggaaagtgtagagtccttgaaaccactgtggcacgaacacatcctgtggttgttggaagaaggcacagctgacactatatcagtggaattttctgccagcaactagcttactccattttccaagatttggctgaatttattttaggtgtttttttttttttttcttatcacttgagaacattttttcatgtgatgtttcatctttgaaaatattataatctgaagtatgagctggaataatttctttgtcatgtaaaatccttgtttttttttttggaggtgcgaatttttcttacattaacccgtggtggtcttttccctagtagttgctattgagtgttgatgtctgcctctgacaggctaggggtagtctgtctaagtgaacagaaggacattgttgaaagtgaagtatcattatttttattcctgcatcgtcttttgttctttattcttggcagcggtaaaactcctccaggcagctgacagctttaaagaccagaccttctttctcagccaggtttcccaggatgccctgaggagaaccatcttccctctggggggattaacgaaagagtttgtaaagaaaatcgctgctgagaatagacttcatcatgtgcttcagaagaaagaggtacgagtgagcagttgcctttgattagtgcctgtttccctttcccgactgcatggcacggagcagctggacctgtgggtcccgcaccacttccccttctccaggacctaacatcaaaggcgggccttggagcaatagatggaggagtttgctgaggcgcacggtacagggctctgctgacatcgggagcagcctatacgagactccttgcttttttcctctcctctgcccctatgtggtaggcagctttccccacagccttagcagctggtggggtgctcttgggatggcctgcctgccaggtgagtgccaggcagtgtgatgcagccccgagacccctggaggggcaggtgctgtgccgccgtctgcacactcatgtgccctgtcacccgcttgcccggcacagactcgttcggtgccatctgttcgggcgctgtgctgctgggccgcgaggaattggtgacgcgcacacagttccatcttcgcctccatggagcccgcccgcgagtgggggacacaggcaggaggccaatcagtgtaaacctagaaaatgtctacggagggaggtgtaggaccctgggtgggaagcaccagtggggtctgagagtagggaatggagatgccaaaaacggcctcaaaagaagtcacatggaacctgagacctgaaggaggagaggatccggtgtcccagagagggctgggaaagtccagatgagggaacggcagtgcaaaggccttgaggcgaggagaagccagggagccgctgtgggggtgcctgcctgtggccccagctcctcaggaggatcgagcgcacccaggagtttgaggacagcctgggcaacacagcgaaactcgtctcaaaaagagagaacccggagtgttggcggaactaggatgaagcccgtgggagggccttggggatggagggcgagggcgctgtgggatgagcctcacctcttcaggggccagtgcggtgggagctgttgctccttcgtgtctcttcctggtaatggaaacggccatacctttcatcagagccatcttccctgaagagcacgcccaccgcccgtcctcctctcctcttgttttccgtttccggtgtcgctctgtggtgggagccgcagggatggaagggcagtcttgagagacacaaaccagagtaaacgatgcagcccctgatggggccacggtggagagcgcacgccacccaggctccccagctagggcagatgtgcttgaggaaggcgcctctctcctctgactcccctggagccctcccctaaggccttagcttcaggcctggctttcctgctacctgccccttctctggtccctgtctctcccccactcctcgcaggacagtggcctgaaggacctgaccgggttctgctttcttccccggggcagctggtgtgagggtctcccgcgcagggtcagaccccgcgggccgagacaatgaggcgttctctaaggctctggcatcgtgtgcgccggctgtgactggcggccgagggtgccggtgggcagccgggcccctaccctggaagcaaagtgtggggtgaggccgggaggccccagggcccgctcaggacgtctgggtacagcttgggccaccgccacttctgctcctctcacggctgccgtcttctcatttcagagcatgggcatgtgtttcatcgggaagaggaattttgaacatttccttcttcaggtgcgtgctgctctttgacacaaagagatggggctgcgtgtctgccctgggcctagatctccgtcggtaatgacatgtttgttttccagtatctgcagcctcgacctggtcactttatttccatagaagacaataaggttctgggaacacataaag

SEQ ID NO: 14697 - DNA, 814 bp, Homo sapiens
gaaaatgatgactgtgctgtgctctctacttcctgcggttactgcgtgattctaaagctgccactcggaacagcgagtcctctgccgtcgagagcagggaggggtagggtggacaggcgatgccgtggaaagacgtctcggtggaaactgccatggtggaaaggtggcgcgcttctcacggctgagttgctgcgcctgcagacggaagctccccacaggcagagctgcttggatgtgtgagtcatgaagccagagaagccccgctccatgagcagtgactccccaggttaccaggtgacaggggtgtttatgaagaactgggactcactggatgaacatggggtctgtactgccgacaaagactgtgaagatgcttacagagtttgccagatcttagacatccctttccatcaagtgtcctacgtaaaggagtattggaatgatgtgttcaggggcagatgccattgccacaggtcactatgcaagaacttccctggaagatgaagaagtctttgagcagaagcacgttaagaagcccgaagggcttttcagaaatcggtttgaagttagaaatgccaggtttcccaggatgccctgaggagaaccatcttccctctggggggattaacgaaagagtttgtaaagaaaatcgctgctgagaatagacttcatcatgtgcttcagaagaaagagagcatgggcatgtgtttcatcgggaagaggaattttgaacatttccttcttcagtatctgcagcctcgacctggtcactttatttccatagaagacaataaggttctgggaacacataaag

SEQ ID NO: 14698 - DNA, 4509 bp, Homo sapiens
tgtcaggggacaggctccgagtcagtcacagtgtgcagtcctgctgtggggacagagtgcagccattgttgggttagtacagtggcggggatgtgcctgccggcgtgatgatcaggcaggtcttgacacagcacagacctgagctgtgggactggccaggagagccaggctgcagctcaggtgtagggcgtcttgcagtgaattgcacttggagatcttccacctcttgtggaggggagacggcaggcggagccggggctaggcattcctgagacaggtggaggtgacagctttgcttgggacagaactgccagacaggattgcccatgtatctgccagccctggccccagcaggagccagttggatgactcatggcttccacctgcagttcacttcactgaagaaggctgccggcccaggccacgtggtaaatcccatgaggttctctctgcctgtgtgccccactgcaggggagggaggcagtgagtttgccatctgctgtgtgacattgtgagggtgcgcagagcagctgggggtagccctgatgcagttactgcattagatggacactgtgaagacgtgcagctatgtcatgggctcagcaagaagggcccctggcgtcacacagggcacccagccgcatcctgggcctagggtcaggggctcctacagctggaacctgcaccttctggggcacaaggtgccttctttgtggccaccacaccccatgtccagcccaggcctggacaatgatgagatgtgctcaggtgcttggtcagggctggctttggtggttggagaatcgtatcttcctagtgagttacaccattgctgggcctgctctgggctgccctcccagcatctgccttcatgatgaggcgtgacatgtgggctgtaacttgttgcccagcctcatggagaaactgtctttctgtaggttggttcctgtataccttgggccagagagcaaacataggtggcctgagagagccctggtacgtggtggagaaggacagcgtcaagggtgacgtgtttgtggtgagtgggccggcctctgagacagcactggggctggttctggcagggccagcagtgcttccagaccagggcttgagaaggcctccagcagccgtggcttcctggaggctgtgactaactctgttcctgtccttggtcccctgcctttcctgggactggccatggtggcaggagagttttaaggtattcattaggctgagttgtatgctggtctcttaatcatccctgaaccccgatacacagatacagtttctccaattttatgaaagaggacagcgacgcccagagcttgggtggctcatccggtggagagggcatggcctcagtgccaaggatggtgcccaccatggtaggatccagtgagttgttgtcaggcaggtgcagatggccaagccaggatcaaaccaagccttccaccacagtggggaccttaccactgtgaccctggcctcaaagcagggccgctcagtggcggcaagctcaccccaccttcaggggaccttgccagtgtctagaggcatttttggttgtcacagcttgggtggaaaagcaaggacgcgggtgctgctgcatctgtgggtcaggccggggatgctgcttgccgtgttcagcacagcctcttccctgagtgacccggcctccaccttggcgcgtggagctgagaaggcccactctcagcaccctggctgccggctcatgttctggcacgaatgctggggcgccttctcttagacggaggcgggggccagcaggccccacccaccgattccaggacatctccttactaggaagacctgtggggagaaaagcctggctgcgaatgaattaaatgatctagatttcagtttgctgtgagaagaccagaagggttaaccaacggcctcctgtccctggacgggtcttggtgcctgcttagaacccaaagcccttaacttcatgctcctcgtcctgcttcaggggcggggcttggcacaatcccaggaggtgccaggtctcaatggcccgaggccatgggtgggtgacagggagcaggggcctcagaaccaacctagggtatctggggccccccagaccagggccagtcctggggcacctgtgggaagccagcagctaccagtccctcctttctcctcagccatttggtgtgtggaggaattcctggggtggccttgagagaagagcccgtggtgtggctggcccctgtccctgcgaatagaaaaaccagtcctcgaggggggccgtgctgctgccccacaggtggttgcaggtagagggcctgagtcagacttgaacctgcagcattcactgtcatgggctcggatctcacccctgcctcttgcccactctgacatggtacttccttcctgggccttagtctcctcatctgtaaaatggggattcaaaggcccggcgggtgatgagatgaatttctgtgggtagaacacttcgagcggtgccagcaccgttacctgtgtgtgtgtgtgctggtaggacagttgttcccagggaccacactgaggccggccttggggccaggtgcccctcggcgtccccaccttcacattccattctgcaggccccccggacagaccacccagccctgtacagggacctgctgaggaccagccgcgtgcactggattgcggaggagcctcccgcagcactggtccgggacaagatgatggagtgccacttccgattccgccaccagatggcactaggtgactgacgggagggctcctgaggacgggccccttgaagctgagcttcctgaggccagatttgggccagggatgggagaccctggggtaggaaagtcccgttgtggagatcatttggagattacctaaagtatttagaactcccgtgtcctgtgcctgccctgagcgaggcctgggggtgctgggagcagatgcaggcaggccccggcgtgttgggctgaagcaagtgtgtacactgccccgcagtgtcctgctgcgtccagggcccaggctggtgccctgcccttcccctctaagcaggggtttttgaccccgtgggctggtgctcctttctccctgggggcctgaggtcgaccaggaaaggcctgtgccccctccaagggcccctctcttctacccagtgccctgtgtgctgaccctcaatcaagatggcaccgtgtgggtgacagctgtgcaggctgtgcgtgcccttgccacaggacaggtgcgtggggtgtgggggtgagcccggggaggactgtactgctctgcaccctgccagggcacccgggttacagaggaaggggctgaggcccaggagtagggtgtgctcgggtcacacagctggtgagggcagagtgccaccagccctgccctgggggctcctcccacagtgacaactgtgagaggatttccactctggtgtcaccaaccagccagttcctgctcgggccctgagaggctcagctgctgcccgggccccagaagcgaggacagaaaatggaaggggcatgaggacagtgctcaaagaggcagagggtcggggcccctgtgggccgagtgtgcaggagctcccagggtgggcgcctggtgggtgtaggcctgaggaatctccaggggcaggtggtgggagggaacctggggtgagggaagcggaagcatcctctggctgccaccatgctccttcctgtcacagctccacattcccaaggggtgcagagacctgccagtcccttggagtcccaggagaggcccctgtgactgtcccactcagggagaggtaccctgaagaccctccctagtgaagccactgggtgccccaggcctctcctctcctgttcagcagcagcagcagcagcaaaaccctgctcccctgggagctcagtgcctggtgctccgagcacaggccaggccccataggggagcactctgcccctgcctgccctcggctggctccctgtggcacccctgatgccagggtctctcccctacagtttgctgtgttctacaagggggacgagtgcctgggcagcgggaagatcctgcggctggggccgtctgcctacacgctccagaagggccagcgcagagctgggatggccactgagagccccagtgacagcccagaagatggtccaggcctgagtcccttgctctgacagagatggatctgctagaaggaacctggagagcaggacccatggctgggcggctggtgagcagtccaggtgcccaagggccagcttgctgctgcccaaagcagaggaagccgggctggctgagggtccgaaaagcctgcaggggcccggcgagccccaggaagagcctcagctccaggctggggctctggctgctggagcatctgctggctggtggggtggcccgagttccccttcaccgcccccagggagggtttcccacctcagagtacaccgaggggacctgcagagggggctgtcgggacagcgtggaataaacattatttcaagg

SEQ ID NO: 14699 - DNA, 2933 bp, Homo sapiens
tgtcaggggacaggctccgagtcagtcacagtgtgcagtcctgctgtggggacagagtgcagccattgttgggttagtacagtggcggggatgtgcctgccggcgtgatgatcaggcaggtcttgacacagcacagacctgagctgtgggactggccaggagagccaggctgcagctcaggtgtagggcgtcttgcagtgaattgcacttggagatcttccacctcttgtggaggggagacggcaggcggagccggggctaggcattcctgagacaggtggaggtgacagctttgcttgggacagaactgccagacaggattgcccatgtatctgccagccctggccccagcaggagccagttggatgactcatggcttccacctgcagttcacttcactgaagaaggctgccggcccaggccacgtggtaaatcccatgaggttctctctgcctgtgtgccccactgcaggggagggaggcagtgagtttgccatctgctgtgtgacattgtgagggtgcgcagagcagctgggggtagccctgatgcagttactgcattagatggacactgtgaagacgtgcagctatgtcatgggctcagcaagaagggcccctggcgtcacacagggcacccagccgcatcctgggcctagggtcaggggctcctacagctggaacctgcaccttctggggcacaaggtgccttctttgtggccaccacaccccatgtccagcccaggcctggacaatgatgagatgtgctcaggtgcttggtcagggctggctttggtggttggagaatcgtatcttcctagtgagttacaccattgctgggcctgctctgggctgccctcccagcatctgccttcatgatgaggcgtgacatgtgggctgtaacttgttgcccagcctcatggagaaactgtctttctgtaggttggttcctgtataccttgggccagagagcaaacataggtggcctgagagagccctggtacgtggtggagaaggacagcgtcaagggtgacgtgtttgtggccccccggacagaccacccagccctgtacagggacctgctgaggaccagccgcgtgcactggattgcggaggagcctcccgcagcactggtccgggacaagatgatggagtgccacttccgattccgccaccagatggcactaggtgactgacgggagggctcctgaggacgggccccttgaagctgagcttcctgaggccagatttgggccagggatgggagaccctggggtaggaaagtcccgttgtggagatcatttggagattacctaaagtatttagaactcccgtgtcctgtgcctgccctgagcgaggcctgggggtgctgggagcagatgcaggcaggccccggcgtgttgggctgaagcaagtgtgtacactgccccgcagtgtcctgctgcgtccagggcccaggctggtgccctgcccttcccctctaagcaggggtttttgaccccgtgggctggtgctcctttctccctgggggcctgaggtcgaccaggaaaggcctgtgccccctccaagggcccctctcttctacccagtgccctgtgtgctgaccctcaatcaagatggcaccgtgtgggtgacagctgtgcaggctgtgcgtgcccttgccacaggacaggtgcgtggggtgtgggggtgagcccggggaggactgtactgctctgcaccctgccagggcacccgggttacagaggaaggggctgaggcccaggagtagggtgtgctcgggtcacacagctggtgagggcagagtgccaccagccctgccctgggggctcctcccacagtgacaactgtgagaggatttccactctggtgtcaccaaccagccagttcctgctcgggccctgagaggctcagctgctgcccgggccccagaagcgaggacagaaaatggaaggggcatgaggacagtgctcaaagaggcagagggtcggggcccctgtgggccgagtgtgcaggagctcccagggtgggcgcctggtgggtgtaggcctgaggaatctccaggggcaggtggtgggagggaacctggggtgagggaagcggaagcatcctctggctgccaccatgctccttcctgtcacagctccacattcccaaggggtgcagagacctgccagtcccttggagtcccaggagaggcccctgtgactgtcccactcagggagaggtaccctgaagaccctccctagtgaagccactgggtgccccaggcctctcctctcctgttcagcagcagcagcagcagcaaaaccctgctcccctgggagctcagtgcctggtgctccgagcacaggccaggccccataggggagcactctgcccctgcctgccctcggctggctccctgtggcacccctgatgccagggtctctcccctacagtttgctgtgttctacaagggggacgagtgcctgggcagcgggaagatcctgcggctggggccgtctgcctacacgctccagaagggccagcgcagagctgggatggccactgagagccccagtgacagcccagaagatggtccaggcctgagtcccttgctctgacagagatggatctgctagaaggaacctggagagcaggacccatggctgggcggctggtgagcagtccaggtgcccaagggccagcttgctgctgcccaaagcagaggaagccgggctggctgagggtccgaaaagcctgcaggggcccggcgagccccaggaagagcctcagctccaggctggggctctggctgctggagcatctgctggctggtggggtggcccgagttccccttcaccgcccccagggagggtttcccacctcagagtacaccgaggggacctgcagagggggctgtcgggacagcgtggaataaacattatttcaagg

SEQ ID NO: 14700 - DNA, 2523 bp, Homo sapiens
ctacggccggggcgggacttccggcaaggcgcggaagcggcggtagctgcagctggcgaagttgggcgactggcggatgcaggccttgcggcacgtcgtgtgcgccctgtccggcggcgtggacagcgccgtggccgcgctgctgctgaggcggagaggtgaggcgtccgaggctcccgccccccgccgagcgaatgtgtccccggaaacctgtccccgtccgtcgtggcgttgtgcacgtctcctccctccctgggccgctggttgcgcgcgggtcggcaggaggataccccgtcctctgactttggttcggaggctcctcgccctccacctgtgtagtcggaggtgtgcgcgactgcagctccgactacctgggagcagttccgcgcccctctccacccacgcgcgcccacccacagtgagaagccggcgggccggggtggggtggggagggaagggtttctcacggatctgcggcgtccacattcacctgtgagaccgtggacactggtgaggggagctgggatcgccgggccgggggcctgacctctgcacacgctgtggccgcccggtgggaggtccttgtcctccccactcagcagactggacaactgccgcgcggcgggtctgcttgttcagcgtctcctgtgttctccgctcgctggaggacaaagttttctccaggagcatttgcatttcttccggcatctaaacggagccccacgggtgcttagcattcctcgggcccggcgctgaaatgagcacttgtttaacttcacctgtgtggctccccgcgggaggcctcattcacagagtcacgtttgtggagctctgctttgcgccatctttggctcctgaccttgggcaagtgaattaagccgtcccctgtaaaattcggctaacacctgcctcacggggtgactggagggattagatgacatagtacatactgatgagtacgtgctcagcacatacgaggtacgcagaaaacagtagtggctattagtttatattgttaataaccatagctattatggtaggtacagtaagtgccaaagagaagggtaggcggaccataagcagaaatagttgtgaggaagggagagtggaggaaagcatcctagagatggaggtgctcagctgagtcgaaagaagagtaggatgtcactaagcagagacttggaggtggaggcggccctcccggcacagtcagcagtgcaagcagaatcacagaggcctgcaagtgtgggctggttctggccagatggagatggaaggagaggagcctggagcacgtttagccctgattatggaagatgctataccaggggctttagactgttaggtagacattagtctggttgatctgggataggggtggtctttcgcgtgtggtggtgtagttttgacaaagctttgtcatcaaatttctgttgttttgggtactatatgaagccttcttcagcagtcatttgccctgtctttcattacattcagcctacctaaacgaaccagctttctcatacagggtctgcacctgtgtagtttgctaaggtggtgtagggctaaagttggcctttccaatatttgggtgaatattttgttacaatcgaaaaggtagaaaataggtcataaactaggtggtacagctcttacaaaatatcgaaaattttaattatctttatatctgatcacttagaatctaagtcttagatagtaactagaaataacttttgaaaagagtttccttttttgataactgaatggtgctttgaaaaattttgttgagtttcgactattccttcgtgtattccacacacactggctgatcccctcctgctaggtattgtgctgatacatagatggggacacaaagatgagaaaataccacctcgttaatcttggggactcaggcaccaagatggaaaccggatccctgaagccacatggcaaagcagggactgcccggcaggccaggcacagaggcacaggagcacagcgtgtggggaacttctcagagctcagaaatcactgccgttttaccgaaggttgatttatgtattctctttaattgaccttcccgcccgcaggttaccaggtgacaggggtgtttatgaagaactgggactcactggatgaacatggggtctgtactgccgacaaagactgtgaagatgcttacagagtttgccagatcttagacatccctttccatcaagtgtcctacgtaaaggagtattggaatgatgtgttcaggtgagtgcgggtcacagcacaaaggaagcttcctcacactgtggatccttgcagtggaaggatccggtaaccagccagaccgacgcctgtgctgcagcccagcgctctccctccacggtggtgctgaagactgcaagaggcctcagccaccctcggggctctgtgttagaggcgaggcctggaccccacagcacacccagctctctcactcctgtcattttgccacttgcctgaagtctctttaatgctttcttggaccttgagctg

SEQ ID NO: 14701 - DNA, 591 bp, Homo sapiens
ctacggccggggcgggacttccggcaaggcgcggaagcggcggtagctgcagctggcgaagttgggcgactggcggatgcaggccttgcggcacgtcgtgtgcgccctgtccggcggcgtggacagcgccgtggccgcgctgctgctgaggcggagaggttaccaggtgacaggggtgtttatgaagaactgggactcactggatgaacatggggtctgtactgccgacaaagactgtgaagatgcttacagagtttgccagatcttagacatccctttccatcaagtgtcctacgtaaaggagtattggaatgatgtgttcaggtgagtgcgggtcacagcacaaaggaagcttcctcacactgtggatccttgcagtggaaggatccggtaaccagccagaccgacgcctgtgctgcagcccagcgctctccctccacggtggtgctgaagactgcaagaggcctcagccaccctcggggctctgtgttagaggcgaggcctggaccccacagcacacccagctctctcactcctgtcattttgccacttgcctgaagtctctttaatgctttcttggaccttgagctg

SEQ ID NO: 14702 - DNA, 14526 bp, Homo sapiens
aaacctgtccccgtccgtcgtggcgttgtgcacgtctcctccctccctgggccgctggttgcgcgcgggtcggcaggaggataccccgtcctctgactttggttcggaggctcctcgccctccacctgtgtagtcggaggtgtgcgcgactgcagctccgactacctgggagcagttccgcgcccctctccacccacgcgcgcccacccacagtgagaagccggcgggccggggtggggtggggagggaagggtttctcacggatctgcggcgtccacattcacctgtgagaccgtggacactggtgaggggagctgggatcgccgggccgggggcctgacctctgcacacgctgtggccgcccggtgggaggtccttgtcctccccactcagcagactggacaactgccgcgcggcgggtctgcttgttcagcgtctcctgtgttctccgctcgctggaggacaaagttttctccaggagcatttgcatttcttccggcatctaaacggagccccacgggtgcttagcattcctcgggcccggcgctgaaatgagcacttgtttaacttcacctgtgtggctccccgcgggaggcctcattcacagagtcacgtttgtggagctctgctttgcgccatctttggctcctgaccttgggcaagtgaattaagccgtcccctgtaaaattcggctaacacctgcctcacggggtgactggagggattagatgacatagtacatactgatgagtacgtgctcagcacatacgaggtacgcagaaaacagtagtggctattagtttatattgttaataaccatagctattatggtaggtacagtaagtgccaaagagaagggtaggcggaccataagcagaaatagttgtgaggaagggagagtggaggaaagcatcctagagatggaggtgctcagctgagtcgaaagaagagtaggatgtcactaagcagagacttggaggtggaggcggccctcccggcacagtcagcagtgcaagcagaatcacagaggcctgcaagtgtgggctggttctggccagatggagatggaaggagaggagcctggagcacgtttagccctgattatggaagatgctataccaggggctttagactgttaggtagacattagtctggttgatctgggataggggtggtctttcgcgtgtggtggtgtagttttgacaaagctttgtcatcaaatttctgttgttttgggtactatatgaagccttcttcagcagtcatttgccctgtctttcattacattcagcctacctaaacgaaccagctttctcatacagggtctgcacctgtgtagtttgctaaggtggtgtagggctaaagttggcctttccaatatttgggtgaatattttgttacaatcgaaaaggtagaaaataggtcataaactaggtggtacagctcttacaaaatatcgaaaattttaattatctttatatctgatcacttagaatctaagtcttagatagtaactagaaataacttttgaaaagagtttccttttttgataactgaatggtgctttgaaaaattttgttgagtttcgactattccttcgtgtattccacacacactggctgatcccctcctgctaggtattgtgctgatacatagatggggacacaaagatgagaaaataccacctcgttaatcttggggactcaggcaccaagatggaaaccggatccctgaagccacatggcaaagcagggactgcccggcaggccaggcacagaggcacaggagcacagcgtgtggggaacttctcagagctcagaaatcactgccgttttaccgaaggttgatttatgtattctctttaattgaccttcccgcccgcaggttaccaggtgacaggggtgtttatgaagaactgggactcactggatgaacatggggtctgtactgccgacaaagactgtgaagatgcttacagagtttgccagatcttagacatccctttccatcaagtgtcctacgtaaaggagtattggaatgatgtgttcaggtgagtgcgggtcacagcacaaaggaagcttcctcacactgtggatccttgcagtggaaggatccggtaaccagccagaccgacgcctgtgctgcagcccagcgctctccctccacggtggtgctgaagactgcaagaggcctcagccaccctcggggctctgtgttagaggcgaggcctggaccccacagcacacccagctctctcactcctgtcattttgccacttgcctgaagtctctttaatgctttcttggaccttgagctgtttctgttgcccagttaggataggggagctaaggctgagggctcccctggaaggtgagcaccaatgcctgtgtgctatgtgggtcagcgattaggggatttctgagaaagaggtgatacatggcctgtgcctctgaaaacaagaaacaaacaaaaacttttctaaaatccaatataatctcaataattaagtgctgtgtgctaggcgtgtgccacatctaggaacattaagatgtcttcactgtgacctggctctgtaggagtttgcggtctagttgggaggacattatcttcacaagaggtgacagtgatgcgtggcacgcaggaagtaccagtgatgctatcagtcactgaacccagaggagggagaaacttgcagtgtggagtaatcaagaaggcttcaccggagaggaggggttgcaaacaaagttgtagagaagggactccaaatggggtaacgagagcagcgtgaaggggagaagaaatgctgattgtgtatttcaggaccgttgtaaagtttggctggacttttgttcctgcagtggaaggagtgtagggctcatcctctggtgagccctgactgtgatgaatgtcgggcagttgtcgaaggcgtctgacacagcaggccatgtgcgcgggacaggctgcccctgcctgagtgggctttaggggcagaagagccttgggttgagtcctgactgtagcttattatatgaccttgggcaatttacttgactttgtttttttaattgaaaaaaattctctttttttcctgccaacaaagacccagaagagatacttgacttttctaagccccaattttctcatctttaaaatgaggataacactgatgcctcacagggttatgaaagaattgagattaggttctagtatgtatgcctggtatattagtaagcagtcaataaacatagctgtttttcttttctatttttttttgagacagagcctcgctctgttgcccaggctggagtgcagtggcgcaatcttggctcactgcaacatctgcctcccaggttcaagcgattctcatgcctcagcctcccaagtagctgggattataggcatgcaccaccacgcccggataatttttgtatttttagtagagacagggtttcgccatgttggccgggctagtctcagactcctgacctcagaagatccactcgtctcagcctcccaaagtgctgggattacaggcgtgagccaccacgccagcctgctatttttattttcattattaaaaagatgagtctggggagctaagctatgaggacgcaaaggcataaaaatgatataatggactctggggtgagggataaaagactacacatcgggtacaatgtccactgcttgggtgacgggtacaccaaaatctcagaagtcaccactgaagaacttatccatgtgaccaaataccagctgttgcccaaaaaaccattgaaataacaataaaacgaaatttagagagattaagtaaattgactatggtcacctaaataatcaacggaagagcttgaatatgaaccctctgtgactctatgctataacatatgggtgtcgtatatattaacaacatggacaaaactgatggctgaattttcctggggaaagttacctgtagaatgcatgataaatgcattaaaaacttatctgtagaatgcatgataaatgcattaaaaacttctgcagttttctcggggacataagaaaaaaaaaagagtgtggcggccaaatacaggataaatctgggggaagaccaaaggcagagagtctcaggaagtgctgttgctggagatttggacttcatggggagggagtgtgggagtggaaggtgagggctggcttgttggacccagaggacaagtccaccgggcagtagatctgaggtgcttgttaaacacagacctggaccgaggtctgggggcggccctggaatctgctttaataagcacttcagctgtgctggtggtgtggggggttgtcagggtctttctttgagaaaaggtgtgatgcggcttagggactgatgtgtgtgggagaccagagaggagaggagtcagcagtagtttcaagatcaaggctgggtggctggggaaagctggtttaggggattcctcatgagtactgtagagtttgaggggacaacagggaatccaagtgagcttacacttcacctgccagcacagctttttcagaacgtacgagtggatgcgatttttgaagtttagctcagctgaggccagataggaagagtgacttgaatagtatggcaaattaggagcggagctgggattaaaccccagaattaggagcggagctgggattaaaacccagaattaggagcggagctgggattaaaccccagaattaggagcggagctgggattaaaccccagaattaggagcggagctgggattaaaccccagaattaggagcggagctgggattaaaccccagaattaggagcggagctgggattaaaccccagaattaggagcggagctgggattaaaccccagaattaggagcggagctgggattaaaacccagctttccaggccagtgcttgctgccgccttctggcgctgcttgatagggactgagagaaggaggcggccgggtagagtcttttcccatctctggggctgcccccgaggtcgcccctggctccagccagcctgccctctgccctcgcccagtaccagctgcccgtggaggcattggtctttccgctgaagactcacttctctagtagggctctctagctcagagatttcttttgcattctttcattcaagacccactggccttcaaggatcagagtccagatacgttttagctgctgagtcttttaaatctgtctccctcccgaggcacatgaaaggcttctcttctttccagttagagaagaggctgggctactccattgtttttgctaatgccaaaacacacgccttcccatctgctgtttacgaaagggttaacagtgtgtcttttcagaaactgattttaatgttcagcctcttcaacatttattgatgactgtgatatagaaagtttgttgggtctaggacacagacacagattgcaccttaagtagtttatagtttaatgagcttcctggtaactttctaataattaaagcaaaatggaaagagtgtaataatatcaagtgttgttgcaaatgtggaaaaacatgagtttttatgaacttctagggggactgagaagtaggaaaacagtttggtgcctgctaaagtggaagatatccaaggaacctctgaccctgtgcagatctgtgatatgtctgcaaaacacaaacctcttgatcagcactggttttttttttaacccttgttgattaatagagagttttaggttaaatgaaaaaaatcacttataccaaaaatacacccatttttaaactcccaaaataggcatcataaccctcttgaagtgaatcctcgaagactatgaaattcttggtaagttttgctggtatcatggcatctttttcccatgttcagtcagtctgttagagcagaagttcactgaattaggatagcctgatccactttaagcacccaagagtttgctagttctcagaagtgtgtgtttgtcacctgaggatagtatttttggtatatttgcccagtgacgcagcattccaggctgagattgcagaatggctcatggagcccttgtgtagggaagcctctgactgtgtttctcctctgttctcatcacggcagtcatcctcacggaagaaggcttctgtgacaaaggtgtggggggttttccccatacagcaagcagtggacaccgactgggtgtcctctgattcagttccgataccatctacttggagatagtgctggatcccaaaggttgggggttcagtcccccagacggactccccccacaacagcagtcgaaagtatgggcctctagaacttatgaccaactggcttccagttgggattcccataacttcctctttgggttcaattattaataatttgctggagtggttcacagaactcagaaaaacacatttaccagtttattataaaggatgttgcaaaggatacagatgaagagacgggttgggtgaggtatggggaaagggtcatggagtgtccacaccctccctggggaccaccctccaggagcctccacaagtgtagctgtgcagaagctctctgaacccagtactcctgggtttttatggaggcttcatgacatcgccattccttcccccaggatatacagtgggactgtgtctggggagggtcttaagacccacagtcagaaaggtagacgcttgtaatcctagcactttaggaggctgaggcaggagacttgcttgaggcctggagttcagtatcagcatgggcaacatggcaagacctcatctctataaaaaaagaaaaggttgcagtgggccaggtgcggtggctcacgcctctaattccagcattttgggaggctgaggcgggcagatcacttgaggccaggagttggagaccagcctggccaacatggtgaaaccccgtctctactaaaaatacaaaaattatctgggcatggtgctgcgcacctgtaatcacagctattcggaaggctgaggtgggagaatctgcaagggaagtctaaaggatttcatttccactgtcactcaggcatcttctcttcctcacctaagccctgctgtgttggaggagtcccagaggcagggttttagtgagaccctcacggccactccccactcctgaccccataagccctgtgagcctacacagagacggtggctcctgagccgtagtggcagagaataacaccttgtcgggtggcccatgcagcaggttataaacaaatgttcgatgactgacgttctcctgttttgcagaaaattatagttttggtatgacaaggggaaattacattaaacaagcaatttagtgaactttttttttttttttgaggaatgtttcacacttggaactgaagtcattttcttttattctagtgactttttgaatgagtatgaaaaaggaaggactcccaatcctgacatagtttgcaacaagcacatcaaatttagttgcttttttcattatgctgtggataatcttggtaagtaatttgggtttaaaacatttttttttttaaagacagggtctcgctctgtcacccaggctggattgcagtggtgcgatcatgactcactgcagcctcgacctcctgggctcaagagattctcccaccccaggctcctgagtagcttggaccacaggcatgccaccatggtggctaattttttgtggagatggtgtcacaactgtattgtccaggctggtctcagatttctggccttaagcagtcctcctgcctcggccttccaaagtgctgagattacaagcgtgagcccctgtgcctagcctgtttcttcttgtggaacctcctgatactgaattgcttgcttagaccacctcttgatgtctgtggctatgctttatgaattttaggttcttcttcctgtcccctgccattggggtcaccataatgagtttctgaagttctggctcaggcttcttggtttgctctgtcccactgcagctcaccctgttgtgtgttgctacgagataccattgtaagccaggggcccagtagtgtcggcactttcagcaatgatgtagattaggcttgcagattcaatatgtcagcaacctaaagctgagttgatgataatgatgaaagttagtttgtggagttaggaataaacaaatgcctacaaaaacaaaaaatcaaaaagaaaaatcttaaatttcaacattgggctaacaccaaaaacatgaaacttaatagagataaatgcaaagtttgctaactaggttcagtaattctcctaggacaagattggaaagacctagcttggttgccattgaatcttctgccattggttgcagaaaatctgggggatttaggtgcccccaggctgactgagccagtagtgtgatgtcttttgtcagagccagcacagacggagctcaccttgatgatcatagaatgtctaggaaggggtgatgcgtcccctgtggtccgtcctggttagaccgtattagttattcaggaaaagagtgatagactgatagaatgtgaattgatttttattttcagggtatctggaaatatgtcctccctgaactgttgaaattactttgggtcgtagtggcagtggtcaagcgtgtgagttaggatgacattctttgtgtgacaccagcagacagttaggactggcaggagaaagagttccctgaggtggaggcgcaggcagctgttcaggaagggaaggcttgcctttggagagcattaagctgtcacgaaagctttttagggagcccctaggtggctggctgtcaggcacgctgtggaaggaacttctgcagtgaatgtttccacacctggaagaaaggcatgaaccgtgcagcacaggatgagaggacatgacgcccagacttctgaactcaccgcgcttctcagaggcatcctgcgctttttctagtataagtgctgttctttgaggacacagatgtaaagtggattgttttctctaggagaacctcagtcaagatgagattatgtgtctctaaagtgcctttttcaggtcgttaatatgcagcagctaattcttgctgtgtcttctgtttacatggagctagtgtggctggtccaggatggctgtgtcttctgtttacactgagctagtgtggttggtccaggatggaatccattttgctgcacctttcataaaagtctcttgcaatactaaatatctgtaattttttctttttttgagatggagtctcactctgtctcccaggctggagtgcagtggtgtgatctcggctcactgcaacctccacctcctgagttcaagcaattctcctgcctcagcctcccaagtagctgggattacaggtgcccaccaacatgtctagctaatttttgtactttttttgtagagacggggtttcatcatgttggccaggctggtctcaaactcctgacctcaagtgatccacccacatcggcctcctaaaagtgctgggatgacaggcgtgagccgctgcgcctggcccaaatatctggaatttttacacaatgaaaaggttctggattcatatgcaccttgttaggctctttggctttgtgtaatatgaaaagaagaaacagtgtgctggatgattcttcactctgatgaaaataatacatatttattacagaaaatttaaaagaggagaaacgacacctataatttcactctcagaatcaaaggaatagacctgagatttttcttcaactgtttctgtacagtaaaaaccgtggaatcatggtgttacatcctcgccctgctgaacagtgccgggcattttcccgtgttagtaaacattctctgtaaggacccccattgttacggcagtgcattgtcattcacttcacattctcccagtgttgaacattttggttcttttttttttttttttcctcctgagacagcatcttgctctgttgcccagactagagtgctgtggtgcagtcttggcttcctgcagcctcaacctcccaggttgaagcaatcctcccacctcagcctcccaagtggctgggactacaggtgtgccccaccacgcctggctaatttttgtattttttgtaaaggtgggatttcaccatgttgcccaggctggtcttgaactcctgagcacaagcaatcatctgcccgcctcggcctcccagagtgctaggattacaggcatgagccaccgcgcctggcctcccttcgtattatcacaaaccctgaaaggaatattttgtgtttaaatctttctgtgcctttcagactgtttccttaagccagaaattaactttggaaaggctcttaaaggtgcaataacactttaagtagcaaggttgtatcagcttaagagttcaaggctgcttgtttgatgaaattggatgtgtgcgtctgttccctgggatctctatgtttgggtgcagggtggattgtgcagcccctcagcctaagacttggggtctatactcttcttttgtgccttggtttatgctgatcaaggcctgcaagtatgagtctaaaacctgatccttgtgttctaaaaacctcacaggggcagatgccattgccacaggtcactatgcaagaacttccctggaagatgaagaagtctttgagcagaagcacgttaagaagcccgaagggcttttcagaaatcggtttgaagttagaaatggtaagttcatgtgcccaggtcagagccaaattcttgtgaacagattgaaatctttggaggaatgacagtgggttgtgcctgaggatcactgccacccctccctctgtgctccagagtagcttgtatgggattcacatttgaaaaggtgcagttaccaagaggacattttcccggagggcctgtgattgggtagtaaacagtgtccctgccggccatggtgagggctggtggaaagtgacatcagatactgataatccagctctcgacactgtgtggtgatttgaatgttccaaaaatatctgggtaaatatttgacagtgataattggggtgctgtcagtctagccaaggacctgtacttagcaacaagttctcaagggcgtgcggttcaggcagactttcaacgtgctgtgagcacaggacctgctgtggatcgcatgggctcagcagtcaggctttgtagccgtatttacacgttagtttatgcgtgttagggagccaagtttcacctttctagaaaaaagtcaatggcagacagtgagctgggaagctgctggcctgtcctggtgtacattcgtgtgtagaaaagaggaattccctgtattgttgagtgaaaaaccaagtggggctcagagccgtgtttccgcacggagcgtccgtccatcagtggggacccctgaagggcagccttgctcttttgtccggaagttcagatgttggagggagccttgtcccgccatctggggaataggggtctctggggctggggcagggctttacatacacacatttcttttttaattattattattaattttatttttttgagagaggatctcactctgtcaaccgggctggagtacagtggcccgatcttggctcgctgcagcctccacctcctgggctcaagtgatcctcccacctcagccccaccaagtagctgggaccacaggtgtgcgccactatgctcggctttttcattttttgtagagatgaggtctcgttaatgttgtccgtgctggtcttgaattcctgggctcaagcgatcctcccacctcggcctctcaaagtgttgggattacaggtgtgagccaccaagcccggcctcacacgtttcacatcactcctcttagcagtccatgaggtgtatgctctcatcccgtttcacagatgaggaaaccgaggcccggatgaagccatctgacctgggtccctcgggtggcagagctggatttcagtgcacttccgctcactccccagcccctgctgcttctgctgggtcaggccccagctgagttctttcctcagcgttgctgagcccatcctgaaggctgcagtgatggggcagggccgtgcttggtcaagggagccctgagtgtgccaacagtcgtctgccgccctctgttccctcctcgccttccttccttatgccacagggtgatcaggtaactgtactgacttgagcccagagaagagcagcccactcccgtaagacagccccccatttcaggaagacatgggtttgaatgcagataagacagccccccatttcaggaagacatgggttggaatgcagagtcctgccacttgggaactccagggtggaattcaccaagtaattgtgcatttacggggcctgaggagatggagggttaatttccatgttgaatagatgcgcctgcttacctcctagaacattacctcctagaacactgtgtgccctgcagagccatcgacctttattataggccacgtgccctcggaaacttgggacagtactgatgcgttctgttgagtgcgtttggcatgtgggaattgtgatggtgcacagtgtcttggccttcactgggttttgtaggcacactaaggtttccatttcattcttcttcagttgccctggcccagcctgggtctctgggtagagcacctgcaggggcagtggacggcctgggctcagggtcggtcagcacctgagaccagcgctcctaggcctggcctgtgactgggctgattttcccccacacagcgtgctaccaccggcctggcagagccagcacggcagccggcgtgtcagtgaggctccagcacaggcagcctcctccaaatgttgttcattcctttctgtgctttttcctctatagcagttcagttagggtcgccagcttgcttttttgaaaatcatagatttttagtttgttttaaaatgacgcagaactaggagaaaatgcaaatggctcctagttttctgaggcttttacacacatgcagtgtttgactgcagttagtttgggattgaaagtggactctgaggccaggtgcggtggctcatgcctgtaatcacagcactttgggaagccaaggcaggcggatcatgaggtcaggagttccagaccagcctggccaacatggtgaaaccccatctctactacaaatacaaaaaaaaaagttagccgagtatggtggcacatgcctgtagtcccaggtactctggaggctgagacaggagaatcacttgaacccaggaggcggagattgccgtgagccgagatgtgccactgcactccagcctgggcgacagagcgagactccatctcaaaaaaaaaaaaaaaagtggactctggaaagtgctctgcttccgtggcgactggtcggctgaacttggtctcacttgtcactcagttctgctgtttgtacctgccaagtaagggagggggactcgggaggctgggcagcctccagccccaccgcctccacctgcatcactttgggcgagtcatatgtgatgaactgggccggctccagtctcccctctgtaacgtggggagaattctccctctcacggctaacgtgggaatcggcagatggaaaacactagctacgcagagtgtgtactgtacacgtggctctgccaagccaggaagggtaggtgtgctgtctgaccgtcacggcatgtggcgtgctctgagtgtaactcgaaaggagaagtttatgagaaagattgaaagaagccagaaaactgacgttcgtcttagttttttgccattgatcattgaactcgagagtggagaactggacggttctaagccaggtttactcacacctctgctccgttgccttaaagccagaaatggttctttacaatcacatagggaatgtcggaggaactgcagggtcacctaacagatgtcagctgagactctcaacaaaaaaacgtttttaccaagaaagctaatgccttcacaggtagggcgctgctggaggcatgtgctggccgccgggcagtgaacctggaaagtgtagagtccttgaaaccactgtggcacgaacacatcctgtggttgttggaagaaggcacagctgacactatatcagtggaattttctgccagcaactagcttactccattttccaagatttggctgaatttattttaggtgtttttttttttttttcttatcacttgagaacattttttcatgtgatgtttcatctttgaaaatattataatctgaagtatgagctggaataatttctttgtcatgtaaaatccttgtttttttttttggaggtgcgaatttttcttacattaacccgtggtggtcttttccctagtagttgctattgagtgttgatgtctgcctctgacaggctaggggtagtctgtctaagtgaacagaaggacattgttgaaagtgaagtatcattatttttattcctgcatcgtcttttgttctttattcttggcagcggtaaaactcctccaggcagctgacagctttaaagaccagaccttctttctcagccaggtttcccaggatgccctgaggagaaccatcttccctctggggggattaacgaaagagtttgtaaagaaaat

SEQ ID NO: 14703 - DNA, 576 bp, Homo sapiens
aaacctgtccccgtccgtcgtggcgttgtgcacgtctcctccctccctgggccgctggttgcgcgcgggtcggcaggaggataccccgtcctctgactttggttcggaggctcctcgccctccacctgtgtagtcggaggtgtgcgcgactgcagctccgactacctgggagcagttccgcgcccctctccacccacgcgcgcccacccacagttaccaggtgacaggggtgtttatgaagaactgggactcactggatgaacatggggtctgtactgccgacaaagactgtgaagatgcttacagagtttgccagatcttagacatccctttccatcaagtgtcctacgtaaaggagtattggaatgatgtgttcaggggcagatgccattgccacaggtcactatgcaagaacttccctggaagatgaagaagtctttgagcagaagcacgttaagaagcccgaagggcttttcagaaatcggtttgaagttagaaatgccaggtttcccaggatgccctgaggagaaccatcttccctctggggggattaacgaaagagtttgtaaagaaaat

SEQ ID NO: 14704 - DNA, 14668 bp, Homo sapiens
gcggcggtagctgcagctggcgaagttgggcgactggcggatgcaggccttgcggcacgtcgtgtgcgccctgtccggcggcgtggacagcgccgtggccgcgctgctgctgaggcggagaggtgaggcgtccgaggctcccgccccccgccgagcgaatgtgtccccggaaacctgtccccgtccgtcgtggcgttgtgcacgtctcctccctccctgggccgctggttgcgcgcgggtcggcaggaggataccccgtcctctgactttggttcggaggctcctcgccctccacctgtgtagtcggaggtgtgcgcgactgcagctccgactacctgggagcagttccgcgcccctctccacccacgcgcgcccacccacagtgagaagccggcgggccggggtggggtggggagggaagggtttctcacggatctgcggcgtccacattcacctgtgagaccgtggacactggtgaggggagctgggatcgccgggccgggggcctgacctctgcacacgctgtggccgcccggtgggaggtccttgtcctccccactcagcagactggacaactgccgcgcggcgggtctgcttgttcagcgtctcctgtgttctccgctcgctggaggacaaagttttctccaggagcatttgcatttcttccggcatctaaacggagccccacgggtgcttagcattcctcgggcccggcgctgaaatgagcacttgtttaacttcacctgtgtggctccccgcgggaggcctcattcacagagtcacgtttgtggagctctgctttgcgccatctttggctcctgaccttgggcaagtgaattaagccgtcccctgtaaaattcggctaacacctgcctcacggggtgactggagggattagatgacatagtacatactgatgagtacgtgctcagcacatacgaggtacgcagaaaacagtagtggctattagtttatattgttaataaccatagctattatggtaggtacagtaagtgccaaagagaagggtaggcggaccataagcagaaatagttgtgaggaagggagagtggaggaaagcatcctagagatggaggtgctcagctgagtcgaaagaagagtaggatgtcactaagcagagacttggaggtggaggcggccctcccggcacagtcagcagtgcaagcagaatcacagaggcctgcaagtgtgggctggttctggccagatggagatggaaggagaggagcctggagcacgtttagccctgattatggaagatgctataccaggggctttagactgttaggtagacattagtctggttgatctgggataggggtggtctttcgcgtgtggtggtgtagttttgacaaagctttgtcatcaaatttctgttgttttgggtactatatgaagccttcttcagcagtcatttgccctgtctttcattacattcagcctacctaaacgaaccagctttctcatacagggtctgcacctgtgtagtttgctaaggtggtgtagggctaaagttggcctttccaatatttgggtgaatattttgttacaatcgaaaaggtagaaaataggtcataaactaggtggtacagctcttacaaaatatcgaaaattttaattatctttatatctgatcacttagaatctaagtcttagatagtaactagaaataacttttgaaaagagtttccttttttgataactgaatggtgctttgaaaaattttgttgagtttcgactattccttcgtgtattccacacacactggctgatcccctcctgctaggtattgtgctgatacatagatggggacacaaagatgagaaaataccacctcgttaatcttggggactcaggcaccaagatggaaaccggatccctgaagccacatggcaaagcagggactgcccggcaggccaggcacagaggcacaggagcacagcgtgtggggaacttctcagagctcagaaatcactgccgttttaccgaaggttgatttatgtattctctttaattgaccttcccgcccgcaggttaccaggtgacaggggtgtttatgaagaactgggactcactggatgaacatggggtctgtactgccgacaaagactgtgaagatgcttacagagtttgccagatcttagacatccctttccatcaagtgtcctacgtaaaggagtattggaatgatgtgttcaggtgagtgcgggtcacagcacaaaggaagcttcctcacactgtggatccttgcagtggaaggatccggtaaccagccagaccgacgcctgtgctgcagcccagcgctctccctccacggtggtgctgaagactgcaagaggcctcagccaccctcggggctctgtgttagaggcgaggcctggaccccacagcacacccagctctctcactcctgtcattttgccacttgcctgaagtctctttaatgctttcttggaccttgagctgtttctgttgcccagttaggataggggagctaaggctgagggctcccctggaaggtgagcaccaatgcctgtgtgctatgtgggtcagcgattaggggatttctgagaaagaggtgatacatggcctgtgcctctgaaaacaagaaacaaacaaaaacttttctaaaatccaatataatctcaataattaagtgctgtgtgctaggcgtgtgccacatctaggaacattaagatgtcttcactgtgacctggctctgtaggagtttgcggtctagttgggaggacattatcttcacaagaggtgacagtgatgcgtggcacgcaggaagtaccagtgatgctatcagtcactgaacccagaggagggagaaacttgcagtgtggagtaatcaagaaggcttcaccggagaggaggggttgcaaacaaagttgtagagaagggactccaaatggggtaacgagagcagcgtgaaggggagaagaaatgctgattgtgtatttcaggaccgttgtaaagtttggctggacttttgttcctgcagtggaaggagtgtagggctcatcctctggtgagccctgactgtgatgaatgtcgggcagttgtcgaaggcgtctgacacagcaggccatgtgcgcgggacaggctgcccctgcctgagtgggctttaggggcagaagagccttgggttgagtcctgactgtagcttattatatgaccttgggcaatttacttgactttgtttttttaattgaaaaaaattctctttttttcctgccaacaaagacccagaagagatacttgacttttctaagccccaattttctcatctttaaaatgaggataacactgatgcctcacagggttatgaaagaattgagattaggttctagtatgtatgcctggtatattagtaagcagtcaataaacatagctgtttttcttttctatttttttttgagacagagcctcgctctgttgcccaggctggagtgcagtggcgcaatcttggctcactgcaacatctgcctcccaggttcaagcgattctcatgcctcagcctcccaagtagctgggattataggcatgcaccaccacgcccggataatttttgtatttttagtagagacagggtttcgccatgttggccgggctagtctcagactcctgacctcagaagatccactcgtctcagcctcccaaagtgctgggattacaggcgtgagccaccacgccagcctgctatttttattttcattattaaaaagatgagtctggggagctaagctatgaggacgcaaaggcataaaaatgatataatggactctggggtgagggataaaagactacacatcgggtacaatgtccactgcttgggtgacgggtacaccaaaatctcagaagtcaccactgaagaacttatccatgtgaccaaataccagctgttgcccaaaaaaccattgaaataacaataaaacgaaatttagagagattaagtaaattgactatggtcacctaaataatcaacggaagagcttgaatatgaaccctctgtgactctatgctataacatatgggtgtcgtatatattaacaacatggacaaaactgatggctgaattttcctggggaaagttacctgtagaatgcatgataaatgcattaaaaacttatctgtagaatgcatgataaatgcattaaaaacttctgcagttttctcggggacataagaaaaaaaaaagagtgtggcggccaaatacaggataaatctgggggaagaccaaaggcagagagtctcaggaagtgctgttgctggagatttggacttcatggggagggagtgtgggagtggaaggtgagggctggcttgttggacccagaggacaagtccaccgggcagtagatctgaggtgcttgttaaacacagacctggaccgaggtctgggggcggccctggaatctgctttaataagcacttcagctgtgctggtggtgtggggggttgtcagggtctttctttgagaaaaggtgtgatgcggcttagggactgatgtgtgtgggagaccagagaggagaggagtcagcagtagtttcaagatcaaggctgggtggctggggaaagctggtttaggggattcctcatgagtactgtagagtttgaggggacaacagggaatccaagtgagcttacacttcacctgccagcacagctttttcagaacgtacgagtggatgcgatttttgaagtttagctcagctgaggccagataggaagagtgacttgaatagtatggcaaattaggagcggagctgggattaaaccccagaattaggagcggagctgggattaaaacccagaattaggagcggagctgggattaaaccccagaattaggagcggagctgggattaaaccccagaattaggagcggagctgggattaaaccccagaattaggagcggagctgggattaaaccccagaattaggagcggagctgggattaaaccccagaattaggagcggagctgggattaaaccccagaattaggagcggagctgggattaaaacccagctttccaggccagtgcttgctgccgccttctggcgctgcttgatagggactgagagaaggaggcggccgggtagagtcttttcccatctctggggctgcccccgaggtcgcccctggctccagccagcctgccctctgccctcgcccagtaccagctgcccgtggaggcattggtctttccgctgaagactcacttctctagtagggctctctagctcagagatttcttttgcattctttcattcaagacccactggccttcaaggatcagagtccagatacgttttagctgctgagtcttttaaatctgtctccctcccgaggcacatgaaaggcttctcttctttccagttagagaagaggctgggctactccattgtttttgctaatgccaaaacacacgccttcccatctgctgtttacgaaagggttaacagtgtgtcttttcagaaactgattttaatgttcagcctcttcaacatttattgatgactgtgatatagaaagtttgttgggtctaggacacagacacagattgcaccttaagtagtttatagtttaatgagcttcctggtaactttctaataattaaagcaaaatggaaagagtgtaataatatcaagtgttgttgcaaatgtggaaaaacatgagtttttatgaacttctagggggactgagaagtaggaaaacagtttggtgcctgctaaagtggaagatatccaaggaacctctgaccctgtgcagatctgtgatatgtctgcaaaacacaaacctcttgatcagcactggttttttttttaacccttgttgattaatagagagttttaggttaaatgaaaaaaatcacttataccaaaaatacacccatttttaaactcccaaaataggcatcataaccctcttgaagtgaatcctcgaagactatgaaattcttggtaagttttgctggtatcatggcatctttttcccatgttcagtcagtctgttagagcagaagttcactgaattaggatagcctgatccactttaagcacccaagagtttgctagttctcagaagtgtgtgtttgtcacctgaggatagtatttttggtatatttgcccagtgacgcagcattccaggctgagattgcagaatggctcatggagcccttgtgtagggaagcctctgactgtgtttctcctctgttctcatcacggcagtcatcctcacggaagaaggcttctgtgacaaaggtgtggggggttttccccatacagcaagcagtggacaccgactgggtgtcctctgattcagttccgataccatctacttggagatagtgctggatcccaaaggttgggggttcagtcccccagacggactccccccacaacagcagtcgaaagtatgggcctctagaacttatgaccaactggcttccagttgggattcccataacttcctctttgggttcaattattaataatttgctggagtggttcacagaactcagaaaaacacatttaccagtttattataaaggatgttgcaaaggatacagatgaagagacgggttgggtgaggtatggggaaagggtcatggagtgtccacaccctccctggggaccaccctccaggagcctccacaagtgtagctgtgcagaagctctctgaacccagtactcctgggtttttatggaggcttcatgacatcgccattccttcccccaggatatacagtgggactgtgtctggggagggtcttaagacccacagtcagaaaggtagacgcttgtaatcctagcactttaggaggctgaggcaggagacttgcttgaggcctggagttcagtatcagcatgggcaacatggcaagacctcatctctataaaaaaagaaaaggttgcagtgggccaggtgcggtggctcacgcctctaattccagcattttgggaggctgaggcgggcagatcacttgaggccaggagttggagaccagcctggccaacatggtgaaaccccgtctctactaaaaatacaaaaattatctgggcatggtgctgcgcacctgtaatcacagctattcggaaggctgaggtgggagaatctgcaagggaagtctaaaggatttcatttccactgtcactcaggcatcttctcttcctcacctaagccctgctgtgttggaggagtcccagaggcagggttttagtgagaccctcacggccactccccactcctgaccccataagccctgtgagcctacacagagacggtggctcctgagccgtagtggcagagaataacaccttgtcgggtggcccatgcagcaggttataaacaaatgttcgatgactgacgttctcctgttttgcagaaaattatagttttggtatgacaaggggaaattacattaaacaagcaatttagtgaactttttttttttttttgaggaatgtttcacacttggaactgaagtcattttcttttattctagtgactttttgaatgagtatgaaaaaggaaggactcccaatcctgacatagtttgcaacaagcacatcaaatttagttgcttttttcattatgctgtggataatcttggtaagtaatttgggtttaaaacatttttttttttaaagacagggtctcgctctgtcacccaggctggattgcagtggtgcgatcatgactcactgcagcctcgacctcctgggctcaagagattctcccaccccaggctcctgagtagcttggaccacaggcatgccaccatggtggctaattttttgtggagatggtgtcacaactgtattgtccaggctggtctcagatttctggccttaagcagtcctcctgcctcggccttccaaagtgctgagattacaagcgtgagcccctgtgcctagcctgtttcttcttgtggaacctcctgatactgaattgcttgcttagaccacctcttgatgtctgtggctatgctttatgaattttaggttcttcttcctgtcccctgccattggggtcaccataatgagtttctgaagttctggctcaggcttcttggtttgctctgtcccactgcagctcaccctgttgtgtgttgctacgagataccattgtaagccaggggcccagtagtgtcggcactttcagcaatgatgtagattaggcttgcagattcaatatgtcagcaacctaaagctgagttgatgataatgatgaaagttagtttgtggagttaggaataaacaaatgcctacaaaaacaaaaaatcaaaaagaaaaatcttaaatttcaacattgggctaacaccaaaaacatgaaacttaatagagataaatgcaaagtttgctaactaggttcagtaattctcctaggacaagattggaaagacctagcttggttgccattgaatcttctgccattggttgcagaaaatctgggggatttaggtgcccccaggctgactgagccagtagtgtgatgtcttttgtcagagccagcacagacggagctcaccttgatgatcatagaatgtctaggaaggggtgatgcgtcccctgtggtccgtcctggttagaccgtattagttattcaggaaaagagtgatagactgatagaatgtgaattgatttttattttcagggtatctggaaatatgtcctccctgaactgttgaaattactttgggtcgtagtggcagtggtcaagcgtgtgagttaggatgacattctttgtgtgacaccagcagacagttaggactggcaggagaaagagttccctgaggtggaggcgcaggcagctgttcaggaagggaaggcttgcctttggagagcattaagctgtcacgaaagctttttagggagcccctaggtggctggctgtcaggcacgctgtggaaggaacttctgcagtgaatgtttccacacctggaagaaaggcatgaaccgtgcagcacaggatgagaggacatgacgcccagacttctgaactcaccgcgcttctcagaggcatcctgcgctttttctagtataagtgctgttctttgaggacacagatgtaaagtggattgttttctctaggagaacctcagtcaagatgagattatgtgtctctaaagtgcctttttcaggtcgttaatatgcagcagctaattcttgctgtgtcttctgtttacatggagctagtgtggctggtccaggatggctgtgtcttctgtttacactgagctagtgtggttggtccaggatggaatccattttgctgcacctttcataaaagtctcttgcaatactaaatatctgtaattttttctttttttgagatggagtctcactctgtctcccaggctggagtgcagtggtgtgatctcggctcactgcaacctccacctcctgagttcaagcaattctcctgcctcagcctcccaagtagctgggattacaggtgcccaccaacatgtctagctaatttttgtactttttttgtagagacggggtttcatcatgttggccaggctggtctcaaactcctgacctcaagtgatccacccacatcggcctcctaaaagtgctgggatgacaggcgtgagccgctgcgcctggcccaaatatctggaatttttacacaatgaaaaggttctggattcatatgcaccttgttaggctctttggctttgtgtaatatgaaaagaagaaacagtgtgctggatgattcttcactctgatgaaaataatacatatttattacagaaaatttaaaagaggagaaacgacacctataatttcactctcagaatcaaaggaatagacctgagatttttcttcaactgtttctgtacagtaaaaaccgtggaatcatggtgttacatcctcgccctgctgaacagtgccgggcattttcccgtgttagtaaacattctctgtaaggacccccattgttacggcagtgcattgtcattcacttcacattctcccagtgttgaacattttggttcttttttttttttttttcctcctgagacagcatcttgctctgttgcccagactagagtgctgtggtgcagtcttggcttcctgcagcctcaacctcccaggttgaagcaatcctcccacctcagcctcccaagtggctgggactacaggtgtgccccaccacgcctggctaatttttgtattttttgtaaaggtgggatttcaccatgttgcccaggctggtcttgaactcctgagcacaagcaatcatctgcccgcctcggcctcccagagtgctaggattacaggcatgagccaccgcgcctggcctcccttcgtattatcacaaaccctgaaaggaatattttgtgtttaaatctttctgtgcctttcagactgtttccttaagccagaaattaactttggaaaggctcttaaaggtgcaataacactttaagtagcaaggttgtatcagcttaagagttcaaggctgcttgtttgatgaaattggatgtgtgcgtctgttccctgggatctctatgtttgggtgcagggtggattgtgcagcccctcagcctaagacttggggtctatactcttcttttgtgccttggtttatgctgatcaaggcctgcaagtatgagtctaaaacctgatccttgtgttctaaaaacctcacaggggcagatgccattgccacaggtcactatgcaagaacttccctggaagatgaagaagtctttgagcagaagcacgttaagaagcccgaagggcttttcagaaatcggtttgaagttagaaatggtaagttcatgtgcccaggtcagagccaaattcttgtgaacagattgaaatctttggaggaatgacagtgggttgtgcctgaggatcactgccacccctccctctgtgctccagagtagcttgtatgggattcacatttgaaaaggtgcagttaccaagaggacattttcccggagggcctgtgattgggtagtaaacagtgtccctgccggccatggtgagggctggtggaaagtgacatcagatactgataatccagctctcgacactgtgtggtgatttgaatgttccaaaaatatctgggtaaatatttgacagtgataattggggtgctgtcagtctagccaaggacctgtacttagcaacaagttctcaagggcgtgcggttcaggcagactttcaacgtgctgtgagcacaggacctgctgtggatcgcatgggctcagcagtcaggctttgtagccgtatttacacgttagtttatgcgtgttagggagccaagtttcacctttctagaaaaaagtcaatggcagacagtgagctgggaagctgctggcctgtcctggtgtacattcgtgtgtagaaaagaggaattccctgtattgttgagtgaaaaaccaagtggggctcagagccgtgtttccgcacggagcgtccgtccatcagtggggacccctgaagggcagccttgctcttttgtccggaagttcagatgttggagggagccttgtcccgccatctggggaataggggtctctggggctggggcagggctttacatacacacatttcttttttaattattattattaattttatttttttgagagaggatctcactctgtcaaccgggctggagtacagtggcccgatcttggctcgctgcagcctccacctcctgggctcaagtgatcctcccacctcagccccaccaagtagctgggaccacaggtgtgcgccactatgctcggctttttcattttttgtagagatgaggtctcgttaatgttgtccgtgctggtcttgaattcctgggctcaagcgatcctcccacctcggcctctcaaagtgttgggattacaggtgtgagccaccaagcccggcctcacacgtttcacatcactcctcttagcagtccatgaggtgtatgctctcatcccgtttcacagatgaggaaaccgaggcccggatgaagccatctgacctgggtccctcgggtggcagagctggatttcagtgcacttccgctcactccccagcccctgctgcttctgctgggtcaggccccagctgagttctttcctcagcgttgctgagcccatcctgaaggctgcagtgatggggcagggccgtgcttggtcaagggagccctgagtgtgccaacagtcgtctgccgccctctgttccctcctcgccttccttccttatgccacagggtgatcaggtaactgtactgacttgagcccagagaagagcagcccactcccgtaagacagccccccatttcaggaagacatgggtttgaatgcagataagacagccccccatttcaggaagacatgggttggaatgcagagtcctgccacttgggaactccagggtggaattcaccaagtaattgtgcatttacggggcctgaggagatggagggttaatttccatgttgaatagatgcgcctgcttacctcctagaacattacctcctagaacactgtgtgccctgcagagccatcgacctttattataggccacgtgccctcggaaacttgggacagtactgatgcgttctgttgagtgcgtttggcatgtgggaattgtgatggtgcacagtgtcttggccttcactgggttttgtaggcacactaaggtttccatttcattcttcttcagttgccctggcccagcctgggtctctgggtagagcacctgcaggggcagtggacggcctgggctcagggtcggtcagcacctgagaccagcgctcctaggcctggcctgtgactgggctgattttcccccacacagcgtgctaccaccggcctggcagagccagcacggcagccggcgtgtcagtgaggctccagcacaggcagcctcctccaaatgttgttcattcctttctgtgctttttcctctatagcagttcagttagggtcgccagcttgcttttttgaaaatcatagatttttagtttgttttaaaatgacgcagaactaggagaaaatgcaaatggctcctagttttctgaggcttttacacacatgcagtgtttgactgcagttagtttgggattgaaagtggactctgaggccaggtgcggtggctcatgcctgtaatcacagcactttgggaagccaaggcaggcggatcatgaggtcaggagttccagaccagcctggccaacatggtgaaaccccatctctactacaaatacaaaaaaaaaagttagccgagtatggtggcacatgcctgtagtcccaggtactctggaggctgagacaggagaatcacttgaacccaggaggcggagattgccgtgagccgagatgtgccactgcactccagcctgggcgacagagcgagactccatctcaaaaaaaaaaaaaaaagtggactctggaaagtgctctgcttccgtggcgactggtcggctgaacttggtctcacttgtcactcagttctgctgtttgtacctgccaagtaagggagggggactcgggaggctgggcagcctccagccccaccgcctccacctgcatcactttgggcgagtcatatgtgatgaactgggccggctccagtctcccctctgtaacgtggggagaattctccctctcacggctaacgtgggaatcggcagatggaaaacactagctacgcagagtgtgtactgtacacgtggctctgccaagccaggaagggtaggtgtgctgtctgaccgtcacggcatgtggcgtgctctgagtgtaactcgaaaggagaagtttatgagaaagattgaaagaagccagaaaactgacgttcgtcttagttttttgccattgatcattgaactcgagagtggagaactggacggttctaagccaggtttactcacacctctgctccgttgccttaaagccagaaatggttctttacaatcacatagggaatgtcggaggaactgcagggtcacctaacagatgtcagctgagactctcaacaaaaaaacgtttttaccaagaaagctaatgccttcacaggtagggcgctgctggaggcatgtgctggccgccgggcagtgaacctggaaagtgtagagtccttgaaaccactgtggcacgaacacatcctgtggttgttggaagaaggcacagctgacactatatcagtggaattttctgccagcaactagcttactccattttccaagatttggctgaatttattttaggtgtttttttttttttttcttatcacttgagaacattttttcatgtgatgtttcatctttgaaaatattataatctgaagtatgagctggaataatttctttgtcatgtaaaatccttgtttttttttttggaggtgcgaatttttcttacattaacccgtggtggtcttttccctagtagttgctattgagtgttgatgtctgcctctgacaggctaggggtagtctgtctaagtgaacagaaggacattgttgaaagtgaagtatcattatttttattcctgcatcgtcttttgttctttattcttggcagcggtaaaactcctccaggcagctgacagctttaaagaccagaccttctttctcagccaggtttcccaggatgccctgaggagaaccatcttccctctggggg

SEQ ID NO: 14705 - DNA, 347 bp, Homo sapiens
gcggcggtagctgcagctggcgaagttgggcgactggcggatgcaggccttgcggcacgtcgtgtgcgccctgtccggcggcgtggacagcgccgtggccgcgctgctgctgaggcggagaggggcagatgccattgccacaggtcactatgcaagaacttccctggaagatgaagaagtctttgagcagaagcacgttaagaagcccgaagggcttttcagaaatcggtttgaagttagaaatgcggtaaaactcctccaggcagctgacagctttaaagaccagaccttctttctcagccaggtttcccaggatgccctgaggagaaccatcttccctctggggg

SEQ ID NO: 14706 - DNA, 20179 bp, Homo sapiens
ggaaacctgtccccgtccgtcgtggcgttgtgcacgtctcctccctccctgggccgctggttgcgcgcgggtcggcaggaggataccccgtcctctgactttggttcggaggctcctcgccctccacctgtgtagtcggaggtgtgcgcgactgcagctccgactacctgggagcagttccgcgcccctctccacccacgcgcgcccacccacagtgagaagccggcgggccggggtggggtggggagggaagggtttctcacggatctgcggcgtccacattcacctgtgagaccgtggacactggtgaggggagctgggatcgccgggccgggggcctgacctctgcacacgctgtggccgcccggtgggaggtccttgtcctccccactcagcagactggacaactgccgcgcggcgggtctgcttgttcagcgtctcctgtgttctccgctcgctggaggacaaagttttctccaggagcatttgcatttcttccggcatctaaacggagccccacgggtgcttagcattcctcgggcccggcgctgaaatgagcacttgtttaacttcacctgtgtggctccccgcgggaggcctcattcacagagtcacgtttgtggagctctgctttgcgccatctttggctcctgaccttgggcaagtgaattaagccgtcccctgtaaaattcggctaacacctgcctcacggggtgactggagggattagatgacatagtacatactgatgagtacgtgctcagcacatacgaggtacgcagaaaacagtagtggctattagtttatattgttaataaccatagctattatggtaggtacagtaagtgccaaagagaagggtaggcggaccataagcagaaatagttgtgaggaagggagagtggaggaaagcatcctagagatggaggtgctcagctgagtcgaaagaagagtaggatgtcactaagcagagacttggaggtggaggcggccctcccggcacagtcagcagtgcaagcagaatcacagaggcctgcaagtgtgggctggttctggccagatggagatggaaggagaggagcctggagcacgtttagccctgattatggaagatgctataccaggggctttagactgttaggtagacattagtctggttgatctgggataggggtggtctttcgcgtgtggtggtgtagttttgacaaagctttgtcatcaaatttctgttgttttgggtactatatgaagccttcttcagcagtcatttgccctgtctttcattacattcagcctacctaaacgaaccagctttctcatacagggtctgcacctgtgtagtttgctaaggtggtgtagggctaaagttggcctttccaatatttgggtgaatattttgttacaatcgaaaaggtagaaaataggtcataaactaggtggtacagctcttacaaaatatcgaaaattttaattatctttatatctgatcacttagaatctaagtcttagatagtaactagaaataacttttgaaaagagtttccttttttgataactgaatggtgctttgaaaaattttgttgagtttcgactattccttcgtgtattccacacacactggctgatcccctcctgctaggtattgtgctgatacatagatggggacacaaagatgagaaaataccacctcgttaatcttggggactcaggcaccaagatggaaaccggatccctgaagccacatggcaaagcagggactgcccggcaggccaggcacagaggcacaggagcacagcgtgtggggaacttctcagagctcagaaatcactgccgttttaccgaaggttgatttatgtattctctttaattgaccttcccgcccgcaggttaccaggtgacaggggtgtttatgaagaactgggactcactggatgaacatggggtctgtactgccgacaaagactgtgaagatgcttacagagtttgccagatcttagacatccctttccatcaagtgtcctacgtaaaggagtattggaatgatgtgttcaggtgagtgcgggtcacagcacaaaggaagcttcctcacactgtggatccttgcagtggaaggatccggtaaccagccagaccgacgcctgtgctgcagcccagcgctctccctccacggtggtgctgaagactgcaagaggcctcagccaccctcggggctctgtgttagaggcgaggcctggaccccacagcacacccagctctctcactcctgtcattttgccacttgcctgaagtctctttaatgctttcttggaccttgagctgtttctgttgcccagttaggataggggagctaaggctgagggctcccctggaaggtgagcaccaatgcctgtgtgctatgtgggtcagcgattaggggatttctgagaaagaggtgatacatggcctgtgcctctgaaaacaagaaacaaacaaaaacttttctaaaatccaatataatctcaataattaagtgctgtgtgctaggcgtgtgccacatctaggaacattaagatgtcttcactgtgacctggctctgtaggagtttgcggtctagttgggaggacattatcttcacaagaggtgacagtgatgcgtggcacgcaggaagtaccagtgatgctatcagtcactgaacccagaggagggagaaacttgcagtgtggagtaatcaagaaggcttcaccggagaggaggggttgcaaacaaagttgtagagaagggactccaaatggggtaacgagagcagcgtgaaggggagaagaaatgctgattgtgtatttcaggaccgttgtaaagtttggctggacttttgttcctgcagtggaaggagtgtagggctcatcctctggtgagccctgactgtgatgaatgtcgggcagttgtcgaaggcgtctgacacagcaggccatgtgcgcgggacaggctgcccctgcctgagtgggctttaggggcagaagagccttgggttgagtcctgactgtagcttattatatgaccttgggcaatttacttgactttgtttttttaattgaaaaaaattctctttttttcctgccaacaaagacccagaagagatacttgacttttctaagccccaattttctcatctttaaaatgaggataacactgatgcctcacagggttatgaaagaattgagattaggttctagtatgtatgcctggtatattagtaagcagtcaataaacatagctgtttttcttttctatttttttttgagacagagcctcgctctgttgcccaggctggagtgcagtggcgcaatcttggctcactgcaacatctgcctcccaggttcaagcgattctcatgcctcagcctcccaagtagctgggattataggcatgcaccaccacgcccggataatttttgtatttttagtagagacagggtttcgccatgttggccgggctagtctcagactcctgacctcagaagatccactcgtctcagcctcccaaagtgctgggattacaggcgtgagccaccacgccagcctgctatttttattttcattattaaaaagatgagtctggggagctaagctatgaggacgcaaaggcataaaaatgatataatggactctggggtgagggataaaagactacacatcgggtacaatgtccactgcttgggtgacgggtacaccaaaatctcagaagtcaccactgaagaacttatccatgtgaccaaataccagctgttgcccaaaaaaccattgaaataacaataaaacgaaatttagagagattaagtaaattgactatggtcacctaaataatcaacggaagagcttgaatatgaaccctctgtgactctatgctataacatatgggtgtcgtatatattaacaacatggacaaaactgatggctgaattttcctggggaaagttacctgtagaatgcatgataaatgcattaaaaacttatctgtagaatgcatgataaatgcattaaaaacttctgcagttttctcggggacataagaaaaaaaaaagagtgtggcggccaaatacaggataaatctgggggaagaccaaaggcagagagtctcaggaagtgctgttgctggagatttggacttcatggggagggagtgtgggagtggaaggtgagggctggcttgttggacccagaggacaagtccaccgggcagtagatctgaggtgcttgttaaacacagacctggaccgaggtctgggggcggccctggaatctgctttaataagcacttcagctgtgctggtggtgtggggggttgtcagggtctttctttgagaaaaggtgtgatgcggcttagggactgatgtgtgtgggagaccagagaggagaggagtcagcagtagtttcaagatcaaggctgggtggctggggaaagctggtttaggggattcctcatgagtactgtagagtttgaggggacaacagggaatccaagtgagcttacacttcacctgccagcacagctttttcagaacgtacgagtggatgcgatttttgaagtttagctcagctgaggccagataggaagagtgacttgaatagtatggcaaattaggagcggagctgggattaaaccccagaattaggagcggagctgggattaaaacccagaattaggagcggagctgggattaaaccccagaattaggagcggagctgggattaaaccccagaattaggagcggagctgggattaaaccccagaattaggagcggagctgggattaaaccccagaattaggagcggagctgggattaaaccccagaattaggagcggagctgggattaaaccccagaattaggagcggagctgggattaaaacccagctttccaggccagtgcttgctgccgccttctggcgctgcttgatagggactgagagaaggaggcggccgggtagagtcttttcccatctctggggctgcccccgaggtcgcccctggctccagccagcctgccctctgccctcgcccagtaccagctgcccgtggaggcattggtctttccgctgaagactcacttctctagtagggctctctagctcagagatttcttttgcattctttcattcaagacccactggccttcaaggatcagagtccagatacgttttagctgctgagtcttttaaatctgtctccctcccgaggcacatgaaaggcttctcttctttccagttagagaagaggctgggctactccattgtttttgctaatgccaaaacacacgccttcccatctgctgtttacgaaagggttaacagtgtgtcttttcagaaactgattttaatgttcagcctcttcaacatttattgatgactgtgatatagaaagtttgttgggtctaggacacagacacagattgcaccttaagtagtttatagtttaatgagcttcctggtaactttctaataattaaagcaaaatggaaagagtgtaataatatcaagtgttgttgcaaatgtggaaaaacatgagtttttatgaacttctagggggactgagaagtaggaaaacagtttggtgcctgctaaagtggaagatatccaaggaacctctgaccctgtgcagatctgtgatatgtctgcaaaacacaaacctcttgatcagcactggttttttttttaacccttgttgattaatagagagttttaggttaaatgaaaaaaatcacttataccaaaaatacacccatttttaaactcccaaaataggcatcataaccctcttgaagtgaatcctcgaagactatgaaattcttggtaagttttgctggtatcatggcatctttttcccatgttcagtcagtctgttagagcagaagttcactgaattaggatagcctgatccactttaagcacccaagagtttgctagttctcagaagtgtgtgtttgtcacctgaggatagtatttttggtatatttgcccagtgacgcagcattccaggctgagattgcagaatggctcatggagcccttgtgtagggaagcctctgactgtgtttctcctctgttctcatcacggcagtcatcctcacggaagaaggcttctgtgacaaaggtgtggggggttttccccatacagcaagcagtggacaccgactgggtgtcctctgattcagttccgataccatctacttggagatagtgctggatcccaaaggttgggggttcagtcccccagacggactccccccacaacagcagtcgaaagtatgggcctctagaacttatgaccaactggcttccagttgggattcccataacttcctctttgggttcaattattaataatttgctggagtggttcacagaactcagaaaaacacatttaccagtttattataaaggatgttgcaaaggatacagatgaagagacgggttgggtgaggtatggggaaagggtcatggagtgtccacaccctccctggggaccaccctccaggagcctccacaagtgtagctgtgcagaagctctctgaacccagtactcctgggtttttatggaggcttcatgacatcgccattccttcccccaggatatacagtgggactgtgtctggggagggtcttaagacccacagtcagaaaggtagacgcttgtaatcctagcactttaggaggctgaggcaggagacttgcttgaggcctggagttcagtatcagcatgggcaacatggcaagacctcatctctataaaaaaagaaaaggttgcagtgggccaggtgcggtggctcacgcctctaattccagcattttgggaggctgaggcgggcagatcacttgaggccaggagttggagaccagcctggccaacatggtgaaaccccgtctctactaaaaatacaaaaattatctgggcatggtgctgcgcacctgtaatcacagctattcggaaggctgaggtgggagaatctgcaagggaagtctaaaggatttcatttccactgtcactcaggcatcttctcttcctcacctaagccctgctgtgttggaggagtcccagaggcagggttttagtgagaccctcacggccactccccactcctgaccccataagccctgtgagcctacacagagacggtggctcctgagccgtagtggcagagaataacaccttgtcgggtggcccatgcagcaggttataaacaaatgttcgatgactgacgttctcctgttttgcagaaaattatagttttggtatgacaaggggaaattacattaaacaagcaatttagtgaactttttttttttttttgaggaatgtttcacacttggaactgaagtcattttcttttattctagtgactttttgaatgagtatgaaaaaggaaggactcccaatcctgacatagtttgcaacaagcacatcaaatttagttgcttttttcattatgctgtggataatcttggtaagtaatttgggtttaaaacatttttttttttaaagacagggtctcgctctgtcacccaggctggattgcagtggtgcgatcatgactcactgcagcctcgacctcctgggctcaagagattctcccaccccaggctcctgagtagcttggaccacaggcatgccaccatggtggctaattttttgtggagatggtgtcacaactgtattgtccaggctggtctcagatttctggccttaagcagtcctcctgcctcggccttccaaagtgctgagattacaagcgtgagcccctgtgcctagcctgtttcttcttgtggaacctcctgatactgaattgcttgcttagaccacctcttgatgtctgtggctatgctttatgaattttaggttcttcttcctgtcccctgccattggggtcaccataatgagtttctgaagttctggctcaggcttcttggtttgctctgtcccactgcagctcaccctgttgtgtgttgctacgagataccattgtaagccaggggcccagtagtgtcggcactttcagcaatgatgtagattaggcttgcagattcaatatgtcagcaacctaaagctgagttgatgataatgatgaaagttagtttgtggagttaggaataaacaaatgcctacaaaaacaaaaaatcaaaaagaaaaatcttaaatttcaacattgggctaacaccaaaaacatgaaacttaatagagataaatgcaaagtttgctaactaggttcagtaattctcctaggacaagattggaaagacctagcttggttgccattgaatcttctgccattggttgcagaaaatctgggggatttaggtgcccccaggctgactgagccagtagtgtgatgtcttttgtcagagccagcacagacggagctcaccttgatgatcatagaatgtctaggaaggggtgatgcgtcccctgtggtccgtcctggttagaccgtattagttattcaggaaaagagtgatagactgatagaatgtgaattgatttttattttcagggtatctggaaatatgtcctccctgaactgttgaaattactttgggtcgtagtggcagtggtcaagcgtgtgagttaggatgacattctttgtgtgacaccagcagacagttaggactggcaggagaaagagttccctgaggtggaggcgcaggcagctgttcaggaagggaaggcttgcctttggagagcattaagctgtcacgaaagctttttagggagcccctaggtggctggctgtcaggcacgctgtggaaggaacttctgcagtgaatgtttccacacctggaagaaaggcatgaaccgtgcagcacaggatgagaggacatgacgcccagacttctgaactcaccgcgcttctcagaggcatcctgcgctttttctagtataagtgctgttctttgaggacacagatgtaaagtggattgttttctctaggagaacctcagtcaagatgagattatgtgtctctaaagtgcctttttcaggtcgttaatatgcagcagctaattcttgctgtgtcttctgtttacatggagctagtgtggctggtccaggatggctgtgtcttctgtttacactgagctagtgtggttggtccaggatggaatccattttgctgcacctttcataaaagtctcttgcaatactaaatatctgtaattttttctttttttgagatggagtctcactctgtctcccaggctggagtgcagtggtgtgatctcggctcactgcaacctccacctcctgagttcaagcaattctcctgcctcagcctcccaagtagctgggattacaggtgcccaccaacatgtctagctaatttttgtactttttttgtagagacggggtttcatcatgttggccaggctggtctcaaactcctgacctcaagtgatccacccacatcggcctcctaaaagtgctgggatgacaggcgtgagccgctgcgcctggcccaaatatctggaatttttacacaatgaaaaggttctggattcatatgcaccttgttaggctctttggctttgtgtaatatgaaaagaagaaacagtgtgctggatgattcttcactctgatgaaaataatacatatttattacagaaaatttaaaagaggagaaacgacacctataatttcactctcagaatcaaaggaatagacctgagatttttcttcaactgtttctgtacagtaaaaaccgtggaatcatggtgttacatcctcgccctgctgaacagtgccgggcattttcccgtgttagtaaacattctctgtaaggacccccattgttacggcagtgcattgtcattcacttcacattctcccagtgttgaacattttggttcttttttttttttttttcctcctgagacagcatcttgctctgttgcccagactagagtgctgtggtgcagtcttggcttcctgcagcctcaacctcccaggttgaagcaatcctcccacctcagcctcccaagtggctgggactacaggtgtgccccaccacgcctggctaatttttgtattttttgtaaaggtgggatttcaccatgttgcccaggctggtcttgaactcctgagcacaagcaatcatctgcccgcctcggcctcccagagtgctaggattacaggcatgagccaccgcgcctggcctcccttcgtattatcacaaaccctgaaaggaatattttgtgtttaaatctttctgtgcctttcagactgtttccttaagccagaaattaactttggaaaggctcttaaaggtgcaataacactttaagtagcaaggttgtatcagcttaagagttcaaggctgcttgtttgatgaaattggatgtgtgcgtctgttccctgggatctctatgtttgggtgcagggtggattgtgcagcccctcagcctaagacttggggtctatactcttcttttgtgccttggtttatgctgatcaaggcctgcaagtatgagtctaaaacctgatccttgtgttctaaaaacctcacaggggcagatgccattgccacaggtcactatgcaagaacttccctggaagatgaagaagtctttgagcagaagcacgttaagaagcccgaagggcttttcagaaatcggtttgaagttagaaatggtaagttcatgtgcccaggtcagagccaaattcttgtgaacagattgaaatctttggaggaatgacagtgggttgtgcctgaggatcactgccacccctccctctgtgctccagagtagcttgtatgggattcacatttgaaaaggtgcagttaccaagaggacattttcccggagggcctgtgattgggtagtaaacagtgtccctgccggccatggtgagggctggtggaaagtgacatcagatactgataatccagctctcgacactgtgtggtgatttgaatgttccaaaaatatctgggtaaatatttgacagtgataattggggtgctgtcagtctagccaaggacctgtacttagcaacaagttctcaagggcgtgcggttcaggcagactttcaacgtgctgtgagcacaggacctgctgtggatcgcatgggctcagcagtcaggctttgtagccgtatttacacgttagtttatgcgtgttagggagccaagtttcacctttctagaaaaaagtcaatggcagacagtgagctgggaagctgctggcctgtcctggtgtacattcgtgtgtagaaaagaggaattccctgtattgttgagtgaaaaaccaagtggggctcagagccgtgtttccgcacggagcgtccgtccatcagtggggacccctgaagggcagccttgctcttttgtccggaagttcagatgttggagggagccttgtcccgccatctggggaataggggtctctggggctggggcagggctttacatacacacatttcttttttaattattattattaattttatttttttgagagaggatctcactctgtcaaccgggctggagtacagtggcccgatcttggctcgctgcagcctccacctcctgggctcaagtgatcctcccacctcagccccaccaagtagctgggaccacaggtgtgcgccactatgctcggctttttcattttttgtagagatgaggtctcgttaatgttgtccgtgctggtcttgaattcctgggctcaagcgatcctcccacctcggcctctcaaagtgttgggattacaggtgtgagccaccaagcccggcctcacacgtttcacatcactcctcttagcagtccatgaggtgtatgctctcatcccgtttcacagatgaggaaaccgaggcccggatgaagccatctgacctgggtccctcgggtggcagagctggatttcagtgcacttccgctcactccccagcccctgctgcttctgctgggtcaggccccagctgagttctttcctcagcgttgctgagcccatcctgaaggctgcagtgatggggcagggccgtgcttggtcaagggagccctgagtgtgccaacagtcgtctgccgccctctgttccctcctcgccttccttccttatgccacagggtgatcaggtaactgtactgacttgagcccagagaagagcagcccactcccgtaagacagccccccatttcaggaagacatgggtttgaatgcagataagacagccccccatttcaggaagacatgggttggaatgcagagtcctgccacttgggaactccagggtggaattcaccaagtaattgtgcatttacggggcctgaggagatggagggttaatttccatgttgaatagatgcgcctgcttacctcctagaacattacctcctagaacactgtgtgccctgcagagccatcgacctttattataggccacgtgccctcggaaacttgggacagtactgatgcgttctgttgagtgcgtttggcatgtgggaattgtgatggtgcacagtgtcttggccttcactgggttttgtaggcacactaaggtttccatttcattcttcttcagttgccctggcccagcctgggtctctgggtagagcacctgcaggggcagtggacggcctgggctcagggtcggtcagcacctgagaccagcgctcctaggcctggcctgtgactgggctgattttcccccacacagcgtgctaccaccggcctggcagagccagcacggcagccggcgtgtcagtgaggctccagcacaggcagcctcctccaaatgttgttcattcctttctgtgctttttcctctatagcagttcagttagggtcgccagcttgcttttttgaaaatcatagatttttagtttgttttaaaatgacgcagaactaggagaaaatgcaaatggctcctagttttctgaggcttttacacacatgcagtgtttgactgcagttagtttgggattgaaagtggactctgaggccaggtgcggtggctcatgcctgtaatcacagcactttgggaagccaaggcaggcggatcatgaggtcaggagttccagaccagcctggccaacatggtgaaaccccatctctactacaaatacaaaaaaaaaagttagccgagtatggtggcacatgcctgtagtcccaggtactctggaggctgagacaggagaatcacttgaacccaggaggcggagattgccgtgagccgagatgtgccactgcactccagcctgggcgacagagcgagactccatctcaaaaaaaaaaaaaaaagtggactctggaaagtgctctgcttccgtggcgactggtcggctgaacttggtctcacttgtcactcagttctgctgtttgtacctgccaagtaagggagggggactcgggaggctgggcagcctccagccccaccgcctccacctgcatcactttgggcgagtcatatgtgatgaactgggccggctccagtctcccctctgtaacgtggggagaattctccctctcacggctaacgtgggaatcggcagatggaaaacactagctacgcagagtgtgtactgtacacgtggctctgccaagccaggaagggtaggtgtgctgtctgaccgtcacggcatgtggcgtgctctgagtgtaactcgaaaggagaagtttatgagaaagattgaaagaagccagaaaactgacgttcgtcttagttttttgccattgatcattgaactcgagagtggagaactggacggttctaagccaggtttactcacacctctgctccgttgccttaaagccagaaatggttctttacaatcacatagggaatgtcggaggaactgcagggtcacctaacagatgtcagctgagactctcaacaaaaaaacgtttttaccaagaaagctaatgccttcacaggtagggcgctgctggaggcatgtgctggccgccgggcagtgaacctggaaagtgtagagtccttgaaaccactgtggcacgaacacatcctgtggttgttggaagaaggcacagctgacactatatcagtggaattttctgccagcaactagcttactccattttccaagatttggctgaatttattttaggtgtttttttttttttttcttatcacttgagaacattttttcatgtgatgtttcatctttgaaaatattataatctgaagtatgagctggaataatttctttgtcatgtaaaatccttgtttttttttttggaggtgcgaatttttcttacattaacccgtggtggtcttttccctagtagttgctattgagtgttgatgtctgcctctgacaggctaggggtagtctgtctaagtgaacagaaggacattgttgaaagtgaagtatcattatttttattcctgcatcgtcttttgttctttattcttggcagcggtaaaactcctccaggcagctgacagctttaaagaccagaccttctttctcagccaggtttcccaggatgccctgaggagaaccatcttccctctggggggattaacgaaagagtttgtaaagaaaatcgctgctgagaatagacttcatcatgtgcttcagaagaaagaggtacgagtgagcagttgcctttgattagtgcctgtttccctttcccgactgcatggcacggagcagctggacctgtgggtcccgcaccacttccccttctccaggacctaacatcaaaggcgggccttggagcaatagatggaggagtttgctgaggcgcacggtacagggctctgctgacatcgggagcagcctatacgagactccttgcttttttcctctcctctgcccctatgtggtaggcagctttccccacagccttagcagctggtggggtgctcttgggatggcctgcctgccaggtgagtgccaggcagtgtgatgcagccccgagacccctggaggggcaggtgctgtgccgccgtctgcacactcatgtgccctgtcacccgcttgcccggcacagactcgttcggtgccatctgttcgggcgctgtgctgctgggccgcgaggaattggtgacgcgcacacagttccatcttcgcctccatggagcccgcccgcgagtgggggacacaggcaggaggccaatcagtgtaaacctagaaaatgtctacggagggaggtgtaggaccctgggtgggaagcaccagtggggtctgagagtagggaatggagatgccaaaaacggcctcaaaagaagtcacatggaacctgagacctgaaggaggagaggatccggtgtcccagagagggctgggaaagtccagatgagggaacggcagtgcaaaggccttgaggcgaggagaagccagggagccgctgtgggggtgcctgcctgtggccccagctcctcaggaggatcgagcgcacccaggagtttgaggacagcctgggcaacacagcgaaactcgtctcaaaaagagagaacccggagtgttggcggaactaggatgaagcccgtgggagggccttggggatggagggcgagggcgctgtgggatgagcctcacctcttcaggggccagtgcggtgggagctgttgctccttcgtgtctcttcctggtaatggaaacggccatacctttcatcagagccatcttccctgaagagcacgcccaccgcccgtcctcctctcctcttgttttccgtttccggtgtcgctctgtggtgggagccgcagggatggaagggcagtcttgagagacacaaaccagagtaaacgatgcagcccctgatggggccacggtggagagcgcacgccacccaggctccccagctagggcagatgtgcttgaggaaggcgcctctctcctctgactcccctggagccctcccctaaggccttagcttcaggcctggctttcctgctacctgccccttctctggtccctgtctctcccccactcctcgcaggacagtggcctgaaggacctgaccgggttctgctttcttccccggggcagctggtgtgagggtctcccgcgcagggtcagaccccgcgggccgagacaatgaggcgttctctaaggctctggcatcgtgtgcgccggctgtgactggcggccgagggtgccggtgggcagccgggcccctaccctggaagcaaagtgtggggtgaggccgggaggccccagggcccgctcaggacgtctgggtacagcttgggccaccgccacttctgctcctctcacggctgccgtcttctcatttcagagcatgggcatgtgtttcatcgggaagaggaattttgaacatttccttcttcaggtgcgtgctgctctttgacacaaagagatggggctgcgtgtctgccctgggcctagatctccgtcggtaatgacatgtttgttttccagtatctgcagcctcgacctggtcactttatttccatagaagacaataaggttctgggaacacataaaggtgaggtgcagactctgccacttgtcatctgaaatgcctagagctgtggcgtttcagctctgggagactagaccagagttcctgtcgtcccttccacttggctggagaattgtagaaggctctgtggggcggccgggggcgggcacggcctagggtggaacagttgccttgatggtggctgggtgcacttccagatgtggcctcagctgagatgctggagttcatgaaaagcgcgcctctgacttggaaggactatactctgtgagttacgtatcaagtccctgtaaaaagaatgatttccttcctgtgtaaggaaaatgttaaactacacaaaactccactctgattcagggagtaaggtggacgtcccggcatggtgtgaatgattaaggaccacatgcagcgatgggatcaggcgtccgcgctggccagagtgctgctcgctcatgtgcagacccttactgcggtgaggcctgcgtgagcctgtgctgtgcctggtgtcaggggacaggctccgagtcagtcacagtgtgcagtcctgctgtggggacagagtgcagccattgttgggttagtacagtggcggggatgtgcctgccggcgtgatgatcaggcaggtcttgacacagcacagacctgagctgtgggactggccaggagagccaggctgcagctcaggtgtagggcgtcttgcagtgaattgcacttggagatcttccacctcttgtggaggggagacggcaggcggagccggggctaggcattcctgagacaggtggaggtgacagctttgcttgggacagaactgccagacaggattgcccatgtatctgccagccctggccccagcaggagccagttggatgactcatggcttccacctgcagttcacttcactgaagaaggctgccggcccaggccacgtggtaaatcccatgaggttctctctgcctgtgtgccccactgcaggggagggaggcagtgagtttgccatctgctgtgtgacattgtgagggtgcgcagagcagctgggggtagccctgatgcagttactgcattagatggacactgtgaagacgtgcagctatgtcatgggctcagcaagaagggcccctggcgtcacacagggcacccagccgcatcctgggcctagggtcaggggctcctacagctggaacctgcaccttctggggcacaaggtgccttctttgtggccaccacaccccatgtccagcccaggcctggacaatgatgagatgtgctcaggtgcttggtcagggctggctttggtggttggagaatcgtatcttcctagtgagttacaccattgctgggcctgctctgggctgccctcccagcatctgccttcatgatgaggcgtgacatgtgggctgtaacttgttgcccagcctcatggagaaactgtctttctgtaggttggttcctgtataccttgggccagagagcaaacataggtggcctgagagagccctggtacgtggtggagaaggacagcgtcaagggtgacgtgtttgtggtgagtgggccggcctctgagacagcactggggctggttctggcagggccagcagtgcttccagaccagggcttgagaaggcctccagcagccgtggcttcctggaggctgtgactaactctgttcctgtccttggtcccctgcctttcctgggactggccatggtggcaggagagttttaaggtattcattaggctgagttgtatgctggtctcttaatcatccctgaaccccgatacacagatacagtttctccaattttatgaaagaggacagcgacgcccagagcttgggtggctcatccggtggagagggcatggcctcagtgccaaggatggtgcccaccatggtaggatccagtgagttgttgtcaggcaggtgcagatggccaagccaggatcaaaccaagccttccaccacagtggggaccttaccactgtgaccctggcctcaaagcagggccgctcagtggcggcaagctcaccccaccttcaggggaccttgccagtgtctagaggcatttttggttgtcacagcttgggtggaaaagcaaggacgcgggtgctgctgcatctgtgggtcaggccggggatgctgcttgccgtgttcagcacagcctcttccctgagtgacccggcctccaccttggcgcgtggagctgagaaggcccactctcagcaccctggctgccggctcatgttctggcacgaatgctggggcgccttctcttagacggaggcgggggccagcaggccccacccaccgattccaggacatctccttactaggaagacctgtggggagaaaagcctggctgcgaatgaattaaatgatctagatttcagtttgctgtgagaagaccagaagggttaaccaacggcctcctgtccctggacgggtcttggtgcctgcttagaacccaaagcccttaacttcatgctcctcgtcctgcttcaggggcggggcttggcacaatcccaggaggtgccaggtctcaatggcccgaggccatgggtgggtgacagggagcaggggcctcagaaccaacctagggtatctggggccccccagaccagggccagtcctggggcacctgtgggaagccagcagctaccagtccctcctttctcctcagccatttggtgtgtggaggaattcctggggtggccttgagagaagagcccgtggtgtggctggcccctgtccctgcgaatagaaaaaccagtcctcgaggggggccgtgctgctgccccacaggtggttgcaggtagagggcctgagtcagacttgaacctgcagcattcactgtcatgggctcggatctcacccctgcctcttgcccactctgacatggtacttccttcctgggccttagtctcctcatctgtaaaatggggattcaaaggcccggcgggtgatgagatgaatttctgtgggtagaacacttcgagcggtgccagcaccgttacctgtgtgtgtgtgtgctggtaggacagttgttcccagggaccacactgaggccggccttggggccaggtgcccctcggcgtccccaccttcacattccattctgcaggccccccggacagaccacccagccctgtacagggacctgctgaggaccagccgcgtgcactggattgcggaggagcctcccgcagcactggtccgggacaagatgatggagtgccacttccgattccgccaccagatggcactaggtgactgacgggagggctcctgaggacgggccccttgaagctgagcttcctgaggccagatttgggccagggatgggagaccctggggtaggaaagtcccgttgtggagatcatttggagattacctaaagtatttagaactcccgtgtcctgtgcctgccctgagcgaggcctgggggtgctgggagcagatgcaggcaggccccggcgtgttgggctgaagcaagtgtgtacactgccccgcagtgtcctgctgcgtccagggcccaggctggtgccctgcccttcccctctaagcaggggtttttgaccccgtgggctggtgctcctttctccctgggggcctgaggtcgaccaggaaaggcctgtgccccctccaagggcccctctcttctacccagtgccctgtgtgctgaccctcaatcaagatggcaccgtgtgggtgacagctgtgcaggctgtgcgtgcccttgccacaggaca

SEQ ID NO: 14707 - DNA, 1232 bp, Homo sapiens
ggaaacctgtccccgtccgtcgtggcgttgtgcacgtctcctccctccctgggccgctggttgcgcgcgggtcggcaggaggataccccgtcctctgactttggttcggaggctcctcgccctccacctgtgtagtcggaggtgtgcgcgactgcagctccgactacctgggagcagttccgcgcccctctccacccacgcgcgcccacccacagttaccaggtgacaggggtgtttatgaagaactgggactcactggatgaacatggggtctgtactgccgacaaagactgtgaagatgcttacagagtttgccagatcttagacatccctttccatcaagtgtcctacgtaaaggagtattggaatgatgtgttcagtgactttttgaatgagtatgaaaaaggaaggactcccaatcctgacatagtttgcaacaagcacatcaaatttagttgcttttttcattatgctgtggataatcttggggcagatgccattgccacaggtcactatgcaagaacttccctggaagatgaagaagtctttgagcagaagcacgttaagaagcccgaagggcttttcagaaatcggtttgaagttagaaatgcggtaaaactcctccaggcagctgacagctttaaagaccagaccttctttctcagccaggtttcccaggatgccctgaggagaaccatcttccctctggggggattaacgaaagagtttgtaaagaaaatcgctgctgagaatagacttcatcatgtgcttcagaagaaagagagcatgggcatgtgtttcatcgggaagaggaattttgaacatttccttcttcagtatctgcagcctcgacctggtcactttatttccatagaagacaataaggttctgggaacacataaaggttggttcctgtataccttgggccagagagcaaacataggtggcctgagagagccctggtacgtggtggagaaggacagcgtcaagggtgacgtgtttgtggccccccggacagaccacccagccctgtacagggacctgctgaggaccagccgcgtgcactggattgcggaggagcctcccgcagcactggtccgggacaagatgatggagtgccacttccgattccgccaccagatggcactagtgccctgtgtgctgaccctcaatcaagatggcaccgtgtgggtgacagctgtgcaggctgtgcgtgcccttgccacaggaca

SEQ ID NO: 14708 - DNA, 20872 bp, Homo sapiens
gggtttctcacggatctgcggcgtccacattcacctgtgagaccgtggacactggtgaggggagctgggatcgccgggccgggggcctgacctctgcacacgctgtggccgcccggtgggaggtccttgtcctccccactcagcagactggacaactgccgcgcggcgggtctgcttgttcagcgtctcctgtgttctccgctcgctggaggacaaagttttctccaggagcatttgcatttcttccggcatctaaacggagccccacgggtgcttagcattcctcgggcccggcgctgaaatgagcacttgtttaacttcacctgtgtggctccccgcgggaggcctcattcacagagtcacgtttgtggagctctgctttgcgccatctttggctcctgaccttgggcaagtgaattaagccgtcccctgtaaaattcggctaacacctgcctcacggggtgactggagggattagatgacatagtacatactgatgagtacgtgctcagcacatacgaggtacgcagaaaacagtagtggctattagtttatattgttaataaccatagctattatggtaggtacagtaagtgccaaagagaagggtaggcggaccataagcagaaatagttgtgaggaagggagagtggaggaaagcatcctagagatggaggtgctcagctgagtcgaaagaagagtaggatgtcactaagcagagacttggaggtggaggcggccctcccggcacagtcagcagtgcaagcagaatcacagaggcctgcaagtgtgggctggttctggccagatggagatggaaggagaggagcctggagcacgtttagccctgattatggaagatgctataccaggggctttagactgttaggtagacattagtctggttgatctgggataggggtggtctttcgcgtgtggtggtgtagttttgacaaagctttgtcatcaaatttctgttgttttgggtactatatgaagccttcttcagcagtcatttgccctgtctttcattacattcagcctacctaaacgaaccagctttctcatacagggtctgcacctgtgtagtttgctaaggtggtgtagggctaaagttggcctttccaatatttgggtgaatattttgttacaatcgaaaaggtagaaaataggtcataaactaggtggtacagctcttacaaaatatcgaaaattttaattatctttatatctgatcacttagaatctaagtcttagatagtaactagaaataacttttgaaaagagtttccttttttgataactgaatggtgctttgaaaaattttgttgagtttcgactattccttcgtgtattccacacacactggctgatcccctcctgctaggtattgtgctgatacatagatggggacacaaagatgagaaaataccacctcgttaatcttggggactcaggcaccaagatggaaaccggatccctgaagccacatggcaaagcagggactgcccggcaggccaggcacagaggcacaggagcacagcgtgtggggaacttctcagagctcagaaatcactgccgttttaccgaaggttgatttatgtattctctttaattgaccttcccgcccgcaggttaccaggtgacaggggtgtttatgaagaactgggactcactggatgaacatggggtctgtactgccgacaaagactgtgaagatgcttacagagtttgccagatcttagacatccctttccatcaagtgtcctacgtaaaggagtattggaatgatgtgttcaggtgagtgcgggtcacagcacaaaggaagcttcctcacactgtggatccttgcagtggaaggatccggtaaccagccagaccgacgcctgtgctgcagcccagcgctctccctccacggtggtgctgaagactgcaagaggcctcagccaccctcggggctctgtgttagaggcgaggcctggaccccacagcacacccagctctctcactcctgtcattttgccacttgcctgaagtctctttaatgctttcttggaccttgagctgtttctgttgcccagttaggataggggagctaaggctgagggctcccctggaaggtgagcaccaatgcctgtgtgctatgtgggtcagcgattaggggatttctgagaaagaggtgatacatggcctgtgcctctgaaaacaagaaacaaacaaaaacttttctaaaatccaatataatctcaataattaagtgctgtgtgctaggcgtgtgccacatctaggaacattaagatgtcttcactgtgacctggctctgtaggagtttgcggtctagttgggaggacattatcttcacaagaggtgacagtgatgcgtggcacgcaggaagtaccagtgatgctatcagtcactgaacccagaggagggagaaacttgcagtgtggagtaatcaagaaggcttcaccggagaggaggggttgcaaacaaagttgtagagaagggactccaaatggggtaacgagagcagcgtgaaggggagaagaaatgctgattgtgtatttcaggaccgttgtaaagtttggctggacttttgttcctgcagtggaaggagtgtagggctcatcctctggtgagccctgactgtgatgaatgtcgggcagttgtcgaaggcgtctgacacagcaggccatgtgcgcgggacaggctgcccctgcctgagtgggctttaggggcagaagagccttgggttgagtcctgactgtagcttattatatgaccttgggcaatttacttgactttgtttttttaattgaaaaaaattctctttttttcctgccaacaaagacccagaagagatacttgacttttctaagccccaattttctcatctttaaaatgaggataacactgatgcctcacagggttatgaaagaattgagattaggttctagtatgtatgcctggtatattagtaagcagtcaataaacatagctgtttttcttttctatttttttttgagacagagcctcgctctgttgcccaggctggagtgcagtggcgcaatcttggctcactgcaacatctgcctcccaggttcaagcgattctcatgcctcagcctcccaagtagctgggattataggcatgcaccaccacgcccggataatttttgtatttttagtagagacagggtttcgccatgttggccgggctagtctcagactcctgacctcagaagatccactcgtctcagcctcccaaagtgctgggattacaggcgtgagccaccacgccagcctgctatttttattttcattattaaaaagatgagtctggggagctaagctatgaggacgcaaaggcataaaaatgatataatggactctggggtgagggataaaagactacacatcgggtacaatgtccactgcttgggtgacgggtacaccaaaatctcagaagtcaccactgaagaacttatccatgtgaccaaataccagctgttgcccaaaaaaccattgaaataacaataaaacgaaatttagagagattaagtaaattgactatggtcacctaaataatcaacggaagagcttgaatatgaaccctctgtgactctatgctataacatatgggtgtcgtatatattaacaacatggacaaaactgatggctgaattttcctggggaaagttacctgtagaatgcatgataaatgcattaaaaacttatctgtagaatgcatgataaatgcattaaaaacttctgcagttttctcggggacataagaaaaaaaaaagagtgtggcggccaaatacaggataaatctgggggaagaccaaaggcagagagtctcaggaagtgctgttgctggagatttggacttcatggggagggagtgtgggagtggaaggtgagggctggcttgttggacccagaggacaagtccaccgggcagtagatctgaggtgcttgttaaacacagacctggaccgaggtctgggggcggccctggaatctgctttaataagcacttcagctgtgctggtggtgtggggggttgtcagggtctttctttgagaaaaggtgtgatgcggcttagggactgatgtgtgtgggagaccagagaggagaggagtcagcagtagtttcaagatcaaggctgggtggctggggaaagctggtttaggggattcctcatgagtactgtagagtttgaggggacaacagggaatccaagtgagcttacacttcacctgccagcacagctttttcagaacgtacgagtggatgcgatttttgaagtttagctcagctgaggccagataggaagagtgacttgaatagtatggcaaattaggagcggagctgggattaaaccccagaattaggagcggagctgggattaaaacccagaattaggagcggagctgggattaaaccccagaattaggagcggagctgggattaaaccccagaattaggagcggagctgggattaaaccccagaattaggagcggagctgggattaaaccccagaattaggagcggagctgggattaaaccccagaattaggagcggagctgggattaaaccccagaattaggagcggagctgggattaaaacccagctttccaggccagtgcttgctgccgccttctggcgctgcttgatagggactgagagaaggaggcggccgggtagagtcttttcccatctctggggctgcccccgaggtcgcccctggctccagccagcctgccctctgccctcgcccagtaccagctgcccgtggaggcattggtctttccgctgaagactcacttctctagtagggctctctagctcagagatttcttttgcattctttcattcaagacccactggccttcaaggatcagagtccagatacgttttagctgctgagtcttttaaatctgtctccctcccgaggcacatgaaaggcttctcttctttccagttagagaagaggctgggctactccattgtttttgctaatgccaaaacacacgccttcccatctgctgtttacgaaagggttaacagtgtgtcttttcagaaactgattttaatgttcagcctcttcaacatttattgatgactgtgatatagaaagtttgttgggtctaggacacagacacagattgcaccttaagtagtttatagtttaatgagcttcctggtaactttctaataattaaagcaaaatggaaagagtgtaataatatcaagtgttgttgcaaatgtggaaaaacatgagtttttatgaacttctagggggactgagaagtaggaaaacagtttggtgcctgctaaagtggaagatatccaaggaacctctgaccctgtgcagatctgtgatatgtctgcaaaacacaaacctcttgatcagcactggttttttttttaacccttgttgattaatagagagttttaggttaaatgaaaaaaatcacttataccaaaaatacacccatttttaaactcccaaaataggcatcataaccctcttgaagtgaatcctcgaagactatgaaattcttggtaagttttgctggtatcatggcatctttttcccatgttcagtcagtctgttagagcagaagttcactgaattaggatagcctgatccactttaagcacccaagagtttgctagttctcagaagtgtgtgtttgtcacctgaggatagtatttttggtatatttgcccagtgacgcagcattccaggctgagattgcagaatggctcatggagcccttgtgtagggaagcctctgactgtgtttctcctctgttctcatcacggcagtcatcctcacggaagaaggcttctgtgacaaaggtgtggggggttttccccatacagcaagcagtggacaccgactgggtgtcctctgattcagttccgataccatctacttggagatagtgctggatcccaaaggttgggggttcagtcccccagacggactccccccacaacagcagtcgaaagtatgggcctctagaacttatgaccaactggcttccagttgggattcccataacttcctctttgggttcaattattaataatttgctggagtggttcacagaactcagaaaaacacatttaccagtttattataaaggatgttgcaaaggatacagatgaagagacgggttgggtgaggtatggggaaagggtcatggagtgtccacaccctccctggggaccaccctccaggagcctccacaagtgtagctgtgcagaagctctctgaacccagtactcctgggtttttatggaggcttcatgacatcgccattccttcccccaggatatacagtgggactgtgtctggggagggtcttaagacccacagtcagaaaggtagacgcttgtaatcctagcactttaggaggctgaggcaggagacttgcttgaggcctggagttcagtatcagcatgggcaacatggcaagacctcatctctataaaaaaagaaaaggttgcagtgggccaggtgcggtggctcacgcctctaattccagcattttgggaggctgaggcgggcagatcacttgaggccaggagttggagaccagcctggccaacatggtgaaaccccgtctctactaaaaatacaaaaattatctgggcatggtgctgcgcacctgtaatcacagctattcggaaggctgaggtgggagaatctgcaagggaagtctaaaggatttcatttccactgtcactcaggcatcttctcttcctcacctaagccctgctgtgttggaggagtcccagaggcagggttttagtgagaccctcacggccactccccactcctgaccccataagccctgtgagcctacacagagacggtggctcctgagccgtagtggcagagaataacaccttgtcgggtggcccatgcagcaggttataaacaaatgttcgatgactgacgttctcctgttttgcagaaaattatagttttggtatgacaaggggaaattacattaaacaagcaatttagtgaactttttttttttttttgaggaatgtttcacacttggaactgaagtcattttcttttattctagtgactttttgaatgagtatgaaaaaggaaggactcccaatcctgacatagtttgcaacaagcacatcaaatttagttgcttttttcattatgctgtggataatcttggtaagtaatttgggtttaaaacatttttttttttaaagacagggtctcgctctgtcacccaggctggattgcagtggtgcgatcatgactcactgcagcctcgacctcctgggctcaagagattctcccaccccaggctcctgagtagcttggaccacaggcatgccaccatggtggctaattttttgtggagatggtgtcacaactgtattgtccaggctggtctcagatttctggccttaagcagtcctcctgcctcggccttccaaagtgctgagattacaagcgtgagcccctgtgcctagcctgtttcttcttgtggaacctcctgatactgaattgcttgcttagaccacctcttgatgtctgtggctatgctttatgaattttaggttcttcttcctgtcccctgccattggggtcaccataatgagtttctgaagttctggctcaggcttcttggtttgctctgtcccactgcagctcaccctgttgtgtgttgctacgagataccattgtaagccaggggcccagtagtgtcggcactttcagcaatgatgtagattaggcttgcagattcaatatgtcagcaacctaaagctgagttgatgataatgatgaaagttagtttgtggagttaggaataaacaaatgcctacaaaaacaaaaaatcaaaaagaaaaatcttaaatttcaacattgggctaacaccaaaaacatgaaacttaatagagataaatgcaaagtttgctaactaggttcagtaattctcctaggacaagattggaaagacctagcttggttgccattgaatcttctgccattggttgcagaaaatctgggggatttaggtgcccccaggctgactgagccagtagtgtgatgtcttttgtcagagccagcacagacggagctcaccttgatgatcatagaatgtctaggaaggggtgatgcgtcccctgtggtccgtcctggttagaccgtattagttattcaggaaaagagtgatagactgatagaatgtgaattgatttttattttcagggtatctggaaatatgtcctccctgaactgttgaaattactttgggtcgtagtggcagtggtcaagcgtgtgagttaggatgacattctttgtgtgacaccagcagacagttaggactggcaggagaaagagttccctgaggtggaggcgcaggcagctgttcaggaagggaaggcttgcctttggagagcattaagctgtcacgaaagctttttagggagcccctaggtggctggctgtcaggcacgctgtggaaggaacttctgcagtgaatgtttccacacctggaagaaaggcatgaaccgtgcagcacaggatgagaggacatgacgcccagacttctgaactcaccgcgcttctcagaggcatcctgcgctttttctagtataagtgctgttctttgaggacacagatgtaaagtggattgttttctctaggagaacctcagtcaagatgagattatgtgtctctaaagtgcctttttcaggtcgttaatatgcagcagctaattcttgctgtgtcttctgtttacatggagctagtgtggctggtccaggatggctgtgtcttctgtttacactgagctagtgtggttggtccaggatggaatccattttgctgcacctttcataaaagtctcttgcaatactaaatatctgtaattttttctttttttgagatggagtctcactctgtctcccaggctggagtgcagtggtgtgatctcggctcactgcaacctccacctcctgagttcaagcaattctcctgcctcagcctcccaagtagctgggattacaggtgcccaccaacatgtctagctaatttttgtactttttttgtagagacggggtttcatcatgttggccaggctggtctcaaactcctgacctcaagtgatccacccacatcggcctcctaaaagtgctgggatgacaggcgtgagccgctgcgcctggcccaaatatctggaatttttacacaatgaaaaggttctggattcatatgcaccttgttaggctctttggctttgtgtaatatgaaaagaagaaacagtgtgctggatgattcttcactctgatgaaaataatacatatttattacagaaaatttaaaagaggagaaacgacacctataatttcactctcagaatcaaaggaatagacctgagatttttcttcaactgtttctgtacagtaaaaaccgtggaatcatggtgttacatcctcgccctgctgaacagtgccgggcattttcccgtgttagtaaacattctctgtaaggacccccattgttacggcagtgcattgtcattcacttcacattctcccagtgttgaacattttggttcttttttttttttttttcctcctgagacagcatcttgctctgttgcccagactagagtgctgtggtgcagtcttggcttcctgcagcctcaacctcccaggttgaagcaatcctcccacctcagcctcccaagtggctgggactacaggtgtgccccaccacgcctggctaatttttgtattttttgtaaaggtgggatttcaccatgttgcccaggctggtcttgaactcctgagcacaagcaatcatctgcccgcctcggcctcccagagtgctaggattacaggcatgagccaccgcgcctggcctcccttcgtattatcacaaaccctgaaaggaatattttgtgtttaaatctttctgtgcctttcagactgtttccttaagccagaaattaactttggaaaggctcttaaaggtgcaataacactttaagtagcaaggttgtatcagcttaagagttcaaggctgcttgtttgatgaaattggatgtgtgcgtctgttccctgggatctctatgtttgggtgcagggtggattgtgcagcccctcagcctaagacttggggtctatactcttcttttgtgccttggtttatgctgatcaaggcctgcaagtatgagtctaaaacctgatccttgtgttctaaaaacctcacaggggcagatgccattgccacaggtcactatgcaagaacttccctggaagatgaagaagtctttgagcagaagcacgttaagaagcccgaagggcttttcagaaatcggtttgaagttagaaatggtaagttcatgtgcccaggtcagagccaaattcttgtgaacagattgaaatctttggaggaatgacagtgggttgtgcctgaggatcactgccacccctccctctgtgctccagagtagcttgtatgggattcacatttgaaaaggtgcagttaccaagaggacattttcccggagggcctgtgattgggtagtaaacagtgtccctgccggccatggtgagggctggtggaaagtgacatcagatactgataatccagctctcgacactgtgtggtgatttgaatgttccaaaaatatctgggtaaatatttgacagtgataattggggtgctgtcagtctagccaaggacctgtacttagcaacaagttctcaagggcgtgcggttcaggcagactttcaacgtgctgtgagcacaggacctgctgtggatcgcatgggctcagcagtcaggctttgtagccgtatttacacgttagtttatgcgtgttagggagccaagtttcacctttctagaaaaaagtcaatggcagacagtgagctgggaagctgctggcctgtcctggtgtacattcgtgtgtagaaaagaggaattccctgtattgttgagtgaaaaaccaagtggggctcagagccgtgtttccgcacggagcgtccgtccatcagtggggacccctgaagggcagccttgctcttttgtccggaagttcagatgttggagggagccttgtcccgccatctggggaataggggtctctggggctggggcagggctttacatacacacatttcttttttaattattattattaattttatttttttgagagaggatctcactctgtcaaccgggctggagtacagtggcccgatcttggctcgctgcagcctccacctcctgggctcaagtgatcctcccacctcagccccaccaagtagctgggaccacaggtgtgcgccactatgctcggctttttcattttttgtagagatgaggtctcgttaatgttgtccgtgctggtcttgaattcctgggctcaagcgatcctcccacctcggcctctcaaagtgttgggattacaggtgtgagccaccaagcccggcctcacacgtttcacatcactcctcttagcagtccatgaggtgtatgctctcatcccgtttcacagatgaggaaaccgaggcccggatgaagccatctgacctgggtccctcgggtggcagagctggatttcagtgcacttccgctcactccccagcccctgctgcttctgctgggtcaggccccagctgagttctttcctcagcgttgctgagcccatcctgaaggctgcagtgatggggcagggccgtgcttggtcaagggagccctgagtgtgccaacagtcgtctgccgccctctgttccctcctcgccttccttccttatgccacagggtgatcaggtaactgtactgacttgagcccagagaagagcagcccactcccgtaagacagccccccatttcaggaagacatgggtttgaatgcagataagacagccccccatttcaggaagacatgggttggaatgcagagtcctgccacttgggaactccagggtggaattcaccaagtaattgtgcatttacggggcctgaggagatggagggttaatttccatgttgaatagatgcgcctgcttacctcctagaacattacctcctagaacactgtgtgccctgcagagccatcgacctttattataggccacgtgccctcggaaacttgggacagtactgatgcgttctgttgagtgcgtttggcatgtgggaattgtgatggtgcacagtgtcttggccttcactgggttttgtaggcacactaaggtttccatttcattcttcttcagttgccctggcccagcctgggtctctgggtagagcacctgcaggggcagtggacggcctgggctcagggtcggtcagcacctgagaccagcgctcctaggcctggcctgtgactgggctgattttcccccacacagcgtgctaccaccggcctggcagagccagcacggcagccggcgtgtcagtgaggctccagcacaggcagcctcctccaaatgttgttcattcctttctgtgctttttcctctatagcagttcagttagggtcgccagcttgcttttttgaaaatcatagatttttagtttgttttaaaatgacgcagaactaggagaaaatgcaaatggctcctagttttctgaggcttttacacacatgcagtgtttgactgcagttagtttgggattgaaagtggactctgaggccaggtgcggtggctcatgcctgtaatcacagcactttgggaagccaaggcaggcggatcatgaggtcaggagttccagaccagcctggccaacatggtgaaaccccatctctactacaaatacaaaaaaaaaagttagccgagtatggtggcacatgcctgtagtcccaggtactctggaggctgagacaggagaatcacttgaacccaggaggcggagattgccgtgagccgagatgtgccactgcactccagcctgggcgacagagcgagactccatctcaaaaaaaaaaaaaaaagtggactctggaaagtgctctgcttccgtggcgactggtcggctgaacttggtctcacttgtcactcagttctgctgtttgtacctgccaagtaagggagggggactcgggaggctgggcagcctccagccccaccgcctccacctgcatcactttgggcgagtcatatgtgatgaactgggccggctccagtctcccctctgtaacgtggggagaattctccctctcacggctaacgtgggaatcggcagatggaaaacactagctacgcagagtgtgtactgtacacgtggctctgccaagccaggaagggtaggtgtgctgtctgaccgtcacggcatgtggcgtgctctgagtgtaactcgaaaggagaagtttatgagaaagattgaaagaagccagaaaactgacgttcgtcttagttttttgccattgatcattgaactcgagagtggagaactggacggttctaagccaggtttactcacacctctgctccgttgccttaaagccagaaatggttctttacaatcacatagggaatgtcggaggaactgcagggtcacctaacagatgtcagctgagactctcaacaaaaaaacgtttttaccaagaaagctaatgccttcacaggtagggcgctgctggaggcatgtgctggccgccgggcagtgaacctggaaagtgtagagtccttgaaaccactgtggcacgaacacatcctgtggttgttggaagaaggcacagctgacactatatcagtggaattttctgccagcaactagcttactccattttccaagatttggctgaatttattttaggtgtttttttttttttttcttatcacttgagaacattttttcatgtgatgtttcatctttgaaaatattataatctgaagtatgagctggaataatttctttgtcatgtaaaatccttgtttttttttttggaggtgcgaatttttcttacattaacccgtggtggtcttttccctagtagttgctattgagtgttgatgtctgcctctgacaggctaggggtagtctgtctaagtgaacagaaggacattgttgaaagtgaagtatcattatttttattcctgcatcgtcttttgttctttattcttggcagcggtaaaactcctccaggcagctgacagctttaaagaccagaccttctttctcagccaggtttcccaggatgccctgaggagaaccatcttccctctggggggattaacgaaagagtttgtaaagaaaatcgctgctgagaatagacttcatcatgtgcttcagaagaaagaggtacgagtgagcagttgcctttgattagtgcctgtttccctttcccgactgcatggcacggagcagctggacctgtgggtcccgcaccacttccccttctccaggacctaacatcaaaggcgggccttggagcaatagatggaggagtttgctgaggcgcacggtacagggctctgctgacatcgggagcagcctatacgagactccttgcttttttcctctcctctgcccctatgtggtaggcagctttccccacagccttagcagctggtggggtgctcttgggatggcctgcctgccaggtgagtgccaggcagtgtgatgcagccccgagacccctggaggggcaggtgctgtgccgccgtctgcacactcatgtgccctgtcacccgcttgcccggcacagactcgttcggtgccatctgttcgggcgctgtgctgctgggccgcgaggaattggtgacgcgcacacagttccatcttcgcctccatggagcccgcccgcgagtgggggacacaggcaggaggccaatcagtgtaaacctagaaaatgtctacggagggaggtgtaggaccctgggtgggaagcaccagtggggtctgagagtagggaatggagatgccaaaaacggcctcaaaagaagtcacatggaacctgagacctgaaggaggagaggatccggtgtcccagagagggctgggaaagtccagatgagggaacggcagtgcaaaggccttgaggcgaggagaagccagggagccgctgtgggggtgcctgcctgtggccccagctcctcaggaggatcgagcgcacccaggagtttgaggacagcctgggcaacacagcgaaactcgtctcaaaaagagagaacccggagtgttggcggaactaggatgaagcccgtgggagggccttggggatggagggcgagggcgctgtgggatgagcctcacctcttcaggggccagtgcggtgggagctgttgctccttcgtgtctcttcctggtaatggaaacggccatacctttcatcagagccatcttccctgaagagcacgcccaccgcccgtcctcctctcctcttgttttccgtttccggtgtcgctctgtggtgggagccgcagggatggaagggcagtcttgagagacacaaaccagagtaaacgatgcagcccctgatggggccacggtggagagcgcacgccacccaggctccccagctagggcagatgtgcttgaggaaggcgcctctctcctctgactcccctggagccctcccctaaggccttagcttcaggcctggctttcctgctacctgccccttctctggtccctgtctctcccccactcctcgcaggacagtggcctgaaggacctgaccgggttctgctttcttccccggggcagctggtgtgagggtctcccgcgcagggtcagaccccgcgggccgagacaatgaggcgttctctaaggctctggcatcgtgtgcgccggctgtgactggcggccgagggtgccggtgggcagccgggcccctaccctggaagcaaagtgtggggtgaggccgggaggccccagggcccgctcaggacgtctgggtacagcttgggccaccgccacttctgctcctctcacggctgccgtcttctcatttcagagcatgggcatgtgtttcatcgggaagaggaattttgaacatttccttcttcaggtgcgtgctgctctttgacacaaagagatggggctgcgtgtctgccctgggcctagatctccgtcggtaatgacatgtttgttttccagtatctgcagcctcgacctggtcactttatttccatagaagacaataaggttctgggaacacataaaggtgaggtgcagactctgccacttgtcatctgaaatgcctagagctgtggcgtttcagctctgggagactagaccagagttcctgtcgtcccttccacttggctggagaattgtagaaggctctgtggggcggccgggggcgggcacggcctagggtggaacagttgccttgatggtggctgggtgcacttccagatgtggcctcagctgagatgctggagttcatgaaaagcgcgcctctgacttggaaggactatactctgtgagttacgtatcaagtccctgtaaaaagaatgatttccttcctgtgtaaggaaaatgttaaactacacaaaactccactctgattcagggagtaaggtggacgtcccggcatggtgtgaatgattaaggaccacatgcagcgatgggatcaggcgtccgcgctggccagagtgctgctcgctcatgtgcagacccttactgcggtgaggcctgcgtgagcctgtgctgtgcctggtgtcaggggacaggctccgagtcagtcacagtgtgcagtcctgctgtggggacagagtgcagccattgttgggttagtacagtggcggggatgtgcctgccggcgtgatgatcaggcaggtcttgacacagcacagacctgagctgtgggactggccaggagagccaggctgcagctcaggtgtagggcgtcttgcagtgaattgcacttggagatcttccacctcttgtggaggggagacggcaggcggagccggggctaggcattcctgagacaggtggaggtgacagctttgcttgggacagaactgccagacaggattgcccatgtatctgccagccctggccccagcaggagccagttggatgactcatggcttccacctgcagttcacttcactgaagaaggctgccggcccaggccacgtggtaaatcccatgaggttctctctgcctgtgtgccccactgcaggggagggaggcagtgagtttgccatctgctgtgtgacattgtgagggtgcgcagagcagctgggggtagccctgatgcagttactgcattagatggacactgtgaagacgtgcagctatgtcatgggctcagcaagaagggcccctggcgtcacacagggcacccagccgcatcctgggcctagggtcaggggctcctacagctggaacctgcaccttctggggcacaaggtgccttctttgtggccaccacaccccatgtccagcccaggcctggacaatgatgagatgtgctcaggtgcttggtcagggctggctttggtggttggagaatcgtatcttcctagtgagttacaccattgctgggcctgctctgggctgccctcccagcatctgccttcatgatgaggcgtgacatgtgggctgtaacttgttgcccagcctcatggagaaactgtctttctgtaggttggttcctgtataccttgggccagagagcaaacataggtggcctgagagagccctggtacgtggtggagaaggacagcgtcaagggtgacgtgtttgtggtgagtgggccggcctctgagacagcactggggctggttctggcagggccagcagtgcttccagaccagggcttgagaaggcctccagcagccgtggcttcctggaggctgtgactaactctgttcctgtccttggtcccctgcctttcctgggactggccatggtggcaggagagttttaaggtattcattaggctgagttgtatgctggtctcttaatcatccctgaaccccgatacacagatacagtttctccaattttatgaaagaggacagcgacgcccagagcttgggtggctcatccggtggagagggcatggcctcagtgccaaggatggtgcccaccatggtaggatccagtgagttgttgtcaggcaggtgcagatggccaagccaggatcaaaccaagccttccaccacagtggggaccttaccactgtgaccctggcctcaaagcagggccgctcagtggcggcaagctcaccccaccttcaggggaccttgccagtgtctagaggcatttttggttgtcacagcttgggtggaaaagcaaggacgcgggtgctgctgcatctgtgggtcaggccggggatgctgcttgccgtgttcagcacagcctcttccctgagtgacccggcctccaccttggcgcgtggagctgagaaggcccactctcagcaccctggctgccggctcatgttctggcacgaatgctggggcgccttctcttagacggaggcgggggccagcaggccccacccaccgattccaggacatctccttactaggaagacctgtggggagaaaagcctggctgcgaatgaattaaatgatctagatttcagtttgctgtgagaagaccagaagggttaaccaacggcctcctgtccctggacgggtcttggtgcctgcttagaacccaaagcccttaacttcatgctcctcgtcctgcttcaggggcggggcttggcacaatcccaggaggtgccaggtctcaatggcccgaggccatgggtgggtgacagggagcaggggcctcagaaccaacctagggtatctggggccccccagaccagggccagtcctggggcacctgtgggaagccagcagctaccagtccctcctttctcctcagccatttggtgtgtggaggaattcctggggtggccttgagagaagagcccgtggtgtggctggcccctgtccctgcgaatagaaaaaccagtcctcgaggggggccgtgctgctgccccacaggtggttgcaggtagagggcctgagtcagacttgaacctgcagcattcactgtcatgggctcggatctcacccctgcctcttgcccactctgacatggtacttccttcctgggccttagtctcctcatctgtaaaatggggattcaaaggcccggcgggtgatgagatgaatttctgtgggtagaacacttcgagcggtgccagcaccgttacctgtgtgtgtgtgtgctggtaggacagttgttcccagggaccacactgaggccggccttggggccaggtgcccctcggcgtccccaccttcacattccattctgcaggccccccggacagaccacccagccctgtacagggacctgctgaggaccagccgcgtgcactggattgcggaggagcctcccgcagcactggtccgggacaagatgatggagtgccacttccgattccgccaccagatggcactaggtgactgacgggagggctcctgaggacgggccccttgaagctgagcttcctgaggccagatttgggccagggatgggagaccctggggtaggaaagtcccgttgtggagatcatttggagattacctaaagtatttagaactcccgtgtcctgtgcctgccctgagcgaggcctgggggtgctgggagcagatgcaggcaggccccggcgtgttgggctgaagcaagtgtgtacactgccccgcagtgtcctgctgcgtccagggcccaggctggtgccctgcccttcccctctaagcaggggtttttgaccccgtgggctggtgctcctttctccctgggggcctgaggtcgaccaggaaaggcctgtgccccctccaagggcccctctcttctacccagtgccctgtgtgctgaccctcaatcaagatggcaccgtgtgggtgacagctgtgcaggctgtgcgtgcccttgccacaggacaggtgcgtggggtgtgggggtgagcccggggaggactgtactgctctgcaccctgccagggcacccgggttacagaggaaggggctgaggcccaggagtagggtgtgctcgggtcacacagctggtgagggcagagtgccaccagccctgccctgggggctcctcccacagtgacaactgtgagaggatttccactctggtgtcaccaaccagccagttcctgctcgggccctgagaggctcagctgctgcccgggccccagaagcgaggacagaaaatggaaggggcatgaggacagtgctcaaagaggcagagggtcggggcccctgtgggccgagtgtgcaggagctcccagggtgggcgcctggtgggtgtaggcctgaggaatctccaggggcaggtggtgggagggaacctggggtgagggaagcggaagcatcctctggctgccaccatgctccttcctgtcacagctccacattcccaaggggtgcagagacctgccagtcccttggagtcccaggagaggcccctgtgactgtcccactcagggagaggtaccctgaagaccctccctagtgaagccactgggtgccccaggcctctcctctcctgttcagcagcagcagcagcagcaaaaccctgctcccctgggagctcagtgcctggtgctccgagcacaggccaggccccataggggagcactctgcccctgcctgccctcggctggctccctgtggcacccctgatgccagggtctctcccctacagtttgctgtgttctacaagggggacgagtgcctgggcagcgggaagatcctgcggctggggccgtctgcctacacgctccagaagggccagcgcagagctgggatggccactgagagccccagtgacagcccagaagatggtccaggcctgagtcccttgctctgacagagatgga

SEQ ID NO: 14709 - DNA, 1633 bp, Homo sapiens
gggtttctcacggatctgcggcgtccacattcacctgtgagaccgtggacactggtgaggggagctgggatcgccgggccgggggcctgacctctgcacacgctgtggccgcccggtgggaggtccttgtcctccccactcagcagactggacaactgccgcgcggcgggtctgcttgttcagcgtctcctgtgttctccgctcgctggaggacaaagttttctccaggagcatttgcatttcttccggcatctaaacggagccccacgggtgcttagcattcctcgggcccggcgctgaaatgagcacttgtttaacttcacctgtgtggctccccgcgggaggcctcattcacagagtcacgtttgtggagctctgctttgcgccatctttggctcctgaccttgggcaagtgaattaagccgtcccctgtaaaattcggctaacacctgcctcacggggtgactggagggattagatgacatagtacatactgatgagtacgtgctcagcacatacgaggttaccaggtgacaggggtgtttatgaagaactgggactcactggatgaacatggggtctgtactgccgacaaagactgtgaagatgcttacagagtttgccagatcttagacatccctttccatcaagtgtcctacgtaaaggagtattggaatgatgtgttcagtgactttttgaatgagtatgaaaaaggaaggactcccaatcctgacatagtttgcaacaagcacatcaaatttagttgcttttttcattatgctgtggataatcttggggcagatgccattgccacaggtcactatgcaagaacttccctggaagatgaagaagtctttgagcagaagcacgttaagaagcccgaagggcttttcagaaatcggtttgaagttagaaatgcggtaaaactcctccaggcagctgacagctttaaagaccagaccttctttctcagccaggtttcccaggatgccctgaggagaaccatcttccctctggggggattaacgaaagagtttgtaaagaaaatcgctgctgagaatagacttcatcatgtgcttcagaagaaagagagcatgggcatgtgtttcatcgggaagaggaattttgaacatttccttcttcagtatctgcagcctcgacctggtcactttatttccatagaagacaataaggttctgggaacacataaaggttggttcctgtataccttgggccagagagcaaacataggtggcctgagagagccctggtacgtggtggagaaggacagcgtcaagggtgacgtgtttgtggccccccggacagaccacccagccctgtacagggacctgctgaggaccagccgcgtgcactggattgcggaggagcctcccgcagcactggtccgggacaagatgatggagtgccacttccgattccgccaccagatggcactagtttgctgtgttctacaagggggacgagtgcctgggcagcgggaagatcctgcggctggggccgtctgcctacacgctccagaagggccagcgcagagctgggatggccactgagagccccagtgacagcccagaagatggtccaggcctgagtcccttgctctgacagagatgga

SEQ ID NO: 14710 - DNA, 21029 bp, Homo sapiens
ggttgcgcgcgggtcggcaggaggataccccgtcctctgactttggttcggaggctcctcgccctccacctgtgtagtcggaggtgtgcgcgactgcagctccgactacctgggagcagttccgcgcccctctccacccacgcgcgcccacccacagtgagaagccggcgggccggggtggggtggggagggaagggtttctcacggatctgcggcgtccacattcacctgtgagaccgtggacactggtgaggggagctgggatcgccgggccgggggcctgacctctgcacacgctgtggccgcccggtgggaggtccttgtcctccccactcagcagactggacaactgccgcgcggcgggtctgcttgttcagcgtctcctgtgttctccgctcgctggaggacaaagttttctccaggagcatttgcatttcttccggcatctaaacggagccccacgggtgcttagcattcctcgggcccggcgctgaaatgagcacttgtttaacttcacctgtgtggctccccgcgggaggcctcattcacagagtcacgtttgtggagctctgctttgcgccatctttggctcctgaccttgggcaagtgaattaagccgtcccctgtaaaattcggctaacacctgcctcacggggtgactggagggattagatgacatagtacatactgatgagtacgtgctcagcacatacgaggtacgcagaaaacagtagtggctattagtttatattgttaataaccatagctattatggtaggtacagtaagtgccaaagagaagggtaggcggaccataagcagaaatagttgtgaggaagggagagtggaggaaagcatcctagagatggaggtgctcagctgagtcgaaagaagagtaggatgtcactaagcagagacttggaggtggaggcggccctcccggcacagtcagcagtgcaagcagaatcacagaggcctgcaagtgtgggctggttctggccagatggagatggaaggagaggagcctggagcacgtttagccctgattatggaagatgctataccaggggctttagactgttaggtagacattagtctggttgatctgggataggggtggtctttcgcgtgtggtggtgtagttttgacaaagctttgtcatcaaatttctgttgttttgggtactatatgaagccttcttcagcagtcatttgccctgtctttcattacattcagcctacctaaacgaaccagctttctcatacagggtctgcacctgtgtagtttgctaaggtggtgtagggctaaagttggcctttccaatatttgggtgaatattttgttacaatcgaaaaggtagaaaataggtcataaactaggtggtacagctcttacaaaatatcgaaaattttaattatctttatatctgatcacttagaatctaagtcttagatagtaactagaaataacttttgaaaagagtttccttttttgataactgaatggtgctttgaaaaattttgttgagtttcgactattccttcgtgtattccacacacactggctgatcccctcctgctaggtattgtgctgatacatagatggggacacaaagatgagaaaataccacctcgttaatcttggggactcaggcaccaagatggaaaccggatccctgaagccacatggcaaagcagggactgcccggcaggccaggcacagaggcacaggagcacagcgtgtggggaacttctcagagctcagaaatcactgccgttttaccgaaggttgatttatgtattctctttaattgaccttcccgcccgcaggttaccaggtgacaggggtgtttatgaagaactgggactcactggatgaacatggggtctgtactgccgacaaagactgtgaagatgcttacagagtttgccagatcttagacatccctttccatcaagtgtcctacgtaaaggagtattggaatgatgtgttcaggtgagtgcgggtcacagcacaaaggaagcttcctcacactgtggatccttgcagtggaaggatccggtaaccagccagaccgacgcctgtgctgcagcccagcgctctccctccacggtggtgctgaagactgcaagaggcctcagccaccctcggggctctgtgttagaggcgaggcctggaccccacagcacacccagctctctcactcctgtcattttgccacttgcctgaagtctctttaatgctttcttggaccttgagctgtttctgttgcccagttaggataggggagctaaggctgagggctcccctggaaggtgagcaccaatgcctgtgtgctatgtgggtcagcgattaggggatttctgagaaagaggtgatacatggcctgtgcctctgaaaacaagaaacaaacaaaaacttttctaaaatccaatataatctcaataattaagtgctgtgtgctaggcgtgtgccacatctaggaacattaagatgtcttcactgtgacctggctctgtaggagtttgcggtctagttgggaggacattatcttcacaagaggtgacagtgatgcgtggcacgcaggaagtaccagtgatgctatcagtcactgaacccagaggagggagaaacttgcagtgtggagtaatcaagaaggcttcaccggagaggaggggttgcaaacaaagttgtagagaagggactccaaatggggtaacgagagcagcgtgaaggggagaagaaatgctgattgtgtatttcaggaccgttgtaaagtttggctggacttttgttcctgcagtggaaggagtgtagggctcatcctctggtgagccctgactgtgatgaatgtcgggcagttgtcgaaggcgtctgacacagcaggccatgtgcgcgggacaggctgcccctgcctgagtgggctttaggggcagaagagccttgggttgagtcctgactgtagcttattatatgaccttgggcaatttacttgactttgtttttttaattgaaaaaaattctctttttttcctgccaacaaagacccagaagagatacttgacttttctaagccccaattttctcatctttaaaatgaggataacactgatgcctcacagggttatgaaagaattgagattaggttctagtatgtatgcctggtatattagtaagcagtcaataaacatagctgtttttcttttctatttttttttgagacagagcctcgctctgttgcccaggctggagtgcagtggcgcaatcttggctcactgcaacatctgcctcccaggttcaagcgattctcatgcctcagcctcccaagtagctgggattataggcatgcaccaccacgcccggataatttttgtatttttagtagagacagggtttcgccatgttggccgggctagtctcagactcctgacctcagaagatccactcgtctcagcctcccaaagtgctgggattacaggcgtgagccaccacgccagcctgctatttttattttcattattaaaaagatgagtctggggagctaagctatgaggacgcaaaggcataaaaatgatataatggactctggggtgagggataaaagactacacatcgggtacaatgtccactgcttgggtgacgggtacaccaaaatctcagaagtcaccactgaagaacttatccatgtgaccaaataccagctgttgcccaaaaaaccattgaaataacaataaaacgaaatttagagagattaagtaaattgactatggtcacctaaataatcaacggaagagcttgaatatgaaccctctgtgactctatgctataacatatgggtgtcgtatatattaacaacatggacaaaactgatggctgaattttcctggggaaagttacctgtagaatgcatgataaatgcattaaaaacttatctgtagaatgcatgataaatgcattaaaaacttctgcagttttctcggggacataagaaaaaaaaaagagtgtggcggccaaatacaggataaatctgggggaagaccaaaggcagagagtctcaggaagtgctgttgctggagatttggacttcatggggagggagtgtgggagtggaaggtgagggctggcttgttggacccagaggacaagtccaccgggcagtagatctgaggtgcttgttaaacacagacctggaccgaggtctgggggcggccctggaatctgctttaataagcacttcagctgtgctggtggtgtggggggttgtcagggtctttctttgagaaaaggtgtgatgcggcttagggactgatgtgtgtgggagaccagagaggagaggagtcagcagtagtttcaagatcaaggctgggtggctggggaaagctggtttaggggattcctcatgagtactgtagagtttgaggggacaacagggaatccaagtgagcttacacttcacctgccagcacagctttttcagaacgtacgagtggatgcgatttttgaagtttagctcagctgaggccagataggaagagtgacttgaatagtatggcaaattaggagcggagctgggattaaaccccagaattaggagcggagctgggattaaaacccagaattaggagcggagctgggattaaaccccagaattaggagcggagctgggattaaaccccagaattaggagcggagctgggattaaaccccagaattaggagcggagctgggattaaaccccagaattaggagcggagctgggattaaaccccagaattaggagcggagctgggattaaaccccagaattaggagcggagctgggattaaaacccagctttccaggccagtgcttgctgccgccttctggcgctgcttgatagggactgagagaaggaggcggccgggtagagtcttttcccatctctggggctgcccccgaggtcgcccctggctccagccagcctgccctctgccctcgcccagtaccagctgcccgtggaggcattggtctttccgctgaagactcacttctctagtagggctctctagctcagagatttcttttgcattctttcattcaagacccactggccttcaaggatcagagtccagatacgttttagctgctgagtcttttaaatctgtctccctcccgaggcacatgaaaggcttctcttctttccagttagagaagaggctgggctactccattgtttttgctaatgccaaaacacacgccttcccatctgctgtttacgaaagggttaacagtgtgtcttttcagaaactgattttaatgttcagcctcttcaacatttattgatgactgtgatatagaaagtttgttgggtctaggacacagacacagattgcaccttaagtagtttatagtttaatgagcttcctggtaactttctaataattaaagcaaaatggaaagagtgtaataatatcaagtgttgttgcaaatgtggaaaaacatgagtttttatgaacttctagggggactgagaagtaggaaaacagtttggtgcctgctaaagtggaagatatccaaggaacctctgaccctgtgcagatctgtgatatgtctgcaaaacacaaacctcttgatcagcactggttttttttttaacccttgttgattaatagagagttttaggttaaatgaaaaaaatcacttataccaaaaatacacccatttttaaactcccaaaataggcatcataaccctcttgaagtgaatcctcgaagactatgaaattcttggtaagttttgctggtatcatggcatctttttcccatgttcagtcagtctgttagagcagaagttcactgaattaggatagcctgatccactttaagcacccaagagtttgctagttctcagaagtgtgtgtttgtcacctgaggatagtatttttggtatatttgcccagtgacgcagcattccaggctgagattgcagaatggctcatggagcccttgtgtagggaagcctctgactgtgtttctcctctgttctcatcacggcagtcatcctcacggaagaaggcttctgtgacaaaggtgtggggggttttccccatacagcaagcagtggacaccgactgggtgtcctctgattcagttccgataccatctacttggagatagtgctggatcccaaaggttgggggttcagtcccccagacggactccccccacaacagcagtcgaaagtatgggcctctagaacttatgaccaactggcttccagttgggattcccataacttcctctttgggttcaattattaataatttgctggagtggttcacagaactcagaaaaacacatttaccagtttattataaaggatgttgcaaaggatacagatgaagagacgggttgggtgaggtatggggaaagggtcatggagtgtccacaccctccctggggaccaccctccaggagcctccacaagtgtagctgtgcagaagctctctgaacccagtactcctgggtttttatggaggcttcatgacatcgccattccttcccccaggatatacagtgggactgtgtctggggagggtcttaagacccacagtcagaaaggtagacgcttgtaatcctagcactttaggaggctgaggcaggagacttgcttgaggcctggagttcagtatcagcatgggcaacatggcaagacctcatctctataaaaaaagaaaaggttgcagtgggccaggtgcggtggctcacgcctctaattccagcattttgggaggctgaggcgggcagatcacttgaggccaggagttggagaccagcctggccaacatggtgaaaccccgtctctactaaaaatacaaaaattatctgggcatggtgctgcgcacctgtaatcacagctattcggaaggctgaggtgggagaatctgcaagggaagtctaaaggatttcatttccactgtcactcaggcatcttctcttcctcacctaagccctgctgtgttggaggagtcccagaggcagggttttagtgagaccctcacggccactccccactcctgaccccataagccctgtgagcctacacagagacggtggctcctgagccgtagtggcagagaataacaccttgtcgggtggcccatgcagcaggttataaacaaatgttcgatgactgacgttctcctgttttgcagaaaattatagttttggtatgacaaggggaaattacattaaacaagcaatttagtgaactttttttttttttttgaggaatgtttcacacttggaactgaagtcattttcttttattctagtgactttttgaatgagtatgaaaaaggaaggactcccaatcctgacatagtttgcaacaagcacatcaaatttagttgcttttttcattatgctgtggataatcttggtaagtaatttgggtttaaaacatttttttttttaaagacagggtctcgctctgtcacccaggctggattgcagtggtgcgatcatgactcactgcagcctcgacctcctgggctcaagagattctcccaccccaggctcctgagtagcttggaccacaggcatgccaccatggtggctaattttttgtggagatggtgtcacaactgtattgtccaggctggtctcagatttctggccttaagcagtcctcctgcctcggccttccaaagtgctgagattacaagcgtgagcccctgtgcctagcctgtttcttcttgtggaacctcctgatactgaattgcttgcttagaccacctcttgatgtctgtggctatgctttatgaattttaggttcttcttcctgtcccctgccattggggtcaccataatgagtttctgaagttctggctcaggcttcttggtttgctctgtcccactgcagctcaccctgttgtgtgttgctacgagataccattgtaagccaggggcccagtagtgtcggcactttcagcaatgatgtagattaggcttgcagattcaatatgtcagcaacctaaagctgagttgatgataatgatgaaagttagtttgtggagttaggaataaacaaatgcctacaaaaacaaaaaatcaaaaagaaaaatcttaaatttcaacattgggctaacaccaaaaacatgaaacttaatagagataaatgcaaagtttgctaactaggttcagtaattctcctaggacaagattggaaagacctagcttggttgccattgaatcttctgccattggttgcagaaaatctgggggatttaggtgcccccaggctgactgagccagtagtgtgatgtcttttgtcagagccagcacagacggagctcaccttgatgatcatagaatgtctaggaaggggtgatgcgtcccctgtggtccgtcctggttagaccgtattagttattcaggaaaagagtgatagactgatagaatgtgaattgatttttattttcagggtatctggaaatatgtcctccctgaactgttgaaattactttgggtcgtagtggcagtggtcaagcgtgtgagttaggatgacattctttgtgtgacaccagcagacagttaggactggcaggagaaagagttccctgaggtggaggcgcaggcagctgttcaggaagggaaggcttgcctttggagagcattaagctgtcacgaaagctttttagggagcccctaggtggctggctgtcaggcacgctgtggaaggaacttctgcagtgaatgtttccacacctggaagaaaggcatgaaccgtgcagcacaggatgagaggacatgacgcccagacttctgaactcaccgcgcttctcagaggcatcctgcgctttttctagtataagtgctgttctttgaggacacagatgtaaagtggattgttttctctaggagaacctcagtcaagatgagattatgtgtctctaaagtgcctttttcaggtcgttaatatgcagcagctaattcttgctgtgtcttctgtttacatggagctagtgtggctggtccaggatggctgtgtcttctgtttacactgagctagtgtggttggtccaggatggaatccattttgctgcacctttcataaaagtctcttgcaatactaaatatctgtaattttttctttttttgagatggagtctcactctgtctcccaggctggagtgcagtggtgtgatctcggctcactgcaacctccacctcctgagttcaagcaattctcctgcctcagcctcccaagtagctgggattacaggtgcccaccaacatgtctagctaatttttgtactttttttgtagagacggggtttcatcatgttggccaggctggtctcaaactcctgacctcaagtgatccacccacatcggcctcctaaaagtgctgggatgacaggcgtgagccgctgcgcctggcccaaatatctggaatttttacacaatgaaaaggttctggattcatatgcaccttgttaggctctttggctttgtgtaatatgaaaagaagaaacagtgtgctggatgattcttcactctgatgaaaataatacatatttattacagaaaatttaaaagaggagaaacgacacctataatttcactctcagaatcaaaggaatagacctgagatttttcttcaactgtttctgtacagtaaaaaccgtggaatcatggtgttacatcctcgccctgctgaacagtgccgggcattttcccgtgttagtaaacattctctgtaaggacccccattgttacggcagtgcattgtcattcacttcacattctcccagtgttgaacattttggttcttttttttttttttttcctcctgagacagcatcttgctctgttgcccagactagagtgctgtggtgcagtcttggcttcctgcagcctcaacctcccaggttgaagcaatcctcccacctcagcctcccaagtggctgggactacaggtgtgccccaccacgcctggctaatttttgtattttttgtaaaggtgggatttcaccatgttgcccaggctggtcttgaactcctgagcacaagcaatcatctgcccgcctcggcctcccagagtgctaggattacaggcatgagccaccgcgcctggcctcccttcgtattatcacaaaccctgaaaggaatattttgtgtttaaatctttctgtgcctttcagactgtttccttaagccagaaattaactttggaaaggctcttaaaggtgcaataacactttaagtagcaaggttgtatcagcttaagagttcaaggctgcttgtttgatgaaattggatgtgtgcgtctgttccctgggatctctatgtttgggtgcagggtggattgtgcagcccctcagcctaagacttggggtctatactcttcttttgtgccttggtttatgctgatcaaggcctgcaagtatgagtctaaaacctgatccttgtgttctaaaaacctcacaggggcagatgccattgccacaggtcactatgcaagaacttccctggaagatgaagaagtctttgagcagaagcacgttaagaagcccgaagggcttttcagaaatcggtttgaagttagaaatggtaagttcatgtgcccaggtcagagccaaattcttgtgaacagattgaaatctttggaggaatgacagtgggttgtgcctgaggatcactgccacccctccctctgtgctccagagtagcttgtatgggattcacatttgaaaaggtgcagttaccaagaggacattttcccggagggcctgtgattgggtagtaaacagtgtccctgccggccatggtgagggctggtggaaagtgacatcagatactgataatccagctctcgacactgtgtggtgatttgaatgttccaaaaatatctgggtaaatatttgacagtgataattggggtgctgtcagtctagccaaggacctgtacttagcaacaagttctcaagggcgtgcggttcaggcagactttcaacgtgctgtgagcacaggacctgctgtggatcgcatgggctcagcagtcaggctttgtagccgtatttacacgttagtttatgcgtgttagggagccaagtttcacctttctagaaaaaagtcaatggcagacagtgagctgggaagctgctggcctgtcctggtgtacattcgtgtgtagaaaagaggaattccctgtattgttgagtgaaaaaccaagtggggctcagagccgtgtttccgcacggagcgtccgtccatcagtggggacccctgaagggcagccttgctcttttgtccggaagttcagatgttggagggagccttgtcccgccatctggggaataggggtctctggggctggggcagggctttacatacacacatttcttttttaattattattattaattttatttttttgagagaggatctcactctgtcaaccgggctggagtacagtggcccgatcttggctcgctgcagcctccacctcctgggctcaagtgatcctcccacctcagccccaccaagtagctgggaccacaggtgtgcgccactatgctcggctttttcattttttgtagagatgaggtctcgttaatgttgtccgtgctggtcttgaattcctgggctcaagcgatcctcccacctcggcctctcaaagtgttgggattacaggtgtgagccaccaagcccggcctcacacgtttcacatcactcctcttagcagtccatgaggtgtatgctctcatcccgtttcacagatgaggaaaccgaggcccggatgaagccatctgacctgggtccctcgggtggcagagctggatttcagtgcacttccgctcactccccagcccctgctgcttctgctgggtcaggccccagctgagttctttcctcagcgttgctgagcccatcctgaaggctgcagtgatggggcagggccgtgcttggtcaagggagccctgagtgtgccaacagtcgtctgccgccctctgttccctcctcgccttccttccttatgccacagggtgatcaggtaactgtactgacttgagcccagagaagagcagcccactcccgtaagacagccccccatttcaggaagacatgggtttgaatgcagataagacagccccccatttcaggaagacatgggttggaatgcagagtcctgccacttgggaactccagggtggaattcaccaagtaattgtgcatttacggggcctgaggagatggagggttaatttccatgttgaatagatgcgcctgcttacctcctagaacattacctcctagaacactgtgtgccctgcagagccatcgacctttattataggccacgtgccctcggaaacttgggacagtactgatgcgttctgttgagtgcgtttggcatgtgggaattgtgatggtgcacagtgtcttggccttcactgggttttgtaggcacactaaggtttccatttcattcttcttcagttgccctggcccagcctgggtctctgggtagagcacctgcaggggcagtggacggcctgggctcagggtcggtcagcacctgagaccagcgctcctaggcctggcctgtgactgggctgattttcccccacacagcgtgctaccaccggcctggcagagccagcacggcagccggcgtgtcagtgaggctccagcacaggcagcctcctccaaatgttgttcattcctttctgtgctttttcctctatagcagttcagttagggtcgccagcttgcttttttgaaaatcatagatttttagtttgttttaaaatgacgcagaactaggagaaaatgcaaatggctcctagttttctgaggcttttacacacatgcagtgtttgactgcagttagtttgggattgaaagtggactctgaggccaggtgcggtggctcatgcctgtaatcacagcactttgggaagccaaggcaggcggatcatgaggtcaggagttccagaccagcctggccaacatggtgaaaccccatctctactacaaatacaaaaaaaaaagttagccgagtatggtggcacatgcctgtagtcccaggtactctggaggctgagacaggagaatcacttgaacccaggaggcggagattgccgtgagccgagatgtgccactgcactccagcctgggcgacagagcgagactccatctcaaaaaaaaaaaaaaaagtggactctggaaagtgctctgcttccgtggcgactggtcggctgaacttggtctcacttgtcactcagttctgctgtttgtacctgccaagtaagggagggggactcgggaggctgggcagcctccagccccaccgcctccacctgcatcactttgggcgagtcatatgtgatgaactgggccggctccagtctcccctctgtaacgtggggagaattctccctctcacggctaacgtgggaatcggcagatggaaaacactagctacgcagagtgtgtactgtacacgtggctctgccaagccaggaagggtaggtgtgctgtctgaccgtcacggcatgtggcgtgctctgagtgtaactcgaaaggagaagtttatgagaaagattgaaagaagccagaaaactgacgttcgtcttagttttttgccattgatcattgaactcgagagtggagaactggacggttctaagccaggtttactcacacctctgctccgttgccttaaagccagaaatggttctttacaatcacatagggaatgtcggaggaactgcagggtcacctaacagatgtcagctgagactctcaacaaaaaaacgtttttaccaagaaagctaatgccttcacaggtagggcgctgctggaggcatgtgctggccgccgggcagtgaacctggaaagtgtagagtccttgaaaccactgtggcacgaacacatcctgtggttgttggaagaaggcacagctgacactatatcagtggaattttctgccagcaactagcttactccattttccaagatttggctgaatttattttaggtgtttttttttttttttcttatcacttgagaacattttttcatgtgatgtttcatctttgaaaatattataatctgaagtatgagctggaataatttctttgtcatgtaaaatccttgtttttttttttggaggtgcgaatttttcttacattaacccgtggtggtcttttccctagtagttgctattgagtgttgatgtctgcctctgacaggctaggggtagtctgtctaagtgaacagaaggacattgttgaaagtgaagtatcattatttttattcctgcatcgtcttttgttctttattcttggcagcggtaaaactcctccaggcagctgacagctttaaagaccagaccttctttctcagccaggtttcccaggatgccctgaggagaaccatcttccctctggggggattaacgaaagagtttgtaaagaaaatcgctgctgagaatagacttcatcatgtgcttcagaagaaagaggtacgagtgagcagttgcctttgattagtgcctgtttccctttcccgactgcatggcacggagcagctggacctgtgggtcccgcaccacttccccttctccaggacctaacatcaaaggcgggccttggagcaatagatggaggagtttgctgaggcgcacggtacagggctctgctgacatcgggagcagcctatacgagactccttgcttttttcctctcctctgcccctatgtggtaggcagctttccccacagccttagcagctggtggggtgctcttgggatggcctgcctgccaggtgagtgccaggcagtgtgatgcagccccgagacccctggaggggcaggtgctgtgccgccgtctgcacactcatgtgccctgtcacccgcttgcccggcacagactcgttcggtgccatctgttcgggcgctgtgctgctgggccgcgaggaattggtgacgcgcacacagttccatcttcgcctccatggagcccgcccgcgagtgggggacacaggcaggaggccaatcagtgtaaacctagaaaatgtctacggagggaggtgtaggaccctgggtgggaagcaccagtggggtctgagagtagggaatggagatgccaaaaacggcctcaaaagaagtcacatggaacctgagacctgaaggaggagaggatccggtgtcccagagagggctgggaaagtccagatgagggaacggcagtgcaaaggccttgaggcgaggagaagccagggagccgctgtgggggtgcctgcctgtggccccagctcctcaggaggatcgagcgcacccaggagtttgaggacagcctgggcaacacagcgaaactcgtctcaaaaagagagaacccggagtgttggcggaactaggatgaagcccgtgggagggccttggggatggagggcgagggcgctgtgggatgagcctcacctcttcaggggccagtgcggtgggagctgttgctccttcgtgtctcttcctggtaatggaaacggccatacctttcatcagagccatcttccctgaagagcacgcccaccgcccgtcctcctctcctcttgttttccgtttccggtgtcgctctgtggtgggagccgcagggatggaagggcagtcttgagagacacaaaccagagtaaacgatgcagcccctgatggggccacggtggagagcgcacgccacccaggctccccagctagggcagatgtgcttgaggaaggcgcctctctcctctgactcccctggagccctcccctaaggccttagcttcaggcctggctttcctgctacctgccccttctctggtccctgtctctcccccactcctcgcaggacagtggcctgaaggacctgaccgggttctgctttcttccccggggcagctggtgtgagggtctcccgcgcagggtcagaccccgcgggccgagacaatgaggcgttctctaaggctctggcatcgtgtgcgccggctgtgactggcggccgagggtgccggtgggcagccgggcccctaccctggaagcaaagtgtggggtgaggccgggaggccccagggcccgctcaggacgtctgggtacagcttgggccaccgccacttctgctcctctcacggctgccgtcttctcatttcagagcatgggcatgtgtttcatcgggaagaggaattttgaacatttccttcttcaggtgcgtgctgctctttgacacaaagagatggggctgcgtgtctgccctgggcctagatctccgtcggtaatgacatgtttgttttccagtatctgcagcctcgacctggtcactttatttccatagaagacaataaggttctgggaacacataaaggtgaggtgcagactctgccacttgtcatctgaaatgcctagagctgtggcgtttcagctctgggagactagaccagagttcctgtcgtcccttccacttggctggagaattgtagaaggctctgtggggcggccgggggcgggcacggcctagggtggaacagttgccttgatggtggctgggtgcacttccagatgtggcctcagctgagatgctggagttcatgaaaagcgcgcctctgacttggaaggactatactctgtgagttacgtatcaagtccctgtaaaaagaatgatttccttcctgtgtaaggaaaatgttaaactacacaaaactccactctgattcagggagtaaggtggacgtcccggcatggtgtgaatgattaaggaccacatgcagcgatgggatcaggcgtccgcgctggccagagtgctgctcgctcatgtgcagacccttactgcggtgaggcctgcgtgagcctgtgctgtgcctggtgtcaggggacaggctccgagtcagtcacagtgtgcagtcctgctgtggggacagagtgcagccattgttgggttagtacagtggcggggatgtgcctgccggcgtgatgatcaggcaggtcttgacacagcacagacctgagctgtgggactggccaggagagccaggctgcagctcaggtgtagggcgtcttgcagtgaattgcacttggagatcttccacctcttgtggaggggagacggcaggcggagccggggctaggcattcctgagacaggtggaggtgacagctttgcttgggacagaactgccagacaggattgcccatgtatctgccagccctggccccagcaggagccagttggatgactcatggcttccacctgcagttcacttcactgaagaaggctgccggcccaggccacgtggtaaatcccatgaggttctctctgcctgtgtgccccactgcaggggagggaggcagtgagtttgccatctgctgtgtgacattgtgagggtgcgcagagcagctgggggtagccctgatgcagttactgcattagatggacactgtgaagacgtgcagctatgtcatgggctcagcaagaagggcccctggcgtcacacagggcacccagccgcatcctgggcctagggtcaggggctcctacagctggaacctgcaccttctggggcacaaggtgccttctttgtggccaccacaccccatgtccagcccaggcctggacaatgatgagatgtgctcaggtgcttggtcagggctggctttggtggttggagaatcgtatcttcctagtgagttacaccattgctgggcctgctctgggctgccctcccagcatctgccttcatgatgaggcgtgacatgtgggctgtaacttgttgcccagcctcatggagaaactgtctttctgtaggttggttcctgtataccttgggccagagagcaaacataggtggcctgagagagccctggtacgtggtggagaaggacagcgtcaagggtgacgtgtttgtggtgagtgggccggcctctgagacagcactggggctggttctggcagggccagcagtgcttccagaccagggcttgagaaggcctccagcagccgtggcttcctggaggctgtgactaactctgttcctgtccttggtcccctgcctttcctgggactggccatggtggcaggagagttttaaggtattcattaggctgagttgtatgctggtctcttaatcatccctgaaccccgatacacagatacagtttctccaattttatgaaagaggacagcgacgcccagagcttgggtggctcatccggtggagagggcatggcctcagtgccaaggatggtgcccaccatggtaggatccagtgagttgttgtcaggcaggtgcagatggccaagccaggatcaaaccaagccttccaccacagtggggaccttaccactgtgaccctggcctcaaagcagggccgctcagtggcggcaagctcaccccaccttcaggggaccttgccagtgtctagaggcatttttggttgtcacagcttgggtggaaaagcaaggacgcgggtgctgctgcatctgtgggtcaggccggggatgctgcttgccgtgttcagcacagcctcttccctgagtgacccggcctccaccttggcgcgtggagctgagaaggcccactctcagcaccctggctgccggctcatgttctggcacgaatgctggggcgccttctcttagacggaggcgggggccagcaggccccacccaccgattccaggacatctccttactaggaagacctgtggggagaaaagcctggctgcgaatgaattaaatgatctagatttcagtttgctgtgagaagaccagaagggttaaccaacggcctcctgtccctggacgggtcttggtgcctgcttagaacccaaagcccttaacttcatgctcctcgtcctgcttcaggggcggggcttggcacaatcccaggaggtgccaggtctcaatggcccgaggccatgggtgggtgacagggagcaggggcctcagaaccaacctagggtatctggggccccccagaccagggccagtcctggggcacctgtgggaagccagcagctaccagtccctcctttctcctcagccatttggtgtgtggaggaattcctggggtggccttgagagaagagcccgtggtgtggctggcccctgtccctgcgaatagaaaaaccagtcctcgaggggggccgtgctgctgccccacaggtggttgcaggtagagggcctgagtcagacttgaacctgcagcattcactgtcatgggctcggatctcacccctgcctcttgcccactctgacatggtacttccttcctgggccttagtctcctcatctgtaaaatggggattcaaaggcccggcgggtgatgagatgaatttctgtgggtagaacacttcgagcggtgccagcaccgttacctgtgtgtgtgtgtgctggtaggacagttgttcccagggaccacactgaggccggccttggggccaggtgcccctcggcgtccccaccttcacattccattctgcaggccccccggacagaccacccagccctgtacagggacctgctgaggaccagccgcgtgcactggattgcggaggagcctcccgcagcactggtccgggacaagatgatggagtgccacttccgattccgccaccagatggcactaggtgactgacgggagggctcctgaggacgggccccttgaagctgagcttcctgaggccagatttgggccagggatgggagaccctggggtaggaaagtcccgttgtggagatcatttggagattacctaaagtatttagaactcccgtgtcctgtgcctgccctgagcgaggcctgggggtgctgggagcagatgcaggcaggccccggcgtgttgggctgaagcaagtgtgtacactgccccgcagtgtcctgctgcgtccagggcccaggctggtgccctgcccttcccctctaagcaggggtttttgaccccgtgggctggtgctcctttctccctgggggcctgaggtcgaccaggaaaggcctgtgccccctccaagggcccctctcttctacccagtgccctgtgtgctgaccctcaatcaagatggcaccgtgtgggtgacagctgtgcaggctgtgcgtgcccttgccacaggacaggtgcgtggggtgtgggggtgagcccggggaggactgtactgctctgcaccctgccagggcacccgggttacagaggaaggggctgaggcccaggagtagggtgtgctcgggtcacacagctggtgagggcagagtgccaccagccctgccctgggggctcctcccacagtgacaactgtgagaggatttccactctggtgtcaccaaccagccagttcctgctcgggccctgagaggctcagctgctgcccgggccccagaagcgaggacagaaaatggaaggggcatgaggacagtgctcaaagaggcagagggtcggggcccctgtgggccgagtgtgcaggagctcccagggtgggcgcctggtgggtgtaggcctgaggaatctccaggggcaggtggtgggagggaacctggggtgagggaagcggaagcatcctctggctgccaccatgctccttcctgtcacagctccacattcccaaggggtgcagagacctgccagtcccttggagtcccaggagaggcccctgtgactgtcccactcagggagaggtaccctgaagaccctccctagtgaagccactgggtgccccaggcctctcctctcctgttcagcagcagcagcagcagcaaaaccctgctcccctgggagctcagtgcctggtgctccgagcacaggccaggccccataggggagcactctgcccctgcctgccctcggctggctccctgtggcacccctgatgccagggtctctcccctacagtttgctgtgttctacaagggggacgagtgcctgggcagcgggaagatcctgcggctggggccgtctgcctacacgctccagaagggccagcgcagagctgggatggccactgagagccccagtgacagcccagaagat

SEQ ID NO: 14711 - DNA, 1258 bp, Homo sapiens
ggttgcgcgcgggtcggcaggaggataccccgtcctctgactttggttcggaggctcctcgccctccacctgtgtagtcggaggtgtgcgcgactgcagctccgactacctgggagcagttccgcgcccctctccacccacgcgcgcccacccacagttaccaggtgacaggggtgtttatgaagaactgggactcactggatgaacatggggtctgtactgccgacaaagactgtgaagatgcttacagagtttgccagatcttagacatccctttccatcaagtgtcctacgtaaaggagtattggaatgatgtgttcagtgactttttgaatgagtatgaaaaaggaaggactcccaatcctgacatagtttgcaacaagcacatcaaatttagttgcttttttcattatgctgtggataatcttggggcagatgccattgccacaggtcactatgcaagaacttccctggaagatgaagaagtctttgagcagaagcacgttaagaagcccgaagggcttttcagaaatcggtttgaagttagaaatgccaggtttcccaggatgccctgaggagaaccatcttccctctggggggattaacgaaagagtttgtaaagaaaatcgctgctgagaatagacttcatcatgtgcttcagaagaaagagagcatgggcatgtgtttcatcgggaagaggaattttgaacatttccttcttcagtatctgcagcctcgacctggtcactttatttccatagaagacaataaggttctgggaacacataaaggttggttcctgtataccttgggccagagagcaaacataggtggcctgagagagccctggtacgtggtggagaaggacagcgtcaagggtgacgtgtttgtggccccccggacagaccacccagccctgtacagggacctgctgaggaccagccgcgtgcactggattgcggaggagcctcccgcagcactggtccgggacaagatgatggagtgccacttccgattccgccaccagatggcactagtgccctgtgtgctgaccctcaatcaagatggcaccgtgtgggtgacagctgtgcaggctgtgcgtgcccttgccacaggacagtttgctgtgttctacaagggggacgagtgcctgggcagcgggaagatcctgcggctggggccgtctgcctacacgctccagaagggccagcgcagagctgggatggccactgagagccccagtgacagcccagaagat

SEQ ID NO: 14712 - DNA, 18606 bp, Homo sapiens
aaggcgcggaagcggcggtagctgcagctggcgaagttgggcgactggcggatgcaggccttgcggcacgtcgtgtgcgccctgtccggcggcgtggacagcgccgtggccgcgctgctgctgaggcggagaggtgaggcgtccgaggctcccgccccccgccgagcgaatgtgtccccggaaacctgtccccgtccgtcgtggcgttgtgcacgtctcctccctccctgggccgctggttgcgcgcgggtcggcaggaggataccccgtcctctgactttggttcggaggctcctcgccctccacctgtgtagtcggaggtgtgcgcgactgcagctccgactacctgggagcagttccgcgcccctctccacccacgcgcgcccacccacagtgagaagccggcgggccggggtggggtggggagggaagggtttctcacggatctgcggcgtccacattcacctgtgagaccgtggacactggtgaggggagctgggatcgccgggccgggggcctgacctctgcacacgctgtggccgcccggtgggaggtccttgtcctccccactcagcagactggacaactgccgcgcggcgggtctgcttgttcagcgtctcctgtgttctccgctcgctggaggacaaagttttctccaggagcatttgcatttcttccggcatctaaacggagccccacgggtgcttagcattcctcgggcccggcgctgaaatgagcacttgtttaacttcacctgtgtggctccccgcgggaggcctcattcacagagtcacgtttgtggagctctgctttgcgccatctttggctcctgaccttgggcaagtgaattaagccgtcccctgtaaaattcggctaacacctgcctcacggggtgactggagggattagatgacatagtacatactgatgagtacgtgctcagcacatacgaggtacgcagaaaacagtagtggctattagtttatattgttaataaccatagctattatggtaggtacagtaagtgccaaagagaagggtaggcggaccataagcagaaatagttgtgaggaagggagagtggaggaaagcatcctagagatggaggtgctcagctgagtcgaaagaagagtaggatgtcactaagcagagacttggaggtggaggcggccctcccggcacagtcagcagtgcaagcagaatcacagaggcctgcaagtgtgggctggttctggccagatggagatggaaggagaggagcctggagcacgtttagccctgattatggaagatgctataccaggggctttagactgttaggtagacattagtctggttgatctgggataggggtggtctttcgcgtgtggtggtgtagttttgacaaagctttgtcatcaaatttctgttgttttgggtactatatgaagccttcttcagcagtcatttgccctgtctttcattacattcagcctacctaaacgaaccagctttctcatacagggtctgcacctgtgtagtttgctaaggtggtgtagggctaaagttggcctttccaatatttgggtgaatattttgttacaatcgaaaaggtagaaaataggtcataaactaggtggtacagctcttacaaaatatcgaaaattttaattatctttatatctgatcacttagaatctaagtcttagatagtaactagaaataacttttgaaaagagtttccttttttgataactgaatggtgctttgaaaaattttgttgagtttcgactattccttcgtgtattccacacacactggctgatcccctcctgctaggtattgtgctgatacatagatggggacacaaagatgagaaaataccacctcgttaatcttggggactcaggcaccaagatggaaaccggatccctgaagccacatggcaaagcagggactgcccggcaggccaggcacagaggcacaggagcacagcgtgtggggaacttctcagagctcagaaatcactgccgttttaccgaaggttgatttatgtattctctttaattgaccttcccgcccgcaggttaccaggtgacaggggtgtttatgaagaactgggactcactggatgaacatggggtctgtactgccgacaaagactgtgaagatgcttacagagtttgccagatcttagacatccctttccatcaagtgtcctacgtaaaggagtattggaatgatgtgttcaggtgagtgcgggtcacagcacaaaggaagcttcctcacactgtggatccttgcagtggaaggatccggtaaccagccagaccgacgcctgtgctgcagcccagcgctctccctccacggtggtgctgaagactgcaagaggcctcagccaccctcggggctctgtgttagaggcgaggcctggaccccacagcacacccagctctctcactcctgtcattttgccacttgcctgaagtctctttaatgctttcttggaccttgagctgtttctgttgcccagttaggataggggagctaaggctgagggctcccctggaaggtgagcaccaatgcctgtgtgctatgtgggtcagcgattaggggatttctgagaaagaggtgatacatggcctgtgcctctgaaaacaagaaacaaacaaaaacttttctaaaatccaatataatctcaataattaagtgctgtgtgctaggcgtgtgccacatctaggaacattaagatgtcttcactgtgacctggctctgtaggagtttgcggtctagttgggaggacattatcttcacaagaggtgacagtgatgcgtggcacgcaggaagtaccagtgatgctatcagtcactgaacccagaggagggagaaacttgcagtgtggagtaatcaagaaggcttcaccggagaggaggggttgcaaacaaagttgtagagaagggactccaaatggggtaacgagagcagcgtgaaggggagaagaaatgctgattgtgtatttcaggaccgttgtaaagtttggctggacttttgttcctgcagtggaaggagtgtagggctcatcctctggtgagccctgactgtgatgaatgtcgggcagttgtcgaaggcgtctgacacagcaggccatgtgcgcgggacaggctgcccctgcctgagtgggctttaggggcagaagagccttgggttgagtcctgactgtagcttattatatgaccttgggcaatttacttgactttgtttttttaattgaaaaaaattctctttttttcctgccaacaaagacccagaagagatacttgacttttctaagccccaattttctcatctttaaaatgaggataacactgatgcctcacagggttatgaaagaattgagattaggttctagtatgtatgcctggtatattagtaagcagtcaataaacatagctgtttttcttttctatttttttttgagacagagcctcgctctgttgcccaggctggagtgcagtggcgcaatcttggctcactgcaacatctgcctcccaggttcaagcgattctcatgcctcagcctcccaagtagctgggattataggcatgcaccaccacgcccggataatttttgtatttttagtagagacagggtttcgccatgttggccgggctagtctcagactcctgacctcagaagatccactcgtctcagcctcccaaagtgctgggattacaggcgtgagccaccacgccagcctgctatttttattttcattattaaaaagatgagtctggggagctaagctatgaggacgcaaaggcataaaaatgatataatggactctggggtgagggataaaagactacacatcgggtacaatgtccactgcttgggtgacgggtacaccaaaatctcagaagtcaccactgaagaacttatccatgtgaccaaataccagctgttgcccaaaaaaccattgaaataacaataaaacgaaatttagagagattaagtaaattgactatggtcacctaaataatcaacggaagagcttgaatatgaaccctctgtgactctatgctataacatatgggtgtcgtatatattaacaacatggacaaaactgatggctgaattttcctggggaaagttacctgtagaatgcatgataaatgcattaaaaacttatctgtagaatgcatgataaatgcattaaaaacttctgcagttttctcggggacataagaaaaaaaaaagagtgtggcggccaaatacaggataaatctgggggaagaccaaaggcagagagtctcaggaagtgctgttgctggagatttggacttcatggggagggagtgtgggagtggaaggtgagggctggcttgttggacccagaggacaagtccaccgggcagtagatctgaggtgcttgttaaacacagacctggaccgaggtctgggggcggccctggaatctgctttaataagcacttcagctgtgctggtggtgtggggggttgtcagggtctttctttgagaaaaggtgtgatgcggcttagggactgatgtgtgtgggagaccagagaggagaggagtcagcagtagtttcaagatcaaggctgggtggctggggaaagctggtttaggggattcctcatgagtactgtagagtttgaggggacaacagggaatccaagtgagcttacacttcacctgccagcacagctttttcagaacgtacgagtggatgcgatttttgaagtttagctcagctgaggccagataggaagagtgacttgaatagtatggcaaattaggagcggagctgggattaaaccccagaattaggagcggagctgggattaaaacccagaattaggagcggagctgggattaaaccccagaattaggagcggagctgggattaaaccccagaattaggagcggagctgggattaaaccccagaattaggagcggagctgggattaaaccccagaattaggagcggagctgggattaaaccccagaattaggagcggagctgggattaaaccccagaattaggagcggagctgggattaaaacccagctttccaggccagtgcttgctgccgccttctggcgctgcttgatagggactgagagaaggaggcggccgggtagagtcttttcccatctctggggctgcccccgaggtcgcccctggctccagccagcctgccctctgccctcgcccagtaccagctgcccgtggaggcattggtctttccgctgaagactcacttctctagtagggctctctagctcagagatttcttttgcattctttcattcaagacccactggccttcaaggatcagagtccagatacgttttagctgctgagtcttttaaatctgtctccctcccgaggcacatgaaaggcttctcttctttccagttagagaagaggctgggctactccattgtttttgctaatgccaaaacacacgccttcccatctgctgtttacgaaagggttaacagtgtgtcttttcagaaactgattttaatgttcagcctcttcaacatttattgatgactgtgatatagaaagtttgttgggtctaggacacagacacagattgcaccttaagtagtttatagtttaatgagcttcctggtaactttctaataattaaagcaaaatggaaagagtgtaataatatcaagtgttgttgcaaatgtggaaaaacatgagtttttatgaacttctagggggactgagaagtaggaaaacagtttggtgcctgctaaagtggaagatatccaaggaacctctgaccctgtgcagatctgtgatatgtctgcaaaacacaaacctcttgatcagcactggttttttttttaacccttgttgattaatagagagttttaggttaaatgaaaaaaatcacttataccaaaaatacacccatttttaaactcccaaaataggcatcataaccctcttgaagtgaatcctcgaagactatgaaattcttggtaagttttgctggtatcatggcatctttttcccatgttcagtcagtctgttagagcagaagttcactgaattaggatagcctgatccactttaagcacccaagagtttgctagttctcagaagtgtgtgtttgtcacctgaggatagtatttttggtatatttgcccagtgacgcagcattccaggctgagattgcagaatggctcatggagcccttgtgtagggaagcctctgactgtgtttctcctctgttctcatcacggcagtcatcctcacggaagaaggcttctgtgacaaaggtgtggggggttttccccatacagcaagcagtggacaccgactgggtgtcctctgattcagttccgataccatctacttggagatagtgctggatcccaaaggttgggggttcagtcccccagacggactccccccacaacagcagtcgaaagtatgggcctctagaacttatgaccaactggcttccagttgggattcccataacttcctctttgggttcaattattaataatttgctggagtggttcacagaactcagaaaaacacatttaccagtttattataaaggatgttgcaaaggatacagatgaagagacgggttgggtgaggtatggggaaagggtcatggagtgtccacaccctccctggggaccaccctccaggagcctccacaagtgtagctgtgcagaagctctctgaacccagtactcctgggtttttatggaggcttcatgacatcgccattccttcccccaggatatacagtgggactgtgtctggggagggtcttaagacccacagtcagaaaggtagacgcttgtaatcctagcactttaggaggctgaggcaggagacttgcttgaggcctggagttcagtatcagcatgggcaacatggcaagacctcatctctataaaaaaagaaaaggttgcagtgggccaggtgcggtggctcacgcctctaattccagcattttgggaggctgaggcgggcagatcacttgaggccaggagttggagaccagcctggccaacatggtgaaaccccgtctctactaaaaatacaaaaattatctgggcatggtgctgcgcacctgtaatcacagctattcggaaggctgaggtgggagaatctgcaagggaagtctaaaggatttcatttccactgtcactcaggcatcttctcttcctcacctaagccctgctgtgttggaggagtcccagaggcagggttttagtgagaccctcacggccactccccactcctgaccccataagccctgtgagcctacacagagacggtggctcctgagccgtagtggcagagaataacaccttgtcgggtggcccatgcagcaggttataaacaaatgttcgatgactgacgttctcctgttttgcagaaaattatagttttggtatgacaaggggaaattacattaaacaagcaatttagtgaactttttttttttttttgaggaatgtttcacacttggaactgaagtcattttcttttattctagtgactttttgaatgagtatgaaaaaggaaggactcccaatcctgacatagtttgcaacaagcacatcaaatttagttgcttttttcattatgctgtggataatcttggtaagtaatttgggtttaaaacatttttttttttaaagacagggtctcgctctgtcacccaggctggattgcagtggtgcgatcatgactcactgcagcctcgacctcctgggctcaagagattctcccaccccaggctcctgagtagcttggaccacaggcatgccaccatggtggctaattttttgtggagatggtgtcacaactgtattgtccaggctggtctcagatttctggccttaagcagtcctcctgcctcggccttccaaagtgctgagattacaagcgtgagcccctgtgcctagcctgtttcttcttgtggaacctcctgatactgaattgcttgcttagaccacctcttgatgtctgtggctatgctttatgaattttaggttcttcttcctgtcccctgccattggggtcaccataatgagtttctgaagttctggctcaggcttcttggtttgctctgtcccactgcagctcaccctgttgtgtgttgctacgagataccattgtaagccaggggcccagtagtgtcggcactttcagcaatgatgtagattaggcttgcagattcaatatgtcagcaacctaaagctgagttgatgataatgatgaaagttagtttgtggagttaggaataaacaaatgcctacaaaaacaaaaaatcaaaaagaaaaatcttaaatttcaacattgggctaacaccaaaaacatgaaacttaatagagataaatgcaaagtttgctaactaggttcagtaattctcctaggacaagattggaaagacctagcttggttgccattgaatcttctgccattggttgcagaaaatctgggggatttaggtgcccccaggctgactgagccagtagtgtgatgtcttttgtcagagccagcacagacggagctcaccttgatgatcatagaatgtctaggaaggggtgatgcgtcccctgtggtccgtcctggttagaccgtattagttattcaggaaaagagtgatagactgatagaatgtgaattgatttttattttcagggtatctggaaatatgtcctccctgaactgttgaaattactttgggtcgtagtggcagtggtcaagcgtgtgagttaggatgacattctttgtgtgacaccagcagacagttaggactggcaggagaaagagttccctgaggtggaggcgcaggcagctgttcaggaagggaaggcttgcctttggagagcattaagctgtcacgaaagctttttagggagcccctaggtggctggctgtcaggcacgctgtggaaggaacttctgcagtgaatgtttccacacctggaagaaaggcatgaaccgtgcagcacaggatgagaggacatgacgcccagacttctgaactcaccgcgcttctcagaggcatcctgcgctttttctagtataagtgctgttctttgaggacacagatgtaaagtggattgttttctctaggagaacctcagtcaagatgagattatgtgtctctaaagtgcctttttcaggtcgttaatatgcagcagctaattcttgctgtgtcttctgtttacatggagctagtgtggctggtccaggatggctgtgtcttctgtttacactgagctagtgtggttggtccaggatggaatccattttgctgcacctttcataaaagtctcttgcaatactaaatatctgtaattttttctttttttgagatggagtctcactctgtctcccaggctggagtgcagtggtgtgatctcggctcactgcaacctccacctcctgagttcaagcaattctcctgcctcagcctcccaagtagctgggattacaggtgcccaccaacatgtctagctaatttttgtactttttttgtagagacggggtttcatcatgttggccaggctggtctcaaactcctgacctcaagtgatccacccacatcggcctcctaaaagtgctgggatgacaggcgtgagccgctgcgcctggcccaaatatctggaatttttacacaatgaaaaggttctggattcatatgcaccttgttaggctctttggctttgtgtaatatgaaaagaagaaacagtgtgctggatgattcttcactctgatgaaaataatacatatttattacagaaaatttaaaagaggagaaacgacacctataatttcactctcagaatcaaaggaatagacctgagatttttcttcaactgtttctgtacagtaaaaaccgtggaatcatggtgttacatcctcgccctgctgaacagtgccgggcattttcccgtgttagtaaacattctctgtaaggacccccattgttacggcagtgcattgtcattcacttcacattctcccagtgttgaacattttggttcttttttttttttttttcctcctgagacagcatcttgctctgttgcccagactagagtgctgtggtgcagtcttggcttcctgcagcctcaacctcccaggttgaagcaatcctcccacctcagcctcccaagtggctgggactacaggtgtgccccaccacgcctggctaatttttgtattttttgtaaaggtgggatttcaccatgttgcccaggctggtcttgaactcctgagcacaagcaatcatctgcccgcctcggcctcccagagtgctaggattacaggcatgagccaccgcgcctggcctcccttcgtattatcacaaaccctgaaaggaatattttgtgtttaaatctttctgtgcctttcagactgtttccttaagccagaaattaactttggaaaggctcttaaaggtgcaataacactttaagtagcaaggttgtatcagcttaagagttcaaggctgcttgtttgatgaaattggatgtgtgcgtctgttccctgggatctctatgtttgggtgcagggtggattgtgcagcccctcagcctaagacttggggtctatactcttcttttgtgccttggtttatgctgatcaaggcctgcaagtatgagtctaaaacctgatccttgtgttctaaaaacctcacaggggcagatgccattgccacaggtcactatgcaagaacttccctggaagatgaagaagtctttgagcagaagcacgttaagaagcccgaagggcttttcagaaatcggtttgaagttagaaatggtaagttcatgtgcccaggtcagagccaaattcttgtgaacagattgaaatctttggaggaatgacagtgggttgtgcctgaggatcactgccacccctccctctgtgctccagagtagcttgtatgggattcacatttgaaaaggtgcagttaccaagaggacattttcccggagggcctgtgattgggtagtaaacagtgtccctgccggccatggtgagggctggtggaaagtgacatcagatactgataatccagctctcgacactgtgtggtgatttgaatgttccaaaaatatctgggtaaatatttgacagtgataattggggtgctgtcagtctagccaaggacctgtacttagcaacaagttctcaagggcgtgcggttcaggcagactttcaacgtgctgtgagcacaggacctgctgtggatcgcatgggctcagcagtcaggctttgtagccgtatttacacgttagtttatgcgtgttagggagccaagtttcacctttctagaaaaaagtcaatggcagacagtgagctgggaagctgctggcctgtcctggtgtacattcgtgtgtagaaaagaggaattccctgtattgttgagtgaaaaaccaagtggggctcagagccgtgtttccgcacggagcgtccgtccatcagtggggacccctgaagggcagccttgctcttttgtccggaagttcagatgttggagggagccttgtcccgccatctggggaataggggtctctggggctggggcagggctttacatacacacatttcttttttaattattattattaattttatttttttgagagaggatctcactctgtcaaccgggctggagtacagtggcccgatcttggctcgctgcagcctccacctcctgggctcaagtgatcctcccacctcagccccaccaagtagctgggaccacaggtgtgcgccactatgctcggctttttcattttttgtagagatgaggtctcgttaatgttgtccgtgctggtcttgaattcctgggctcaagcgatcctcccacctcggcctctcaaagtgttgggattacaggtgtgagccaccaagcccggcctcacacgtttcacatcactcctcttagcagtccatgaggtgtatgctctcatcccgtttcacagatgaggaaaccgaggcccggatgaagccatctgacctgggtccctcgggtggcagagctggatttcagtgcacttccgctcactccccagcccctgctgcttctgctgggtcaggccccagctgagttctttcctcagcgttgctgagcccatcctgaaggctgcagtgatggggcagggccgtgcttggtcaagggagccctgagtgtgccaacagtcgtctgccgccctctgttccctcctcgccttccttccttatgccacagggtgatcaggtaactgtactgacttgagcccagagaagagcagcccactcccgtaagacagccccccatttcaggaagacatgggtttgaatgcagataagacagccccccatttcaggaagacatgggttggaatgcagagtcctgccacttgggaactccagggtggaattcaccaagtaattgtgcatttacggggcctgaggagatggagggttaatttccatgttgaatagatgcgcctgcttacctcctagaacattacctcctagaacactgtgtgccctgcagagccatcgacctttattataggccacgtgccctcggaaacttgggacagtactgatgcgttctgttgagtgcgtttggcatgtgggaattgtgatggtgcacagtgtcttggccttcactgggttttgtaggcacactaaggtttccatttcattcttcttcagttgccctggcccagcctgggtctctgggtagagcacctgcaggggcagtggacggcctgggctcagggtcggtcagcacctgagaccagcgctcctaggcctggcctgtgactgggctgattttcccccacacagcgtgctaccaccggcctggcagagccagcacggcagccggcgtgtcagtgaggctccagcacaggcagcctcctccaaatgttgttcattcctttctgtgctttttcctctatagcagttcagttagggtcgccagcttgcttttttgaaaatcatagatttttagtttgttttaaaatgacgcagaactaggagaaaatgcaaatggctcctagttttctgaggcttttacacacatgcagtgtttgactgcagttagtttgggattgaaagtggactctgaggccaggtgcggtggctcatgcctgtaatcacagcactttgggaagccaaggcaggcggatcatgaggtcaggagttccagaccagcctggccaacatggtgaaaccccatctctactacaaatacaaaaaaaaaagttagccgagtatggtggcacatgcctgtagtcccaggtactctggaggctgagacaggagaatcacttgaacccaggaggcggagattgccgtgagccgagatgtgccactgcactccagcctgggcgacagagcgagactccatctcaaaaaaaaaaaaaaaagtggactctggaaagtgctctgcttccgtggcgactggtcggctgaacttggtctcacttgtcactcagttctgctgtttgtacctgccaagtaagggagggggactcgggaggctgggcagcctccagccccaccgcctccacctgcatcactttgggcgagtcatatgtgatgaactgggccggctccagtctcccctctgtaacgtggggagaattctccctctcacggctaacgtgggaatcggcagatggaaaacactagctacgcagagtgtgtactgtacacgtggctctgccaagccaggaagggtaggtgtgctgtctgaccgtcacggcatgtggcgtgctctgagtgtaactcgaaaggagaagtttatgagaaagattgaaagaagccagaaaactgacgttcgtcttagttttttgccattgatcattgaactcgagagtggagaactggacggttctaagccaggtttactcacacctctgctccgttgccttaaagccagaaatggttctttacaatcacatagggaatgtcggaggaactgcagggtcacctaacagatgtcagctgagactctcaacaaaaaaacgtttttaccaagaaagctaatgccttcacaggtagggcgctgctggaggcatgtgctggccgccgggcagtgaacctggaaagtgtagagtccttgaaaccactgtggcacgaacacatcctgtggttgttggaagaaggcacagctgacactatatcagtggaattttctgccagcaactagcttactccattttccaagatttggctgaatttattttaggtgtttttttttttttttcttatcacttgagaacattttttcatgtgatgtttcatctttgaaaatattataatctgaagtatgagctggaataatttctttgtcatgtaaaatccttgtttttttttttggaggtgcgaatttttcttacattaacccgtggtggtcttttccctagtagttgctattgagtgttgatgtctgcctctgacaggctaggggtagtctgtctaagtgaacagaaggacattgttgaaagtgaagtatcattatttttattcctgcatcgtcttttgttctttattcttggcagcggtaaaactcctccaggcagctgacagctttaaagaccagaccttctttctcagccaggtttcccaggatgccctgaggagaaccatcttccctctggggggattaacgaaagagtttgtaaagaaaatcgctgctgagaatagacttcatcatgtgcttcagaagaaagaggtacgagtgagcagttgcctttgattagtgcctgtttccctttcccgactgcatggcacggagcagctggacctgtgggtcccgcaccacttccccttctccaggacctaacatcaaaggcgggccttggagcaatagatggaggagtttgctgaggcgcacggtacagggctctgctgacatcgggagcagcctatacgagactccttgcttttttcctctcctctgcccctatgtggtaggcagctttccccacagccttagcagctggtggggtgctcttgggatggcctgcctgccaggtgagtgccaggcagtgtgatgcagccccgagacccctggaggggcaggtgctgtgccgccgtctgcacactcatgtgccctgtcacccgcttgcccggcacagactcgttcggtgccatctgttcgggcgctgtgctgctgggccgcgaggaattggtgacgcgcacacagttccatcttcgcctccatggagcccgcccgcgagtgggggacacaggcaggaggccaatcagtgtaaacctagaaaatgtctacggagggaggtgtaggaccctgggtgggaagcaccagtggggtctgagagtagggaatggagatgccaaaaacggcctcaaaagaagtcacatggaacctgagacctgaaggaggagaggatccggtgtcccagagagggctgggaaagtccagatgagggaacggcagtgcaaaggccttgaggcgaggagaagccagggagccgctgtgggggtgcctgcctgtggccccagctcctcaggaggatcgagcgcacccaggagtttgaggacagcctgggcaacacagcgaaactcgtctcaaaaagagagaacccggagtgttggcggaactaggatgaagcccgtgggagggccttggggatggagggcgagggcgctgtgggatgagcctcacctcttcaggggccagtgcggtgggagctgttgctccttcgtgtctcttcctggtaatggaaacggccatacctttcatcagagccatcttccctgaagagcacgcccaccgcccgtcctcctctcctcttgttttccgtttccggtgtcgctctgtggtgggagccgcagggatggaagggcagtcttgagagacacaaaccagagtaaacgatgcagcccctgatggggccacggtggagagcgcacgccacccaggctccccagctagggcagatgtgcttgaggaaggcgcctctctcctctgactcccctggagccctcccctaaggccttagcttcaggcctggctttcctgctacctgccccttctctggtccctgtctctcccccactcctcgcaggacagtggcctgaaggacctgaccgggttctgctttcttccccggggcagctggtgtgagggtctcccgcgcagggtcagaccccgcgggccgagacaatgaggcgttctctaaggctctggcatcgtgtgcgccggctgtgactggcggccgagggtgccggtgggcagccgggcccctaccctggaagcaaagtgtggggtgaggccgggaggccccagggcccgctcaggacgtctgggtacagcttgggccaccgccacttctgctcctctcacggctgccgtcttctcatttcagagcatgggcatgtgtttcatcgggaagaggaattttgaacatttccttcttcaggtgcgtgctgctctttgacacaaagagatggggctgcgtgtctgccctgggcctagatctccgtcggtaatgacatgtttgttttccagtatctgcagcctcgacctggtcactttatttccatagaagacaataaggttctgggaacacataaaggtgaggtgcagactctgccacttgtcatctgaaatgcctagagctgtggcgtttcagctctgggagactagaccagagttcctgtcgtcccttccacttggctggagaattgtagaaggctctgtggggcggccgggggcgggcacggcctagggtggaacagttgccttgatggtggctgggtgcacttccagatgtggcctcagctgagatgctggagttcatgaaaagcgcgcctctgacttggaaggactatactctgtgagttacgtatcaagtccctgtaaaaagaatgatttccttcctgtgtaaggaaaatgttaaactacacaaaactccactctgattcagggagtaaggtggacgtcccggcatggtgtgaatgattaaggaccacatgcagcgatgggatcaggcgtccgcgctggccagagtgctgctcgctcatgtgcagacccttactgcggtgaggcctgcgtgagcctgtgctgtgcctggtgtcaggggacaggctccgagtcagtcacagtgtgcagtcctgctgtggggacagagtgcagccattgttgggttagtacagtggcggggatgtgcctgccggcgtgatgatcaggcaggtcttgacacagcacagacctgagctgtgggactggccaggagagccaggctgcagctcaggtgtagggcgtcttgcagtgaattgcacttggagatcttccacctcttgtggaggggagacggcaggcggagccggggctaggcattcctgagacaggtggaggtgacagctttgcttgggacagaactgccagacaggattgcccatgtatctgccagccctggccccagcaggagccagttggatgactcatggcttccacctgcagttcacttcactgaagaaggctgccggcccaggccacgtggtaaatcccatgaggttctctctgcctgtgtgccccactgcaggggagggaggcagtgagtttgccatctgctgtgtgacattgtgagggtgcgcagagcagctgggggtagccctgatgcagttactgcattagatggacactgtgaagacgtgcagctatgtcatgggctcagcaagaagggcccctggcgtcacacagggcacccagccgcatcctgggcctagggtcaggggctcctacagctggaacctgcaccttctggggcacaaggtgccttctttgtggccaccacaccccatgtccagcccaggcctggacaatgatgagatgtgctcaggtgcttggtcagggctggctttggtggttggagaatcgtatcttcctagtgagttacaccattgctgggcctgctctgggctgccctcccagcatctgccttcatgatgaggcgtgacatgtgggctgtaacttgttgcccagcctcatggagaaactgtctttctgtaggttggttcctgtataccttgggccagagagcaaacataggtggcctgagagagccctggtacgtggtggagaaggacagcgtcaagggtgacgtgtttgtggtgagtgggccggcctctgagacagcactggggctggttctggcagggccagcagtgcttccagaccagggcttgagaaggcctccagcagccgtggcttcctggaggctgtgactaactctgttcctgtccttggtcccctgcctttcctgggactggccatggtggcaggagagttttaaggtattcattaggctgagttgtatgctggtctcttaatcatccctgaaccccgatacacagatacagtttctccaattttatgaaagaggacagcgacgcccagagcttgggtggctcatccggtggagagggcatggcctcagtgccaaggatggtgcccaccatggtaggatccagtgagttgttgtcaggcaggtgcagatggccaagccaggatcaaaccaagccttccaccacagtggggaccttaccactgtgaccctggcctc

SEQ ID NO: 14713 - DNA, 1376 bp, Homo sapiens
aaggcgcggaagcggcggtagctgcagctggcgaagttgggcgactggcggatgcaggccttgcggcacgtcgtgtgcgccctgtccggcggcgtggacagcgccgtggccgcgctgctgctgaggcggagaggttaccaggtgacaggggtgtttatgaagaactgggactcactggatgaacatggggtctgtactgccgacaaagactgtgaagatgcttacagagtttgccagatcttagacatccctttccatcaagtgtcctacgtaaaggagtattggaatgatgtgttcagtgactttttgaatgagtatgaaaaaggaaggactcccaatcctgacatagtttgcaacaagcacatcaaatttagttgcttttttcattatgctgtggataatcttggggcagatgccattgccacaggtcactatgcaagaacttccctggaagatgaagaagtctttgagcagaagcacgttaagaagcccgaagggcttttcagaaatcggtttgaagttagaaatgcggtaaaactcctccaggcagctgacagctttaaagaccagaccttctttctcagccaggtttcccaggatgccctgaggagaaccatcttccctctggggggattaacgaaagagtttgtaaagaaaatcgctgctgagaatagacttcatcatgtgcttcagaagaaagagagcatgggcatgtgtttcatcgggaagaggaattttgaacatttccttcttcagtatctgcagcctcgacctggtcactttatttccatagaagacaataaggttctgggaacacataaaggttggttcctgtataccttgggccagagagcaaacataggtggcctgagagagccctggtacgtggtggagaaggacagcgtcaagggtgacgtgtttgtggtgagtgggccggcctctgagacagcactggggctggttctggcagggccagcagtgcttccagaccagggcttgagaaggcctccagcagccgtggcttcctggaggctgtgactaactctgttcctgtccttggtcccctgcctttcctgggactggccatggtggcaggagagttttaaggtattcattaggctgagttgtatgctggtctcttaatcatccctgaaccccgatacacagatacagtttctccaattttatgaaagaggacagcgacgcccagagcttgggtggctcatccggtggagagggcatggcctcagtgccaaggatggtgcccaccatggtaggatccagtgagttgttgtcaggcaggtgcagatggccaagccaggatcaaaccaagccttccaccacagtggggaccttaccactgtgaccctggcctc

SEQ ID NO: 14714 - DNA, 21627 bp, Homo sapiens
aaggcgcggaagcggcggtagctgcagctggcgaagttgggcgactggcggatgcaggccttgcggcacgtcgtgtgcgccctgtccggcggcgtggacagcgccgtggccgcgctgctgctgaggcggagaggtgaggcgtccgaggctcccgccccccgccgagcgaatgtgtccccggaaacctgtccccgtccgtcgtggcgttgtgcacgtctcctccctccctgggccgctggttgcgcgcgggtcggcaggaggataccccgtcctctgactttggttcggaggctcctcgccctccacctgtgtagtcggaggtgtgcgcgactgcagctccgactacctgggagcagttccgcgcccctctccacccacgcgcgcccacccacagtgagaagccggcgggccggggtggggtggggagggaagggtttctcacggatctgcggcgtccacattcacctgtgagaccgtggacactggtgaggggagctgggatcgccgggccgggggcctgacctctgcacacgctgtggccgcccggtgggaggtccttgtcctccccactcagcagactggacaactgccgcgcggcgggtctgcttgttcagcgtctcctgtgttctccgctcgctggaggacaaagttttctccaggagcatttgcatttcttccggcatctaaacggagccccacgggtgcttagcattcctcgggcccggcgctgaaatgagcacttgtttaacttcacctgtgtggctccccgcgggaggcctcattcacagagtcacgtttgtggagctctgctttgcgccatctttggctcctgaccttgggcaagtgaattaagccgtcccctgtaaaattcggctaacacctgcctcacggggtgactggagggattagatgacatagtacatactgatgagtacgtgctcagcacatacgaggtacgcagaaaacagtagtggctattagtttatattgttaataaccatagctattatggtaggtacagtaagtgccaaagagaagggtaggcggaccataagcagaaatagttgtgaggaagggagagtggaggaaagcatcctagagatggaggtgctcagctgagtcgaaagaagagtaggatgtcactaagcagagacttggaggtggaggcggccctcccggcacagtcagcagtgcaagcagaatcacagaggcctgcaagtgtgggctggttctggccagatggagatggaaggagaggagcctggagcacgtttagccctgattatggaagatgctataccaggggctttagactgttaggtagacattagtctggttgatctgggataggggtggtctttcgcgtgtggtggtgtagttttgacaaagctttgtcatcaaatttctgttgttttgggtactatatgaagccttcttcagcagtcatttgccctgtctttcattacattcagcctacctaaacgaaccagctttctcatacagggtctgcacctgtgtagtttgctaaggtggtgtagggctaaagttggcctttccaatatttgggtgaatattttgttacaatcgaaaaggtagaaaataggtcataaactaggtggtacagctcttacaaaatatcgaaaattttaattatctttatatctgatcacttagaatctaagtcttagatagtaactagaaataacttttgaaaagagtttccttttttgataactgaatggtgctttgaaaaattttgttgagtttcgactattccttcgtgtattccacacacactggctgatcccctcctgctaggtattgtgctgatacatagatggggacacaaagatgagaaaataccacctcgttaatcttggggactcaggcaccaagatggaaaccggatccctgaagccacatggcaaagcagggactgcccggcaggccaggcacagaggcacaggagcacagcgtgtggggaacttctcagagctcagaaatcactgccgttttaccgaaggttgatttatgtattctctttaattgaccttcccgcccgcaggttaccaggtgacaggggtgtttatgaagaactgggactcactggatgaacatggggtctgtactgccgacaaagactgtgaagatgcttacagagtttgccagatcttagacatccctttccatcaagtgtcctacgtaaaggagtattggaatgatgtgttcaggtgagtgcgggtcacagcacaaaggaagcttcctcacactgtggatccttgcagtggaaggatccggtaaccagccagaccgacgcctgtgctgcagcccagcgctctccctccacggtggtgctgaagactgcaagaggcctcagccaccctcggggctctgtgttagaggcgaggcctggaccccacagcacacccagctctctcactcctgtcattttgccacttgcctgaagtctctttaatgctttcttggaccttgagctgtttctgttgcccagttaggataggggagctaaggctgagggctcccctggaaggtgagcaccaatgcctgtgtgctatgtgggtcagcgattaggggatttctgagaaagaggtgatacatggcctgtgcctctgaaaacaagaaacaaacaaaaacttttctaaaatccaatataatctcaataattaagtgctgtgtgctaggcgtgtgccacatctaggaacattaagatgtcttcactgtgacctggctctgtaggagtttgcggtctagttgggaggacattatcttcacaagaggtgacagtgatgcgtggcacgcaggaagtaccagtgatgctatcagtcactgaacccagaggagggagaaacttgcagtgtggagtaatcaagaaggcttcaccggagaggaggggttgcaaacaaagttgtagagaagggactccaaatggggtaacgagagcagcgtgaaggggagaagaaatgctgattgtgtatttcaggaccgttgtaaagtttggctggacttttgttcctgcagtggaaggagtgtagggctcatcctctggtgagccctgactgtgatgaatgtcgggcagttgtcgaaggcgtctgacacagcaggccatgtgcgcgggacaggctgcccctgcctgagtgggctttaggggcagaagagccttgggttgagtcctgactgtagcttattatatgaccttgggcaatttacttgactttgtttttttaattgaaaaaaattctctttttttcctgccaacaaagacccagaagagatacttgacttttctaagccccaattttctcatctttaaaatgaggataacactgatgcctcacagggttatgaaagaattgagattaggttctagtatgtatgcctggtatattagtaagcagtcaataaacatagctgtttttcttttctatttttttttgagacagagcctcgctctgttgcccaggctggagtgcagtggcgcaatcttggctcactgcaacatctgcctcccaggttcaagcgattctcatgcctcagcctcccaagtagctgggattataggcatgcaccaccacgcccggataatttttgtatttttagtagagacagggtttcgccatgttggccgggctagtctcagactcctgacctcagaagatccactcgtctcagcctcccaaagtgctgggattacaggcgtgagccaccacgccagcctgctatttttattttcattattaaaaagatgagtctggggagctaagctatgaggacgcaaaggcataaaaatgatataatggactctggggtgagggataaaagactacacatcgggtacaatgtccactgcttgggtgacgggtacaccaaaatctcagaagtcaccactgaagaacttatccatgtgaccaaataccagctgttgcccaaaaaaccattgaaataacaataaaacgaaatttagagagattaagtaaattgactatggtcacctaaataatcaacggaagagcttgaatatgaaccctctgtgactctatgctataacatatgggtgtcgtatatattaacaacatggacaaaactgatggctgaattttcctggggaaagttacctgtagaatgcatgataaatgcattaaaaacttatctgtagaatgcatgataaatgcattaaaaacttctgcagttttctcggggacataagaaaaaaaaaagagtgtggcggccaaatacaggataaatctgggggaagaccaaaggcagagagtctcaggaagtgctgttgctggagatttggacttcatggggagggagtgtgggagtggaaggtgagggctggcttgttggacccagaggacaagtccaccgggcagtagatctgaggtgcttgttaaacacagacctggaccgaggtctgggggcggccctggaatctgctttaataagcacttcagctgtgctggtggtgtggggggttgtcagggtctttctttgagaaaaggtgtgatgcggcttagggactgatgtgtgtgggagaccagagaggagaggagtcagcagtagtttcaagatcaaggctgggtggctggggaaagctggtttaggggattcctcatgagtactgtagagtttgaggggacaacagggaatccaagtgagcttacacttcacctgccagcacagctttttcagaacgtacgagtggatgcgatttttgaagtttagctcagctgaggccagataggaagagtgacttgaatagtatggcaaattaggagcggagctgggattaaaccccagaattaggagcggagctgggattaaaacccagaattaggagcggagctgggattaaaccccagaattaggagcggagctgggattaaaccccagaattaggagcggagctgggattaaaccccagaattaggagcggagctgggattaaaccccagaattaggagcggagctgggattaaaccccagaattaggagcggagctgggattaaaccccagaattaggagcggagctgggattaaaacccagctttccaggccagtgcttgctgccgccttctggcgctgcttgatagggactgagagaaggaggcggccgggtagagtcttttcccatctctggggctgcccccgaggtcgcccctggctccagccagcctgccctctgccctcgcccagtaccagctgcccgtggaggcattggtctttccgctgaagactcacttctctagtagggctctctagctcagagatttcttttgcattctttcattcaagacccactggccttcaaggatcagagtccagatacgttttagctgctgagtcttttaaatctgtctccctcccgaggcacatgaaaggcttctcttctttccagttagagaagaggctgggctactccattgtttttgctaatgccaaaacacacgccttcccatctgctgtttacgaaagggttaacagtgtgtcttttcagaaactgattttaatgttcagcctcttcaacatttattgatgactgtgatatagaaagtttgttgggtctaggacacagacacagattgcaccttaagtagtttatagtttaatgagcttcctggtaactttctaataattaaagcaaaatggaaagagtgtaataatatcaagtgttgttgcaaatgtggaaaaacatgagtttttatgaacttctagggggactgagaagtaggaaaacagtttggtgcctgctaaagtggaagatatccaaggaacctctgaccctgtgcagatctgtgatatgtctgcaaaacacaaacctcttgatcagcactggttttttttttaacccttgttgattaatagagagttttaggttaaatgaaaaaaatcacttataccaaaaatacacccatttttaaactcccaaaataggcatcataaccctcttgaagtgaatcctcgaagactatgaaattcttggtaagttttgctggtatcatggcatctttttcccatgttcagtcagtctgttagagcagaagttcactgaattaggatagcctgatccactttaagcacccaagagtttgctagttctcagaagtgtgtgtttgtcacctgaggatagtatttttggtatatttgcccagtgacgcagcattccaggctgagattgcagaatggctcatggagcccttgtgtagggaagcctctgactgtgtttctcctctgttctcatcacggcagtcatcctcacggaagaaggcttctgtgacaaaggtgtggggggttttccccatacagcaagcagtggacaccgactgggtgtcctctgattcagttccgataccatctacttggagatagtgctggatcccaaaggttgggggttcagtcccccagacggactccccccacaacagcagtcgaaagtatgggcctctagaacttatgaccaactggcttccagttgggattcccataacttcctctttgggttcaattattaataatttgctggagtggttcacagaactcagaaaaacacatttaccagtttattataaaggatgttgcaaaggatacagatgaagagacgggttgggtgaggtatggggaaagggtcatggagtgtccacaccctccctggggaccaccctccaggagcctccacaagtgtagctgtgcagaagctctctgaacccagtactcctgggtttttatggaggcttcatgacatcgccattccttcccccaggatatacagtgggactgtgtctggggagggtcttaagacccacagtcagaaaggtagacgcttgtaatcctagcactttaggaggctgaggcaggagacttgcttgaggcctggagttcagtatcagcatgggcaacatggcaagacctcatctctataaaaaaagaaaaggttgcagtgggccaggtgcggtggctcacgcctctaattccagcattttgggaggctgaggcgggcagatcacttgaggccaggagttggagaccagcctggccaacatggtgaaaccccgtctctactaaaaatacaaaaattatctgggcatggtgctgcgcacctgtaatcacagctattcggaaggctgaggtgggagaatctgcaagggaagtctaaaggatttcatttccactgtcactcaggcatcttctcttcctcacctaagccctgctgtgttggaggagtcccagaggcagggttttagtgagaccctcacggccactccccactcctgaccccataagccctgtgagcctacacagagacggtggctcctgagccgtagtggcagagaataacaccttgtcgggtggcccatgcagcaggttataaacaaatgttcgatgactgacgttctcctgttttgcagaaaattatagttttggtatgacaaggggaaattacattaaacaagcaatttagtgaactttttttttttttttgaggaatgtttcacacttggaactgaagtcattttcttttattctagtgactttttgaatgagtatgaaaaaggaaggactcccaatcctgacatagtttgcaacaagcacatcaaatttagttgcttttttcattatgctgtggataatcttggtaagtaatttgggtttaaaacatttttttttttaaagacagggtctcgctctgtcacccaggctggattgcagtggtgcgatcatgactcactgcagcctcgacctcctgggctcaagagattctcccaccccaggctcctgagtagcttggaccacaggcatgccaccatggtggctaattttttgtggagatggtgtcacaactgtattgtccaggctggtctcagatttctggccttaagcagtcctcctgcctcggccttccaaagtgctgagattacaagcgtgagcccctgtgcctagcctgtttcttcttgtggaacctcctgatactgaattgcttgcttagaccacctcttgatgtctgtggctatgctttatgaattttaggttcttcttcctgtcccctgccattggggtcaccataatgagtttctgaagttctggctcaggcttcttggtttgctctgtcccactgcagctcaccctgttgtgtgttgctacgagataccattgtaagccaggggcccagtagtgtcggcactttcagcaatgatgtagattaggcttgcagattcaatatgtcagcaacctaaagctgagttgatgataatgatgaaagttagtttgtggagttaggaataaacaaatgcctacaaaaacaaaaaatcaaaaagaaaaatcttaaatttcaacattgggctaacaccaaaaacatgaaacttaatagagataaatgcaaagtttgctaactaggttcagtaattctcctaggacaagattggaaagacctagcttggttgccattgaatcttctgccattggttgcagaaaatctgggggatttaggtgcccccaggctgactgagccagtagtgtgatgtcttttgtcagagccagcacagacggagctcaccttgatgatcatagaatgtctaggaaggggtgatgcgtcccctgtggtccgtcctggttagaccgtattagttattcaggaaaagagtgatagactgatagaatgtgaattgatttttattttcagggtatctggaaatatgtcctccctgaactgttgaaattactttgggtcgtagtggcagtggtcaagcgtgtgagttaggatgacattctttgtgtgacaccagcagacagttaggactggcaggagaaagagttccctgaggtggaggcgcaggcagctgttcaggaagggaaggcttgcctttggagagcattaagctgtcacgaaagctttttagggagcccctaggtggctggctgtcaggcacgctgtggaaggaacttctgcagtgaatgtttccacacctggaagaaaggcatgaaccgtgcagcacaggatgagaggacatgacgcccagacttctgaactcaccgcgcttctcagaggcatcctgcgctttttctagtataagtgctgttctttgaggacacagatgtaaagtggattgttttctctaggagaacctcagtcaagatgagattatgtgtctctaaagtgcctttttcaggtcgttaatatgcagcagctaattcttgctgtgtcttctgtttacatggagctagtgtggctggtccaggatggctgtgtcttctgtttacactgagctagtgtggttggtccaggatggaatccattttgctgcacctttcataaaagtctcttgcaatactaaatatctgtaattttttctttttttgagatggagtctcactctgtctcccaggctggagtgcagtggtgtgatctcggctcactgcaacctccacctcctgagttcaagcaattctcctgcctcagcctcccaagtagctgggattacaggtgcccaccaacatgtctagctaatttttgtactttttttgtagagacggggtttcatcatgttggccaggctggtctcaaactcctgacctcaagtgatccacccacatcggcctcctaaaagtgctgggatgacaggcgtgagccgctgcgcctggcccaaatatctggaatttttacacaatgaaaaggttctggattcatatgcaccttgttaggctctttggctttgtgtaatatgaaaagaagaaacagtgtgctggatgattcttcactctgatgaaaataatacatatttattacagaaaatttaaaagaggagaaacgacacctataatttcactctcagaatcaaaggaatagacctgagatttttcttcaactgtttctgtacagtaaaaaccgtggaatcatggtgttacatcctcgccctgctgaacagtgccgggcattttcccgtgttagtaaacattctctgtaaggacccccattgttacggcagtgcattgtcattcacttcacattctcccagtgttgaacattttggttcttttttttttttttttcctcctgagacagcatcttgctctgttgcccagactagagtgctgtggtgcagtcttggcttcctgcagcctcaacctcccaggttgaagcaatcctcccacctcagcctcccaagtggctgggactacaggtgtgccccaccacgcctggctaatttttgtattttttgtaaaggtgggatttcaccatgttgcccaggctggtcttgaactcctgagcacaagcaatcatctgcccgcctcggcctcccagagtgctaggattacaggcatgagccaccgcgcctggcctcccttcgtattatcacaaaccctgaaaggaatattttgtgtttaaatctttctgtgcctttcagactgtttccttaagccagaaattaactttggaaaggctcttaaaggtgcaataacactttaagtagcaaggttgtatcagcttaagagttcaaggctgcttgtttgatgaaattggatgtgtgcgtctgttccctgggatctctatgtttgggtgcagggtggattgtgcagcccctcagcctaagacttggggtctatactcttcttttgtgccttggtttatgctgatcaaggcctgcaagtatgagtctaaaacctgatccttgtgttctaaaaacctcacaggggcagatgccattgccacaggtcactatgcaagaacttccctggaagatgaagaagtctttgagcagaagcacgttaagaagcccgaagggcttttcagaaatcggtttgaagttagaaatggtaagttcatgtgcccaggtcagagccaaattcttgtgaacagattgaaatctttggaggaatgacagtgggttgtgcctgaggatcactgccacccctccctctgtgctccagagtagcttgtatgggattcacatttgaaaaggtgcagttaccaagaggacattttcccggagggcctgtgattgggtagtaaacagtgtccctgccggccatggtgagggctggtggaaagtgacatcagatactgataatccagctctcgacactgtgtggtgatttgaatgttccaaaaatatctgggtaaatatttgacagtgataattggggtgctgtcagtctagccaaggacctgtacttagcaacaagttctcaagggcgtgcggttcaggcagactttcaacgtgctgtgagcacaggacctgctgtggatcgcatgggctcagcagtcaggctttgtagccgtatttacacgttagtttatgcgtgttagggagccaagtttcacctttctagaaaaaagtcaatggcagacagtgagctgggaagctgctggcctgtcctggtgtacattcgtgtgtagaaaagaggaattccctgtattgttgagtgaaaaaccaagtggggctcagagccgtgtttccgcacggagcgtccgtccatcagtggggacccctgaagggcagccttgctcttttgtccggaagttcagatgttggagggagccttgtcccgccatctggggaataggggtctctggggctggggcagggctttacatacacacatttcttttttaattattattattaattttatttttttgagagaggatctcactctgtcaaccgggctggagtacagtggcccgatcttggctcgctgcagcctccacctcctgggctcaagtgatcctcccacctcagccccaccaagtagctgggaccacaggtgtgcgccactatgctcggctttttcattttttgtagagatgaggtctcgttaatgttgtccgtgctggtcttgaattcctgggctcaagcgatcctcccacctcggcctctcaaagtgttgggattacaggtgtgagccaccaagcccggcctcacacgtttcacatcactcctcttagcagtccatgaggtgtatgctctcatcccgtttcacagatgaggaaaccgaggcccggatgaagccatctgacctgggtccctcgggtggcagagctggatttcagtgcacttccgctcactccccagcccctgctgcttctgctgggtcaggccccagctgagttctttcctcagcgttgctgagcccatcctgaaggctgcagtgatggggcagggccgtgcttggtcaagggagccctgagtgtgccaacagtcgtctgccgccctctgttccctcctcgccttccttccttatgccacagggtgatcaggtaactgtactgacttgagcccagagaagagcagcccactcccgtaagacagccccccatttcaggaagacatgggtttgaatgcagataagacagccccccatttcaggaagacatgggttggaatgcagagtcctgccacttgggaactccagggtggaattcaccaagtaattgtgcatttacggggcctgaggagatggagggttaatttccatgttgaatagatgcgcctgcttacctcctagaacattacctcctagaacactgtgtgccctgcagagccatcgacctttattataggccacgtgccctcggaaacttgggacagtactgatgcgttctgttgagtgcgtttggcatgtgggaattgtgatggtgcacagtgtcttggccttcactgggttttgtaggcacactaaggtttccatttcattcttcttcagttgccctggcccagcctgggtctctgggtagagcacctgcaggggcagtggacggcctgggctcagggtcggtcagcacctgagaccagcgctcctaggcctggcctgtgactgggctgattttcccccacacagcgtgctaccaccggcctggcagagccagcacggcagccggcgtgtcagtgaggctccagcacaggcagcctcctccaaatgttgttcattcctttctgtgctttttcctctatagcagttcagttagggtcgccagcttgcttttttgaaaatcatagatttttagtttgttttaaaatgacgcagaactaggagaaaatgcaaatggctcctagttttctgaggcttttacacacatgcagtgtttgactgcagttagtttgggattgaaagtggactctgaggccaggtgcggtggctcatgcctgtaatcacagcactttgggaagccaaggcaggcggatcatgaggtcaggagttccagaccagcctggccaacatggtgaaaccccatctctactacaaatacaaaaaaaaaagttagccgagtatggtggcacatgcctgtagtcccaggtactctggaggctgagacaggagaatcacttgaacccaggaggcggagattgccgtgagccgagatgtgccactgcactccagcctgggcgacagagcgagactccatctcaaaaaaaaaaaaaaaagtggactctggaaagtgctctgcttccgtggcgactggtcggctgaacttggtctcacttgtcactcagttctgctgtttgtacctgccaagtaagggagggggactcgggaggctgggcagcctccagccccaccgcctccacctgcatcactttgggcgagtcatatgtgatgaactgggccggctccagtctcccctctgtaacgtggggagaattctccctctcacggctaacgtgggaatcggcagatggaaaacactagctacgcagagtgtgtactgtacacgtggctctgccaagccaggaagggtaggtgtgctgtctgaccgtcacggcatgtggcgtgctctgagtgtaactcgaaaggagaagtttatgagaaagattgaaagaagccagaaaactgacgttcgtcttagttttttgccattgatcattgaactcgagagtggagaactggacggttctaagccaggtttactcacacctctgctccgttgccttaaagccagaaatggttctttacaatcacatagggaatgtcggaggaactgcagggtcacctaacagatgtcagctgagactctcaacaaaaaaacgtttttaccaagaaagctaatgccttcacaggtagggcgctgctggaggcatgtgctggccgccgggcagtgaacctggaaagtgtagagtccttgaaaccactgtggcacgaacacatcctgtggttgttggaagaaggcacagctgacactatatcagtggaattttctgccagcaactagcttactccattttccaagatttggctgaatttattttaggtgtttttttttttttttcttatcacttgagaacattttttcatgtgatgtttcatctttgaaaatattataatctgaagtatgagctggaataatttctttgtcatgtaaaatccttgtttttttttttggaggtgcgaatttttcttacattaacccgtggtggtcttttccctagtagttgctattgagtgttgatgtctgcctctgacaggctaggggtagtctgtctaagtgaacagaaggacattgttgaaagtgaagtatcattatttttattcctgcatcgtcttttgttctttattcttggcagcggtaaaactcctccaggcagctgacagctttaaagaccagaccttctttctcagccaggtttcccaggatgccctgaggagaaccatcttccctctggggggattaacgaaagagtttgtaaagaaaatcgctgctgagaatagacttcatcatgtgcttcagaagaaagaggtacgagtgagcagttgcctttgattagtgcctgtttccctttcccgactgcatggcacggagcagctggacctgtgggtcccgcaccacttccccttctccaggacctaacatcaaaggcgggccttggagcaatagatggaggagtttgctgaggcgcacggtacagggctctgctgacatcgggagcagcctatacgagactccttgcttttttcctctcctctgcccctatgtggtaggcagctttccccacagccttagcagctggtggggtgctcttgggatggcctgcctgccaggtgagtgccaggcagtgtgatgcagccccgagacccctggaggggcaggtgctgtgccgccgtctgcacactcatgtgccctgtcacccgcttgcccggcacagactcgttcggtgccatctgttcgggcgctgtgctgctgggccgcgaggaattggtgacgcgcacacagttccatcttcgcctccatggagcccgcccgcgagtgggggacacaggcaggaggccaatcagtgtaaacctagaaaatgtctacggagggaggtgtaggaccctgggtgggaagcaccagtggggtctgagagtagggaatggagatgccaaaaacggcctcaaaagaagtcacatggaacctgagacctgaaggaggagaggatccggtgtcccagagagggctgggaaagtccagatgagggaacggcagtgcaaaggccttgaggcgaggagaagccagggagccgctgtgggggtgcctgcctgtggccccagctcctcaggaggatcgagcgcacccaggagtttgaggacagcctgggcaacacagcgaaactcgtctcaaaaagagagaacccggagtgttggcggaactaggatgaagcccgtgggagggccttggggatggagggcgagggcgctgtgggatgagcctcacctcttcaggggccagtgcggtgggagctgttgctccttcgtgtctcttcctggtaatggaaacggccatacctttcatcagagccatcttccctgaagagcacgcccaccgcccgtcctcctctcctcttgttttccgtttccggtgtcgctctgtggtgggagccgcagggatggaagggcagtcttgagagacacaaaccagagtaaacgatgcagcccctgatggggccacggtggagagcgcacgccacccaggctccccagctagggcagatgtgcttgaggaaggcgcctctctcctctgactcccctggagccctcccctaaggccttagcttcaggcctggctttcctgctacctgccccttctctggtccctgtctctcccccactcctcgcaggacagtggcctgaaggacctgaccgggttctgctttcttccccggggcagctggtgtgagggtctcccgcgcagggtcagaccccgcgggccgagacaatgaggcgttctctaaggctctggcatcgtgtgcgccggctgtgactggcggccgagggtgccggtgggcagccgggcccctaccctggaagcaaagtgtggggtgaggccgggaggccccagggcccgctcaggacgtctgggtacagcttgggccaccgccacttctgctcctctcacggctgccgtcttctcatttcagagcatgggcatgtgtttcatcgggaagaggaattttgaacatttccttcttcaggtgcgtgctgctctttgacacaaagagatggggctgcgtgtctgccctgggcctagatctccgtcggtaatgacatgtttgttttccagtatctgcagcctcgacctggtcactttatttccatagaagacaataaggttctgggaacacataaaggtgaggtgcagactctgccacttgtcatctgaaatgcctagagctgtggcgtttcagctctgggagactagaccagagttcctgtcgtcccttccacttggctggagaattgtagaaggctctgtggggcggccgggggcgggcacggcctagggtggaacagttgccttgatggtggctgggtgcacttccagatgtggcctcagctgagatgctggagttcatgaaaagcgcgcctctgacttggaaggactatactctgtgagttacgtatcaagtccctgtaaaaagaatgatttccttcctgtgtaaggaaaatgttaaactacacaaaactccactctgattcagggagtaaggtggacgtcccggcatggtgtgaatgattaaggaccacatgcagcgatgggatcaggcgtccgcgctggccagagtgctgctcgctcatgtgcagacccttactgcggtgaggcctgcgtgagcctgtgctgtgcctggtgtcaggggacaggctccgagtcagtcacagtgtgcagtcctgctgtggggacagagtgcagccattgttgggttagtacagtggcggggatgtgcctgccggcgtgatgatcaggcaggtcttgacacagcacagacctgagctgtgggactggccaggagagccaggctgcagctcaggtgtagggcgtcttgcagtgaattgcacttggagatcttccacctcttgtggaggggagacggcaggcggagccggggctaggcattcctgagacaggtggaggtgacagctttgcttgggacagaactgccagacaggattgcccatgtatctgccagccctggccccagcaggagccagttggatgactcatggcttccacctgcagttcacttcactgaagaaggctgccggcccaggccacgtggtaaatcccatgaggttctctctgcctgtgtgccccactgcaggggagggaggcagtgagtttgccatctgctgtgtgacattgtgagggtgcgcagagcagctgggggtagccctgatgcagttactgcattagatggacactgtgaagacgtgcagctatgtcatgggctcagcaagaagggcccctggcgtcacacagggcacccagccgcatcctgggcctagggtcaggggctcctacagctggaacctgcaccttctggggcacaaggtgccttctttgtggccaccacaccccatgtccagcccaggcctggacaatgatgagatgtgctcaggtgcttggtcagggctggctttggtggttggagaatcgtatcttcctagtgagttacaccattgctgggcctgctctgggctgccctcccagcatctgccttcatgatgaggcgtgacatgtgggctgtaacttgttgcccagcctcatggagaaactgtctttctgtaggttggttcctgtataccttgggccagagagcaaacataggtggcctgagagagccctggtacgtggtggagaaggacagcgtcaagggtgacgtgtttgtggtgagtgggccggcctctgagacagcactggggctggttctggcagggccagcagtgcttccagaccagggcttgagaaggcctccagcagccgtggcttcctggaggctgtgactaactctgttcctgtccttggtcccctgcctttcctgggactggccatggtggcaggagagttttaaggtattcattaggctgagttgtatgctggtctcttaatcatccctgaaccccgatacacagatacagtttctccaattttatgaaagaggacagcgacgcccagagcttgggtggctcatccggtggagagggcatggcctcagtgccaaggatggtgcccaccatggtaggatccagtgagttgttgtcaggcaggtgcagatggccaagccaggatcaaaccaagccttccaccacagtggggaccttaccactgtgaccctggcctcaaagcagggccgctcagtggcggcaagctcaccccaccttcaggggaccttgccagtgtctagaggcatttttggttgtcacagcttgggtggaaaagcaaggacgcgggtgctgctgcatctgtgggtcaggccggggatgctgcttgccgtgttcagcacagcctcttccctgagtgacccggcctccaccttggcgcgtggagctgagaaggcccactctcagcaccctggctgccggctcatgttctggcacgaatgctggggcgccttctcttagacggaggcgggggccagcaggccccacccaccgattccaggacatctccttactaggaagacctgtggggagaaaagcctggctgcgaatgaattaaatgatctagatttcagtttgctgtgagaagaccagaagggttaaccaacggcctcctgtccctggacgggtcttggtgcctgcttagaacccaaagcccttaacttcatgctcctcgtcctgcttcaggggcggggcttggcacaatcccaggaggtgccaggtctcaatggcccgaggccatgggtgggtgacagggagcaggggcctcagaaccaacctagggtatctggggccccccagaccagggccagtcctggggcacctgtgggaagccagcagctaccagtccctcctttctcctcagccatttggtgtgtggaggaattcctggggtggccttgagagaagagcccgtggtgtggctggcccctgtccctgcgaatagaaaaaccagtcctcgaggggggccgtgctgctgccccacaggtggttgcaggtagagggcctgagtcagacttgaacctgcagcattcactgtcatgggctcggatctcacccctgcctcttgcccactctgacatggtacttccttcctgggccttagtctcctcatctgtaaaatggggattcaaaggcccggcgggtgatgagatgaatttctgtgggtagaacacttcgagcggtgccagcaccgttacctgtgtgtgtgtgtgctggtaggacagttgttcccagggaccacactgaggccggccttggggccaggtgcccctcggcgtccccaccttcacattccattctgcaggccccccggacagaccacccagccctgtacagggacctgctgaggaccagccgcgtgcactggattgcggaggagcctcccgcagcactggtccgggacaagatgatggagtgccacttccgattccgccaccagatggcactaggtgactgacgggagggctcctgaggacgggccccttgaagctgagcttcctgaggccagatttgggccagggatgggagaccctggggtaggaaagtcccgttgtggagatcatttggagattacctaaagtatttagaactcccgtgtcctgtgcctgccctgagcgaggcctgggggtgctgggagcagatgcaggcaggccccggcgtgttgggctgaagcaagtgtgtacactgccccgcagtgtcctgctgcgtccagggcccaggctggtgccctgcccttcccctctaagcaggggtttttgaccccgtgggctggtgctcctttctccctgggggcctgaggtcgaccaggaaaggcctgtgccccctccaagggcccctctcttctacccagtgccctgtgtgctgaccctcaatcaagatggcaccgtgtgggtgacagctgtgcaggctgtgcgtgcccttgccacaggacaggtgcgtggggtgtgggggtgagcccggggaggactgtactgctctgcaccctgccagggcacccgggttacagaggaaggggctgaggcccaggagtagggtgtgctcgggtcacacagctggtgagggcagagtgccaccagccctgccctgggggctcctcccacagtgacaactgtgagaggatttccactctggtgtcaccaaccagccagttcctgctcgggccctgagaggctcagctgctgcccgggccccagaagcgaggacagaaaatggaaggggcatgaggacagtgctcaaagaggcagagggtcggggcccctgtgggccgagtgtgcaggagctcccagggtgggcgcctggtgggtgtaggcctgaggaatctccaggggcaggtggtgggagggaacctggggtgagggaagcggaagcatcctctggctgccaccatgctccttcctgtcacagctccacattcccaaggggtgcagagacctgccagtcccttggagtcccaggagaggcccctgtgactgtcccactcagggagaggtaccctgaagaccctccctagtgaagccactgggtgccccaggcctctcctctcctgttcagcagcagcagcagcagcaaaaccctgctcccctgggagctcagtgcctggtgctccgagcacaggccaggccccataggggagcactctgcccctgcctgccctcggctggctccctgtggcacccctgatgccagggtctctcccctacagtttgctgtgttctacaagggggacgagtgcctgggcagcgggaagatcctgcggctggggccgtctgcctacacgctccagaagggccagcgcagagctgggatggccactgagagccccagtgacagcccagaagatggtccaggcctgagtcccttgctctgacagagatggatctgctagaaggaacctggagagcaggacccatggctgggcggctggtgagcagtccaggtgcccaagggccagcttgctgctgcccaaagcagaggaagccgggctggctgagggtccgaaaagcctgcaggggcccggcgagccccaggaagagcctcagctccaggctggggctctggctgctggagcatctgctggctggtggggtggcccgagttccccttcaccgcccccagggagggtttcccacctcagagtacaccgaggggacctgcagagggggctgtcgggacagcgtggaataaacattatttcaaggaca

SEQ ID NO: 14715 - DNA, 1651 bp, Homo sapiens
aaggcgcggaagcggcggtagctgcagctggcgaagttgggcgactggcggatgcaggccttgcggcacgtcgtgtgcgccctgtccggcggcgtggacagcgccgtggccgcgctgctgctgaggcggagaggttaccaggtgacaggggtgtttatgaagaactgggactcactggatgaacatggggtctgtactgccgacaaagactgtgaagatgcttacagagtttgccagatcttagacatccctttccatcaagtgtcctacgtaaaggagtattggaatgatgtgttcagtgactttttgaatgagtatgaaaaaggaaggactcccaatcctgacatagtttgcaacaagcacatcaaatttagttgcttttttcattatgctgtggataatcttggggcagatgccattgccacaggtcactatgcaagaacttccctggaagatgaagaagtctttgagcagaagcacgttaagaagcccgaagggcttttcagaaatcggtttgaagttagaaatgcggtaaaactcctccaggcagctgacagctttaaagaccagaccttctttctcagccaggtttcccaggatgccctgaggagaaccatcttccctctggggggattaacgaaagagtttgtaaagaaaatcgctgctgagaatagacttcatcatgtgcttcagaagaaagagagcatgggcatgtgtttcatcgggaagaggaattttgaacatttccttcttcagtatctgcagcctcgacctggtcactttatttccatagaagacaataaggttctgggaacacataaaggttggttcctgtataccttgggccagagagcaaacataggtggcctgagagagccctggtacgtggtggagaaggacagcgtcaagggtgacgtgtttgtggccccccggacagaccacccagccctgtacagggacctgctgaggaccagccgcgtgcactggattgcggaggagcctcccgcagcactggtccgggacaagatgatggagtgccacttccgattccgccaccagatggcactagtgccctgtgtgctgaccctcaatcaagatggcaccgtgtgggtgacagctgtgcaggctgtgcgtgcccttgccacaggacagtttgctgtgttctacaagggggacgagtgcctgggcagcgggaagatcctgcggctggggccgtctgcctacacgctccagaagggccagcgcagagctgggatggccactgagagccccagtgacagcccagaagatggtccaggcctgagtcccttgctctgacagagatggatctgctagaaggaacctggagagcaggacccatggctgggcggctggtgagcagtccaggtgcccaagggccagcttgctgctgcccaaagcagaggaagccgggctggctgagggtccgaaaagcctgcaggggcccggcgagccccaggaagagcctcagctccaggctggggctctggctgctggagcatctgctggctggtggggtggcccgagttccccttcaccgcccccagggagggtttcccacctcagagtacaccgaggggacctgcagagggggctgtcgggacagcgtggaataaacattatttcaaggaca

SEQ ID NO: 14716 - DNA, 21596 bp, Homo sapiens
ggcgcggaagcggcggtagctgcagctggcgaagttgggcgactggcggatgcaggccttgcggcacgtcgtgtgcgccctgtccggcggcgtggacagcgccgtggccgcgctgctgctgaggcggagaggtgaggcgtccgaggctcccgccccccgccgagcgaatgtgtccccggaaacctgtccccgtccgtcgtggcgttgtgcacgtctcctccctccctgggccgctggttgcgcgcgggtcggcaggaggataccccgtcctctgactttggttcggaggctcctcgccctccacctgtgtagtcggaggtgtgcgcgactgcagctccgactacctgggagcagttccgcgcccctctccacccacgcgcgcccacccacagtgagaagccggcgggccggggtggggtggggagggaagggtttctcacggatctgcggcgtccacattcacctgtgagaccgtggacactggtgaggggagctgggatcgccgggccgggggcctgacctctgcacacgctgtggccgcccggtgggaggtccttgtcctccccactcagcagactggacaactgccgcgcggcgggtctgcttgttcagcgtctcctgtgttctccgctcgctggaggacaaagttttctccaggagcatttgcatttcttccggcatctaaacggagccccacgggtgcttagcattcctcgggcccggcgctgaaatgagcacttgtttaacttcacctgtgtggctccccgcgggaggcctcattcacagagtcacgtttgtggagctctgctttgcgccatctttggctcctgaccttgggcaagtgaattaagccgtcccctgtaaaattcggctaacacctgcctcacggggtgactggagggattagatgacatagtacatactgatgagtacgtgctcagcacatacgaggtacgcagaaaacagtagtggctattagtttatattgttaataaccatagctattatggtaggtacagtaagtgccaaagagaagggtaggcggaccataagcagaaatagttgtgaggaagggagagtggaggaaagcatcctagagatggaggtgctcagctgagtcgaaagaagagtaggatgtcactaagcagagacttggaggtggaggcggccctcccggcacagtcagcagtgcaagcagaatcacagaggcctgcaagtgtgggctggttctggccagatggagatggaaggagaggagcctggagcacgtttagccctgattatggaagatgctataccaggggctttagactgttaggtagacattagtctggttgatctgggataggggtggtctttcgcgtgtggtggtgtagttttgacaaagctttgtcatcaaatttctgttgttttgggtactatatgaagccttcttcagcagtcatttgccctgtctttcattacattcagcctacctaaacgaaccagctttctcatacagggtctgcacctgtgtagtttgctaaggtggtgtagggctaaagttggcctttccaatatttgggtgaatattttgttacaatcgaaaaggtagaaaataggtcataaactaggtggtacagctcttacaaaatatcgaaaattttaattatctttatatctgatcacttagaatctaagtcttagatagtaactagaaataacttttgaaaagagtttccttttttgataactgaatggtgctttgaaaaattttgttgagtttcgactattccttcgtgtattccacacacactggctgatcccctcctgctaggtattgtgctgatacatagatggggacacaaagatgagaaaataccacctcgttaatcttggggactcaggcaccaagatggaaaccggatccctgaagccacatggcaaagcagggactgcccggcaggccaggcacagaggcacaggagcacagcgtgtggggaacttctcagagctcagaaatcactgccgttttaccgaaggttgatttatgtattctctttaattgaccttcccgcccgcaggttaccaggtgacaggggtgtttatgaagaactgggactcactggatgaacatggggtctgtactgccgacaaagactgtgaagatgcttacagagtttgccagatcttagacatccctttccatcaagtgtcctacgtaaaggagtattggaatgatgtgttcaggtgagtgcgggtcacagcacaaaggaagcttcctcacactgtggatccttgcagtggaaggatccggtaaccagccagaccgacgcctgtgctgcagcccagcgctctccctccacggtggtgctgaagactgcaagaggcctcagccaccctcggggctctgtgttagaggcgaggcctggaccccacagcacacccagctctctcactcctgtcattttgccacttgcctgaagtctctttaatgctttcttggaccttgagctgtttctgttgcccagttaggataggggagctaaggctgagggctcccctggaaggtgagcaccaatgcctgtgtgctatgtgggtcagcgattaggggatttctgagaaagaggtgatacatggcctgtgcctctgaaaacaagaaacaaacaaaaacttttctaaaatccaatataatctcaataattaagtgctgtgtgctaggcgtgtgccacatctaggaacattaagatgtcttcactgtgacctggctctgtaggagtttgcggtctagttgggaggacattatcttcacaagaggtgacagtgatgcgtggcacgcaggaagtaccagtgatgctatcagtcactgaacccagaggagggagaaacttgcagtgtggagtaatcaagaaggcttcaccggagaggaggggttgcaaacaaagttgtagagaagggactccaaatggggtaacgagagcagcgtgaaggggagaagaaatgctgattgtgtatttcaggaccgttgtaaagtttggctggacttttgttcctgcagtggaaggagtgtagggctcatcctctggtgagccctgactgtgatgaatgtcgggcagttgtcgaaggcgtctgacacagcaggccatgtgcgcgggacaggctgcccctgcctgagtgggctttaggggcagaagagccttgggttgagtcctgactgtagcttattatatgaccttgggcaatttacttgactttgtttttttaattgaaaaaaattctctttttttcctgccaacaaagacccagaagagatacttgacttttctaagccccaattttctcatctttaaaatgaggataacactgatgcctcacagggttatgaaagaattgagattaggttctagtatgtatgcctggtatattagtaagcagtcaataaacatagctgtttttcttttctatttttttttgagacagagcctcgctctgttgcccaggctggagtgcagtggcgcaatcttggctcactgcaacatctgcctcccaggttcaagcgattctcatgcctcagcctcccaagtagctgggattataggcatgcaccaccacgcccggataatttttgtatttttagtagagacagggtttcgccatgttggccgggctagtctcagactcctgacctcagaagatccactcgtctcagcctcccaaagtgctgggattacaggcgtgagccaccacgccagcctgctatttttattttcattattaaaaagatgagtctggggagctaagctatgaggacgcaaaggcataaaaatgatataatggactctggggtgagggataaaagactacacatcgggtacaatgtccactgcttgggtgacgggtacaccaaaatctcagaagtcaccactgaagaacttatccatgtgaccaaataccagctgttgcccaaaaaaccattgaaataacaataaaacgaaatttagagagattaagtaaattgactatggtcacctaaataatcaacggaagagcttgaatatgaaccctctgtgactctatgctataacatatgggtgtcgtatatattaacaacatggacaaaactgatggctgaattttcctggggaaagttacctgtagaatgcatgataaatgcattaaaaacttatctgtagaatgcatgataaatgcattaaaaacttctgcagttttctcggggacataagaaaaaaaaaagagtgtggcggccaaatacaggataaatctgggggaagaccaaaggcagagagtctcaggaagtgctgttgctggagatttggacttcatggggagggagtgtgggagtggaaggtgagggctggcttgttggacccagaggacaagtccaccgggcagtagatctgaggtgcttgttaaacacagacctggaccgaggtctgggggcggccctggaatctgctttaataagcacttcagctgtgctggtggtgtggggggttgtcagggtctttctttgagaaaaggtgtgatgcggcttagggactgatgtgtgtgggagaccagagaggagaggagtcagcagtagtttcaagatcaaggctgggtggctggggaaagctggtttaggggattcctcatgagtactgtagagtttgaggggacaacagggaatccaagtgagcttacacttcacctgccagcacagctttttcagaacgtacgagtggatgcgatttttgaagtttagctcagctgaggccagataggaagagtgacttgaatagtatggcaaattaggagcggagctgggattaaaccccagaattaggagcggagctgggattaaaacccagaattaggagcggagctgggattaaaccccagaattaggagcggagctgggattaaaccccagaattaggagcggagctgggattaaaccccagaattaggagcggagctgggattaaaccccagaattaggagcggagctgggattaaaccccagaattaggagcggagctgggattaaaccccagaattaggagcggagctgggattaaaacccagctttccaggccagtgcttgctgccgccttctggcgctgcttgatagggactgagagaaggaggcggccgggtagagtcttttcccatctctggggctgcccccgaggtcgcccctggctccagccagcctgccctctgccctcgcccagtaccagctgcccgtggaggcattggtctttccgctgaagactcacttctctagtagggctctctagctcagagatttcttttgcattctttcattcaagacccactggccttcaaggatcagagtccagatacgttttagctgctgagtcttttaaatctgtctccctcccgaggcacatgaaaggcttctcttctttccagttagagaagaggctgggctactccattgtttttgctaatgccaaaacacacgccttcccatctgctgtttacgaaagggttaacagtgtgtcttttcagaaactgattttaatgttcagcctcttcaacatttattgatgactgtgatatagaaagtttgttgggtctaggacacagacacagattgcaccttaagtagtttatagtttaatgagcttcctggtaactttctaataattaaagcaaaatggaaagagtgtaataatatcaagtgttgttgcaaatgtggaaaaacatgagtttttatgaacttctagggggactgagaagtaggaaaacagtttggtgcctgctaaagtggaagatatccaaggaacctctgaccctgtgcagatctgtgatatgtctgcaaaacacaaacctcttgatcagcactggttttttttttaacccttgttgattaatagagagttttaggttaaatgaaaaaaatcacttataccaaaaatacacccatttttaaactcccaaaataggcatcataaccctcttgaagtgaatcctcgaagactatgaaattcttggtaagttttgctggtatcatggcatctttttcccatgttcagtcagtctgttagagcagaagttcactgaattaggatagcctgatccactttaagcacccaagagtttgctagttctcagaagtgtgtgtttgtcacctgaggatagtatttttggtatatttgcccagtgacgcagcattccaggctgagattgcagaatggctcatggagcccttgtgtagggaagcctctgactgtgtttctcctctgttctcatcacggcagtcatcctcacggaagaaggcttctgtgacaaaggtgtggggggttttccccatacagcaagcagtggacaccgactgggtgtcctctgattcagttccgataccatctacttggagatagtgctggatcccaaaggttgggggttcagtcccccagacggactccccccacaacagcagtcgaaagtatgggcctctagaacttatgaccaactggcttccagttgggattcccataacttcctctttgggttcaattattaataatttgctggagtggttcacagaactcagaaaaacacatttaccagtttattataaaggatgttgcaaaggatacagatgaagagacgggttgggtgaggtatggggaaagggtcatggagtgtccacaccctccctggggaccaccctccaggagcctccacaagtgtagctgtgcagaagctctctgaacccagtactcctgggtttttatggaggcttcatgacatcgccattccttcccccaggatatacagtgggactgtgtctggggagggtcttaagacccacagtcagaaaggtagacgcttgtaatcctagcactttaggaggctgaggcaggagacttgcttgaggcctggagttcagtatcagcatgggcaacatggcaagacctcatctctataaaaaaagaaaaggttgcagtgggccaggtgcggtggctcacgcctctaattccagcattttgggaggctgaggcgggcagatcacttgaggccaggagttggagaccagcctggccaacatggtgaaaccccgtctctactaaaaatacaaaaattatctgggcatggtgctgcgcacctgtaatcacagctattcggaaggctgaggtgggagaatctgcaagggaagtctaaaggatttcatttccactgtcactcaggcatcttctcttcctcacctaagccctgctgtgttggaggagtcccagaggcagggttttagtgagaccctcacggccactccccactcctgaccccataagccctgtgagcctacacagagacggtggctcctgagccgtagtggcagagaataacaccttgtcgggtggcccatgcagcaggttataaacaaatgttcgatgactgacgttctcctgttttgcagaaaattatagttttggtatgacaaggggaaattacattaaacaagcaatttagtgaactttttttttttttttgaggaatgtttcacacttggaactgaagtcattttcttttattctagtgactttttgaatgagtatgaaaaaggaaggactcccaatcctgacatagtttgcaacaagcacatcaaatttagttgcttttttcattatgctgtggataatcttggtaagtaatttgggtttaaaacatttttttttttaaagacagggtctcgctctgtcacccaggctggattgcagtggtgcgatcatgactcactgcagcctcgacctcctgggctcaagagattctcccaccccaggctcctgagtagcttggaccacaggcatgccaccatggtggctaattttttgtggagatggtgtcacaactgtattgtccaggctggtctcagatttctggccttaagcagtcctcctgcctcggccttccaaagtgctgagattacaagcgtgagcccctgtgcctagcctgtttcttcttgtggaacctcctgatactgaattgcttgcttagaccacctcttgatgtctgtggctatgctttatgaattttaggttcttcttcctgtcccctgccattggggtcaccataatgagtttctgaagttctggctcaggcttcttggtttgctctgtcccactgcagctcaccctgttgtgtgttgctacgagataccattgtaagccaggggcccagtagtgtcggcactttcagcaatgatgtagattaggcttgcagattcaatatgtcagcaacctaaagctgagttgatgataatgatgaaagttagtttgtggagttaggaataaacaaatgcctacaaaaacaaaaaatcaaaaagaaaaatcttaaatttcaacattgggctaacaccaaaaacatgaaacttaatagagataaatgcaaagtttgctaactaggttcagtaattctcctaggacaagattggaaagacctagcttggttgccattgaatcttctgccattggttgcagaaaatctgggggatttaggtgcccccaggctgactgagccagtagtgtgatgtcttttgtcagagccagcacagacggagctcaccttgatgatcatagaatgtctaggaaggggtgatgcgtcccctgtggtccgtcctggttagaccgtattagttattcaggaaaagagtgatagactgatagaatgtgaattgatttttattttcagggtatctggaaatatgtcctccctgaactgttgaaattactttgggtcgtagtggcagtggtcaagcgtgtgagttaggatgacattctttgtgtgacaccagcagacagttaggactggcaggagaaagagttccctgaggtggaggcgcaggcagctgttcaggaagggaaggcttgcctttggagagcattaagctgtcacgaaagctttttagggagcccctaggtggctggctgtcaggcacgctgtggaaggaacttctgcagtgaatgtttccacacctggaagaaaggcatgaaccgtgcagcacaggatgagaggacatgacgcccagacttctgaactcaccgcgcttctcagaggcatcctgcgctttttctagtataagtgctgttctttgaggacacagatgtaaagtggattgttttctctaggagaacctcagtcaagatgagattatgtgtctctaaagtgcctttttcaggtcgttaatatgcagcagctaattcttgctgtgtcttctgtttacatggagctagtgtggctggtccaggatggctgtgtcttctgtttacactgagctagtgtggttggtccaggatggaatccattttgctgcacctttcataaaagtctcttgcaatactaaatatctgtaattttttctttttttgagatggagtctcactctgtctcccaggctggagtgcagtggtgtgatctcggctcactgcaacctccacctcctgagttcaagcaattctcctgcctcagcctcccaagtagctgggattacaggtgcccaccaacatgtctagctaatttttgtactttttttgtagagacggggtttcatcatgttggccaggctggtctcaaactcctgacctcaagtgatccacccacatcggcctcctaaaagtgctgggatgacaggcgtgagccgctgcgcctggcccaaatatctggaatttttacacaatgaaaaggttctggattcatatgcaccttgttaggctctttggctttgtgtaatatgaaaagaagaaacagtgtgctggatgattcttcactctgatgaaaataatacatatttattacagaaaatttaaaagaggagaaacgacacctataatttcactctcagaatcaaaggaatagacctgagatttttcttcaactgtttctgtacagtaaaaaccgtggaatcatggtgttacatcctcgccctgctgaacagtgccgggcattttcccgtgttagtaaacattctctgtaaggacccccattgttacggcagtgcattgtcattcacttcacattctcccagtgttgaacattttggttcttttttttttttttttcctcctgagacagcatcttgctctgttgcccagactagagtgctgtggtgcagtcttggcttcctgcagcctcaacctcccaggttgaagcaatcctcccacctcagcctcccaagtggctgggactacaggtgtgccccaccacgcctggctaatttttgtattttttgtaaaggtgggatttcaccatgttgcccaggctggtcttgaactcctgagcacaagcaatcatctgcccgcctcggcctcccagagtgctaggattacaggcatgagccaccgcgcctggcctcccttcgtattatcacaaaccctgaaaggaatattttgtgtttaaatctttctgtgcctttcagactgtttccttaagccagaaattaactttggaaaggctcttaaaggtgcaataacactttaagtagcaaggttgtatcagcttaagagttcaaggctgcttgtttgatgaaattggatgtgtgcgtctgttccctgggatctctatgtttgggtgcagggtggattgtgcagcccctcagcctaagacttggggtctatactcttcttttgtgccttggtttatgctgatcaaggcctgcaagtatgagtctaaaacctgatccttgtgttctaaaaacctcacaggggcagatgccattgccacaggtcactatgcaagaacttccctggaagatgaagaagtctttgagcagaagcacgttaagaagcccgaagggcttttcagaaatcggtttgaagttagaaatggtaagttcatgtgcccaggtcagagccaaattcttgtgaacagattgaaatctttggaggaatgacagtgggttgtgcctgaggatcactgccacccctccctctgtgctccagagtagcttgtatgggattcacatttgaaaaggtgcagttaccaagaggacattttcccggagggcctgtgattgggtagtaaacagtgtccctgccggccatggtgagggctggtggaaagtgacatcagatactgataatccagctctcgacactgtgtggtgatttgaatgttccaaaaatatctgggtaaatatttgacagtgataattggggtgctgtcagtctagccaaggacctgtacttagcaacaagttctcaagggcgtgcggttcaggcagactttcaacgtgctgtgagcacaggacctgctgtggatcgcatgggctcagcagtcaggctttgtagccgtatttacacgttagtttatgcgtgttagggagccaagtttcacctttctagaaaaaagtcaatggcagacagtgagctgggaagctgctggcctgtcctggtgtacattcgtgtgtagaaaagaggaattccctgtattgttgagtgaaaaaccaagtggggctcagagccgtgtttccgcacggagcgtccgtccatcagtggggacccctgaagggcagccttgctcttttgtccggaagttcagatgttggagggagccttgtcccgccatctggggaataggggtctctggggctggggcagggctttacatacacacatttcttttttaattattattattaattttatttttttgagagaggatctcactctgtcaaccgggctggagtacagtggcccgatcttggctcgctgcagcctccacctcctgggctcaagtgatcctcccacctcagccccaccaagtagctgggaccacaggtgtgcgccactatgctcggctttttcattttttgtagagatgaggtctcgttaatgttgtccgtgctggtcttgaattcctgggctcaagcgatcctcccacctcggcctctcaaagtgttgggattacaggtgtgagccaccaagcccggcctcacacgtttcacatcactcctcttagcagtccatgaggtgtatgctctcatcccgtttcacagatgaggaaaccgaggcccggatgaagccatctgacctgggtccctcgggtggcagagctggatttcagtgcacttccgctcactccccagcccctgctgcttctgctgggtcaggccccagctgagttctttcctcagcgttgctgagcccatcctgaaggctgcagtgatggggcagggccgtgcttggtcaagggagccctgagtgtgccaacagtcgtctgccgccctctgttccctcctcgccttccttccttatgccacagggtgatcaggtaactgtactgacttgagcccagagaagagcagcccactcccgtaagacagccccccatttcaggaagacatgggtttgaatgcagataagacagccccccatttcaggaagacatgggttggaatgcagagtcctgccacttgggaactccagggtggaattcaccaagtaattgtgcatttacggggcctgaggagatggagggttaatttccatgttgaatagatgcgcctgcttacctcctagaacattacctcctagaacactgtgtgccctgcagagccatcgacctttattataggccacgtgccctcggaaacttgggacagtactgatgcgttctgttgagtgcgtttggcatgtgggaattgtgatggtgcacagtgtcttggccttcactgggttttgtaggcacactaaggtttccatttcattcttcttcagttgccctggcccagcctgggtctctgggtagagcacctgcaggggcagtggacggcctgggctcagggtcggtcagcacctgagaccagcgctcctaggcctggcctgtgactgggctgattttcccccacacagcgtgctaccaccggcctggcagagccagcacggcagccggcgtgtcagtgaggctccagcacaggcagcctcctccaaatgttgttcattcctttctgtgctttttcctctatagcagttcagttagggtcgccagcttgcttttttgaaaatcatagatttttagtttgttttaaaatgacgcagaactaggagaaaatgcaaatggctcctagttttctgaggcttttacacacatgcagtgtttgactgcagttagtttgggattgaaagtggactctgaggccaggtgcggtggctcatgcctgtaatcacagcactttgggaagccaaggcaggcggatcatgaggtcaggagttccagaccagcctggccaacatggtgaaaccccatctctactacaaatacaaaaaaaaaagttagccgagtatggtggcacatgcctgtagtcccaggtactctggaggctgagacaggagaatcacttgaacccaggaggcggagattgccgtgagccgagatgtgccactgcactccagcctgggcgacagagcgagactccatctcaaaaaaaaaaaaaaaagtggactctggaaagtgctctgcttccgtggcgactggtcggctgaacttggtctcacttgtcactcagttctgctgtttgtacctgccaagtaagggagggggactcgggaggctgggcagcctccagccccaccgcctccacctgcatcactttgggcgagtcatatgtgatgaactgggccggctccagtctcccctctgtaacgtggggagaattctccctctcacggctaacgtgggaatcggcagatggaaaacactagctacgcagagtgtgtactgtacacgtggctctgccaagccaggaagggtaggtgtgctgtctgaccgtcacggcatgtggcgtgctctgagtgtaactcgaaaggagaagtttatgagaaagattgaaagaagccagaaaactgacgttcgtcttagttttttgccattgatcattgaactcgagagtggagaactggacggttctaagccaggtttactcacacctctgctccgttgccttaaagccagaaatggttctttacaatcacatagggaatgtcggaggaactgcagggtcacctaacagatgtcagctgagactctcaacaaaaaaacgtttttaccaagaaagctaatgccttcacaggtagggcgctgctggaggcatgtgctggccgccgggcagtgaacctggaaagtgtagagtccttgaaaccactgtggcacgaacacatcctgtggttgttggaagaaggcacagctgacactatatcagtggaattttctgccagcaactagcttactccattttccaagatttggctgaatttattttaggtgtttttttttttttttcttatcacttgagaacattttttcatgtgatgtttcatctttgaaaatattataatctgaagtatgagctggaataatttctttgtcatgtaaaatccttgtttttttttttggaggtgcgaatttttcttacattaacccgtggtggtcttttccctagtagttgctattgagtgttgatgtctgcctctgacaggctaggggtagtctgtctaagtgaacagaaggacattgttgaaagtgaagtatcattatttttattcctgcatcgtcttttgttctttattcttggcagcggtaaaactcctccaggcagctgacagctttaaagaccagaccttctttctcagccaggtttcccaggatgccctgaggagaaccatcttccctctggggggattaacgaaagagtttgtaaagaaaatcgctgctgagaatagacttcatcatgtgcttcagaagaaagaggtacgagtgagcagttgcctttgattagtgcctgtttccctttcccgactgcatggcacggagcagctggacctgtgggtcccgcaccacttccccttctccaggacctaacatcaaaggcgggccttggagcaatagatggaggagtttgctgaggcgcacggtacagggctctgctgacatcgggagcagcctatacgagactccttgcttttttcctctcctctgcccctatgtggtaggcagctttccccacagccttagcagctggtggggtgctcttgggatggcctgcctgccaggtgagtgccaggcagtgtgatgcagccccgagacccctggaggggcaggtgctgtgccgccgtctgcacactcatgtgccctgtcacccgcttgcccggcacagactcgttcggtgccatctgttcgggcgctgtgctgctgggccgcgaggaattggtgacgcgcacacagttccatcttcgcctccatggagcccgcccgcgagtgggggacacaggcaggaggccaatcagtgtaaacctagaaaatgtctacggagggaggtgtaggaccctgggtgggaagcaccagtggggtctgagagtagggaatggagatgccaaaaacggcctcaaaagaagtcacatggaacctgagacctgaaggaggagaggatccggtgtcccagagagggctgggaaagtccagatgagggaacggcagtgcaaaggccttgaggcgaggagaagccagggagccgctgtgggggtgcctgcctgtggccccagctcctcaggaggatcgagcgcacccaggagtttgaggacagcctgggcaacacagcgaaactcgtctcaaaaagagagaacccggagtgttggcggaactaggatgaagcccgtgggagggccttggggatggagggcgagggcgctgtgggatgagcctcacctcttcaggggccagtgcggtgggagctgttgctccttcgtgtctcttcctggtaatggaaacggccatacctttcatcagagccatcttccctgaagagcacgcccaccgcccgtcctcctctcctcttgttttccgtttccggtgtcgctctgtggtgggagccgcagggatggaagggcagtcttgagagacacaaaccagagtaaacgatgcagcccctgatggggccacggtggagagcgcacgccacccaggctccccagctagggcagatgtgcttgaggaaggcgcctctctcctctgactcccctggagccctcccctaaggccttagcttcaggcctggctttcctgctacctgccccttctctggtccctgtctctcccccactcctcgcaggacagtggcctgaaggacctgaccgggttctgctttcttccccggggcagctggtgtgagggtctcccgcgcagggtcagaccccgcgggccgagacaatgaggcgttctctaaggctctggcatcgtgtgcgccggctgtgactggcggccgagggtgccggtgggcagccgggcccctaccctggaagcaaagtgtggggtgaggccgggaggccccagggcccgctcaggacgtctgggtacagcttgggccaccgccacttctgctcctctcacggctgccgtcttctcatttcagagcatgggcatgtgtttcatcgggaagaggaattttgaacatttccttcttcaggtgcgtgctgctctttgacacaaagagatggggctgcgtgtctgccctgggcctagatctccgtcggtaatgacatgtttgttttccagtatctgcagcctcgacctggtcactttatttccatagaagacaataaggttctgggaacacataaaggtgaggtgcagactctgccacttgtcatctgaaatgcctagagctgtggcgtttcagctctgggagactagaccagagttcctgtcgtcccttccacttggctggagaattgtagaaggctctgtggggcggccgggggcgggcacggcctagggtggaacagttgccttgatggtggctgggtgcacttccagatgtggcctcagctgagatgctggagttcatgaaaagcgcgcctctgacttggaaggactatactctgtgagttacgtatcaagtccctgtaaaaagaatgatttccttcctgtgtaaggaaaatgttaaactacacaaaactccactctgattcagggagtaaggtggacgtcccggcatggtgtgaatgattaaggaccacatgcagcgatgggatcaggcgtccgcgctggccagagtgctgctcgctcatgtgcagacccttactgcggtgaggcctgcgtgagcctgtgctgtgcctggtgtcaggggacaggctccgagtcagtcacagtgtgcagtcctgctgtggggacagagtgcagccattgttgggttagtacagtggcggggatgtgcctgccggcgtgatgatcaggcaggtcttgacacagcacagacctgagctgtgggactggccaggagagccaggctgcagctcaggtgtagggcgtcttgcagtgaattgcacttggagatcttccacctcttgtggaggggagacggcaggcggagccggggctaggcattcctgagacaggtggaggtgacagctttgcttgggacagaactgccagacaggattgcccatgtatctgccagccctggccccagcaggagccagttggatgactcatggcttccacctgcagttcacttcactgaagaaggctgccggcccaggccacgtggtaaatcccatgaggttctctctgcctgtgtgccccactgcaggggagggaggcagtgagtttgccatctgctgtgtgacattgtgagggtgcgcagagcagctgggggtagccctgatgcagttactgcattagatggacactgtgaagacgtgcagctatgtcatgggctcagcaagaagggcccctggcgtcacacagggcacccagccgcatcctgggcctagggtcaggggctcctacagctggaacctgcaccttctggggcacaaggtgccttctttgtggccaccacaccccatgtccagcccaggcctggacaatgatgagatgtgctcaggtgcttggtcagggctggctttggtggttggagaatcgtatcttcctagtgagttacaccattgctgggcctgctctgggctgccctcccagcatctgccttcatgatgaggcgtgacatgtgggctgtaacttgttgcccagcctcatggagaaactgtctttctgtaggttggttcctgtataccttgggccagagagcaaacataggtggcctgagagagccctggtacgtggtggagaaggacagcgtcaagggtgacgtgtttgtggtgagtgggccggcctctgagacagcactggggctggttctggcagggccagcagtgcttccagaccagggcttgagaaggcctccagcagccgtggcttcctggaggctgtgactaactctgttcctgtccttggtcccctgcctttcctgggactggccatggtggcaggagagttttaaggtattcattaggctgagttgtatgctggtctcttaatcatccctgaaccccgatacacagatacagtttctccaattttatgaaagaggacagcgacgcccagagcttgggtggctcatccggtggagagggcatggcctcagtgccaaggatggtgcccaccatggtaggatccagtgagttgttgtcaggcaggtgcagatggccaagccaggatcaaaccaagccttccaccacagtggggaccttaccactgtgaccctggcctcaaagcagggccgctcagtggcggcaagctcaccccaccttcaggggaccttgccagtgtctagaggcatttttggttgtcacagcttgggtggaaaagcaaggacgcgggtgctgctgcatctgtgggtcaggccggggatgctgcttgccgtgttcagcacagcctcttccctgagtgacccggcctccaccttggcgcgtggagctgagaaggcccactctcagcaccctggctgccggctcatgttctggcacgaatgctggggcgccttctcttagacggaggcgggggccagcaggccccacccaccgattccaggacatctccttactaggaagacctgtggggagaaaagcctggctgcgaatgaattaaatgatctagatttcagtttgctgtgagaagaccagaagggttaaccaacggcctcctgtccctggacgggtcttggtgcctgcttagaacccaaagcccttaacttcatgctcctcgtcctgcttcaggggcggggcttggcacaatcccaggaggtgccaggtctcaatggcccgaggccatgggtgggtgacagggagcaggggcctcagaaccaacctagggtatctggggccccccagaccagggccagtcctggggcacctgtgggaagccagcagctaccagtccctcctttctcctcagccatttggtgtgtggaggaattcctggggtggccttgagagaagagcccgtggtgtggctggcccctgtccctgcgaatagaaaaaccagtcctcgaggggggccgtgctgctgccccacaggtggttgcaggtagagggcctgagtcagacttgaacctgcagcattcactgtcatgggctcggatctcacccctgcctcttgcccactctgacatggtacttccttcctgggccttagtctcctcatctgtaaaatggggattcaaaggcccggcgggtgatgagatgaatttctgtgggtagaacacttcgagcggtgccagcaccgttacctgtgtgtgtgtgtgctggtaggacagttgttcccagggaccacactgaggccggccttggggccaggtgcccctcggcgtccccaccttcacattccattctgcaggccccccggacagaccacccagccctgtacagggacctgctgaggaccagccgcgtgcactggattgcggaggagcctcccgcagcactggtccgggacaagatgatggagtgccacttccgattccgccaccagatggcactaggtgactgacgggagggctcctgaggacgggccccttgaagctgagcttcctgaggccagatttgggccagggatgggagaccctggggtaggaaagtcccgttgtggagatcatttggagattacctaaagtatttagaactcccgtgtcctgtgcctgccctgagcgaggcctgggggtgctgggagcagatgcaggcaggccccggcgtgttgggctgaagcaagtgtgtacactgccccgcagtgtcctgctgcgtccagggcccaggctggtgccctgcccttcccctctaagcaggggtttttgaccccgtgggctggtgctcctttctccctgggggcctgaggtcgaccaggaaaggcctgtgccccctccaagggcccctctcttctacccagtgccctgtgtgctgaccctcaatcaagatggcaccgtgtgggtgacagctgtgcaggctgtgcgtgcccttgccacaggacaggtgcgtggggtgtgggggtgagcccggggaggactgtactgctctgcaccctgccagggcacccgggttacagaggaaggggctgaggcccaggagtagggtgtgctcgggtcacacagctggtgagggcagagtgccaccagccctgccctgggggctcctcccacagtgacaactgtgagaggatttccactctggtgtcaccaaccagccagttcctgctcgggccctgagaggctcagctgctgcccgggccccagaagcgaggacagaaaatggaaggggcatgaggacagtgctcaaagaggcagagggtcggggcccctgtgggccgagtgtgcaggagctcccagggtgggcgcctggtgggtgtaggcctgaggaatctccaggggcaggtggtgggagggaacctggggtgagggaagcggaagcatcctctggctgccaccatgctccttcctgtcacagctccacattcccaaggggtgcagagacctgccagtcccttggagtcccaggagaggcccctgtgactgtcccactcagggagaggtaccctgaagaccctccctagtgaagccactgggtgccccaggcctctcctctcctgttcagcagcagcagcagcagcaaaaccctgctcccctgggagctcagtgcctggtgctccgagcacaggccaggccccataggggagcactctgcccctgcctgccctcggctggctccctgtggcacccctgatgccagggtctctcccctacagtttgctgtgttctacaagggggacgagtgcctgggcagcgggaagatcctgcggctggggccgtctgcctacacgctccagaagggccagcgcagagctgggatggccactgagagccccagtgacagcccagaagatggtccaggcctgagtcccttgctctgacagagatggatctgctagaaggaacctggagagcaggacccatggctgggcggctggtgagcagtccaggtgcccaagggccagcttgctgctgcccaaagcagaggaagccgggctggctgagggtccgaaaagcctgcaggggcccggcgagccccaggaagagcctcagctccaggctggggctctggctgctggagcatctgctggctggtggggtggcccgagttccccttcaccgcccccagggagggtttcccacctcagagtacaccgaggggacctgcagagggggctgtcgggac

SEQ ID NO: 14717 - DNA, 1688 bp, Homo sapiens
ggcgcggaagcggcggtagctgcagctggcgaagttgggcgactggcggatgcaggccttgcggcacgtcgtgtgcgccctgtccggcggcgtggacagcgccgtggccgcgctgctgctgaggcggagaggttaccaggtgacaggggtgtttatgaagaactgggactcactggatgaacatggggtctgtactgccgacaaagactgtgaagatgcttacagagtttgccagatcttagacatccctttccatcaagtgtcctacgtaaaggagtattggaatgatgtgttcagtgactttttgaatgagtatgaaaaaggaaggactcccaatcctgacatagtttgcaacaagcacatcaaatttagttgcttttttcattatgctgtggataatcttggggcagatgccattgccacaggtcactatgcaagaacttccctggaagatgaagaagtctttgagcagaagcacgttaagaagcccgaagggcttttcagaaatcggtttgaagttagaaatgagaggatctcactctgtcaaccgggctggagtacagtggcccgatcttggctcgctgcagcctccacctcctgggctcaagtgatcctcccacctcagccccaccaagtagctgggaccacagccaggtttcccaggatgccctgaggagaaccatcttccctctggggggattaacgaaagagtttgtaaagaaaatcgctgctgagaatagacttcatcatgtgcttcagaagaaagagagcatgggcatgtgtttcatcgggaagaggaattttgaacatttccttcttcagtatctgcagcctcgacctggtcactttatttccatagaagacaataaggttctgggaacacataaaggttggttcctgtataccttgggccagagagcaaacataggtggcctgagagagccctggtacgtggtggagaaggacagcgtcaagggtgacgtgtttgtggccccccggacagaccacccagccctgtacagggacctgctgaggaccagccgcgtgcactggattgcggaggagcctcccgcagcactggtccgggacaagatgatggagtgccacttccgattccgccaccagatggcactagtgccctgtgtgctgaccctcaatcaagatggcaccgtgtgggtgacagctgtgcaggctgtgcgtgcccttgccacaggacagtttgctgtgttctacaagggggacgagtgcctgggcagcgggaagatcctgcggctggggccgtctgcctacacgctccagaagggccagcgcagagctgggatggccactgagagccccagtgacagcccagaagatggtccaggcctgagtcccttgctctgacagagatggatctgctagaaggaacctggagagcaggacccatggctgggcggctggtgagcagtccaggtgcccaagggccagcttgctgctgcccaaagcagaggaagccgggctggctgagggtccgaaaagcctgcaggggcccggcgagccccaggaagagcctcagctccaggctggggctctggctgctggagcatctgctggctggtggggtggcccgagttccccttcaccgcccccagggagggtttcccacctcagagtacaccgaggggacctgcagagggggctgtcgggac

SEQ ID NO: 14718 - DNA, 3228 bp, Homo sapiens
attcaggaagcgcggatctcccggccgccggcgcccagccgtcccggaggctgagcagtgcagacgggcctggggcaggcatggcggattccagcgaaggcccccgcgcggggcccggggaggtggctgagctccccggggatgagagtggcaccccaggtggggaggcttttcctctctcctccctggccaatctgtttgagggggaggatggctccctttcgccctcaccggctgatgccagtcgccctgctggcccaggcgatgggcgaccaaatctgcgcatgaagttccagggcgccttccgcaagggggtgcccaaccccatcgatctgctggagtccaccctatatgagtcctcggtggtgcctgggcccaagaaagcacccatggactcactgtttgactacggcacctatcgtcaccactccagtgacaacaagaggtggaggaagaagatcatagagaagcagccgcagagccccaaagcccctgcccctcagccgccccccatcctcaaagtcttcaaccggcctatcctctttgacatcgtgtcccggggctccactgctgacctggacgggctgctcccattcttgctgacccacaagaaacgcctaactgatgaggagtttcgagagccatctacggggaagacctgcctgcccaaggccttgctgaacctgagcaatggccgcaacgacaccatccctgtgctgctggacatcgcggagcgcaccggcaacatgagggagttcattaactcgcccttccgtgacatctactatcgaggtcagacagccctgcacatcgccattgagcgtcgctgcaaacactacgtggaacttctcgtggcccagggagctgatgtccacgcccaggcccgtgggcgcttcttccagcccaaggatgaggggggctacttctactttggggagctgcccctgtcgctggctgcctgcaccaaccagccccacattgtcaactacctgacggagaacccccacaagaaggcggacatgcggcgccaggactcgcgaggcaacacagtgctgcatgcgctggtggccattgctgacaacacccgtgagaacaccaagtttgttaccaagatgtacgacctgctgctgctcaagtgtgcccgcctcttccccgacagcaacctggaggccgtgctcaacaacgacggcctctcgcccctcatgatggctgccaagacgggcaagattgggatctttcagcacatcatccggcgggaggtgacggatgaggacacacggcacctgtcccgcaagttcaaggactgggcctatgggccagtgtattcctcgctttatgacctctcctccctggacacgtgtggggaagaggcctccgtgctggagatcctggtgtacaacagcaagattgagaaccgccacgagatgctggctgtggagcccatcaatgaactgctgcgggacaagtggcgcaagttcggggccgtctccttctacatcaacgtggtctcctacctgtgtgccatggtcatcttcactctcaccgcctactaccagccgctggagggcacaccgccgtacccttaccgcaccacggtggactacctgcggctggctggcgaggtcattacgctcttcactggggtcctgttcttcttcaccaacatcaaagacttgttcatgaagaaatgccctggagtgaattctctcttcattgatggctccttccagctgctctacttcatctactctgtcctggtgatcgtctcagcagccctctacctggcagggatcgaggcctacctggccgtgatggtctttgccctggtcctgggctggatgaatgccctttacttcacccgtgggctgaagctgacggggacctatagcatcatgatccagaagattctcttcaaggaccttttccgattcctgctcgtctacttgctcttcatgatcggctacgcttcagccctggtctccctcctgaacccgtgtgccaacatgaaggtgtgcaatgaggaccagaccaactgcacagtgcccacttacccctcgtgccgtgacagcgagaccttcagcaccttcctcctggacctgtttaagctgaccatcggcatgggcgacctggagatgctgagcagcaccaagtaccccgtggtcttcatcatcctgctggtgacctacatcatcctcacctttgtgctgctcctcaacatgctcattgccctcatgggcgagacagtgggccaggtctccaaggagagcaagcacatctggaagctgcagtgggccaccaccatcctggacattgagcgctccttccccgtattcctgaggaaggccttccgctctggggagatggtcaccgtgggcaagagctcggacggcactcctgaccgcaggtggtgcttcagggtggatgaggtgaactggtctcactggaaccagaacttgggcatcatcaacgaggacccgggcaagaatgagacctaccagtattatggcttctcgcataccgtgggccgcctccgcagggatcgctggtcctcggtggtaccccgcgtggtggaactgaacaagaactcgaacccggacgaggtggtggtgcctctggacagcatggggaacccccgctgcgatggccaccagcagggttacccccgcaagtggaggactgatgacgccccgctctagggactgcagcccagccccagcttctctgcccactcatttctagtccagccgcatttcagcagtgccttctggggtgtccccccacaccctgctttggccccagaggcgagggaccagtggaggtgccagggaggccccaggaccctgtggtcccctggctctgcctccccaccctggggtgggggctcccggccacctgtcttgctcctatggagtcacataagccaacgccagagcccctccacctcaggccccagcccctgcctctccattatttatttgctctgctctcaggaagcgacgtgacccctgccccagctggaacctggcagaggccttaggaccccgttccaagtgcactgcccggccaagccccagcctcagcctgcgcctgagctgcatgcgccaccatttttggcagcgtggcagctttgcaaggggctggggccctcggcgtggggccatgccttctgtgtgttctgtagtgtctgggatttgccggtgctcaataaatgtttattcattgacggtg

SEQ ID NO: 14719 - DNA, 3247 bp, Homo sapiens
ggggcttcctggagcccccgcccctggccgggttctgcctgactcccctttcattcccttgcaggctgagcagtgcagacgggcctggggcaggcatggcggattccagcgaaggcccccgcgcggggcccggggaggtggctgagctccccggggatgagagtggcaccccaggtggggaggcttttcctctctcctccctggccaatctgtttgagggggaggatggctccctttcgccctcaccggctgatgccagtcgccctgctggcccaggcgatgggcgaccaaatctgcgcatgaagttccagggcgccttccgcaagggggtgcccaaccccatcgatctgctggagtccaccctatatgagtcctcggtggtgcctgggcccaagaaagcacccatggactcactgtttgactacggcacctatcgtcaccactccagtgacaacaagaggtggaggaagaagatcatagagaagcagccgcagagccccaaagcccctgcccctcagccgccccccatcctcaaagtcttcaaccggcctatcctctttgacatcgtgtcccggggctccactgctgacctggacgggctgctcccattcttgctgacccacaagaaacgcctaactgatgaggagtttcgagagccatctacggggaagacctgcctgcccaaggccttgctgaacctgagcaatggccgcaacgacaccatccctgtgctgctggacatcgcggagcgcaccggcaacatgagggagttcattaactcgcccttccgtgacatctactatcgaggtcagacagccctgcacatcgccattgagcgtcgctgcaaacactacgtggaacttctcgtggcccagggagctgatgtccacgcccaggcccgtgggcgcttcttccagcccaaggatgaggggggctacttctactttggggagctgcccctgtcgctggctgcctgcaccaaccagccccacattgtcaactacctgacggagaacccccacaagaaggcggacatgcggcgccaggactcgcgaggcaacacagtgctgcatgcgctggtggccattgctgacaacacccgtgagaacaccaagtttgttaccaagatgtacgacctgctgctgctcaagtgtgcccgcctcttccccgacagcaacctggaggccgtgctcaacaacgacggcctctcgcccctcatgatggctgccaagacgggcaagattgggatctttcagcacatcatccggcgggaggtgacggatgaggacacacggcacctgtcccgcaagttcaaggactgggcctatgggccagtgtattcctcgctttatgacctctcctccctggacacgtgtggggaagaggcctccgtgctggagatcctggtgtacaacagcaagattgagaaccgccacgagatgctggctgtggagcccatcaatgaactgctgcgggacaagtggcgcaagttcggggccgtctccttctacatcaacgtggtctcctacctgtgtgccatggtcatcttcactctcaccgcctactaccagccgctggagggcacaccgccgtacccttaccgcaccacggtggactacctgcggctggctggcgaggtcattacgctcttcactggggtcctgttcttcttcaccaacatcaaagacttgttcatgaagaaatgccctggagtgaattctctcttcattgatggctccttccagctgctctacttcatctactctgtcctggtgatcgtctcagcagccctctacctggcagggatcgaggcctacctggccgtgatggtctttgccctggtcctgggctggatgaatgccctttacttcacccgtgggctgaagctgacggggacctatagcatcatgatccagaagattctcttcaaggaccttttccgattcctgctcgtctacttgctcttcatgatcggctacgcttcagccctggtctccctcctgaacccgtgtgccaacatgaaggtgtgcaatgaggaccagaccaactgcacagtgcccacttacccctcgtgccgtgacagcgagaccttcagcaccttcctcctggacctgtttaagctgaccatcggcatgggcgacctggagatgctgagcagcaccaagtaccccgtggtcttcatcatcctgctggtgacctacatcatcctcacctttgtgctgctcctcaacatgctcattgccctcatgggcgagacagtgggccaggtctccaaggagagcaagcacatctggaagctgcagtgggccaccaccatcctggacattgagcgctccttccccgtattcctgaggaaggccttccgctctggggagatggtcaccgtgggcaagagctcggacggcactcctgaccgcaggtggtgcttcagggtggatgaggtgaactggtctcactggaaccagaacttgggcatcatcaacgaggacccgggcaagaatgagacctaccagtattatggcttctcgcataccgtgggccgcctccgcagggatcgctggtcctcggtggtaccccgcgtggtggaactgaacaagaactcgaacccggacgaggtggtggtgcctctggacagcatggggaacccccgctgcgatggccaccagcagggttacccccgcaagtggaggactgatgacgccccgctctagggactgcagcccagccccagcttctctgcccactcatttctagtccagccgcatttcagcagtgccttctggggtgtccccccacaccctgctttggccccagaggcgagggaccagtggaggtgccagggaggccccaggaccctgtggtcccctggctctgcctccccaccctggggtgggggctcccggccacctgtcttgctcctatggagtcacataagccaacgccagagcccctccacctcaggccccagcccctgcctctccattatttatttgctctgctctcaggaagcgacgtgacccctgccccagctggaacctggcagaggccttaggaccccgttccaagtgcactgcccggccaagccccagcctcagcctgcgcctgagctgcatgcgccaccatttttggcagcgtggcagctttgcaaggggctggggccctcggcgtggggccatgccttctgtgtgttctgtagtgtctgggatttgccggtgctcaataaatgtttattcattgacggtggaga

SEQ ID NO: 14720 - DNA, 18035 bp, Homo sapiens
acagatgcattcatcgagccacccactgctccagcctgccccagctgttccctctgtctgtcctctctgttttgcagatggggaaactgaggcttaggtcggggatctagacaattgggatttaaacccagggactatccagccccaaagcccttcccaccacaccaggtggcctgtcctggggccagctctgcacacagggcctggtgcccccggggtgcttgggaagtggcagggcagaggtgggccctgtggctgttctggctcagcttctaaaacaagagcctctgctgggggcagaggggccgtgaacccctgaaatgttaggcagataccctgtgggagctttgttctgggatgctaagaaccgcttgaggatttaagctttgccactttggctccggagcaagggcagagggtaagtcgggactccccgggctcctgaggagggtgacgaggtgggcttttgggggaacaagggtagaaaggtcaggcctgggttatctgcggggctaagagcgggcctgtgtggggcccggggtgtgctctgcagtcccctgctgtgtgaccttggcctggtcccttagctgtctgagcctttgtgttctctcctctgtaatactggggtgcctgagggcaagcccccagggctgtcgtgaggaccgatgaccttccaggaacctggcacagccactgttggctgccatcaatgtttaaccagttgtcgttgccccaaacattttcttaacaaagagggtgaaaaaagtcaattggccatttccacatttctctagttcattctgtttgaagaatgatgggaaccagaaagcctggacacccaccttgattggtgaattgcacgcggaaggggtcccagacacaaatggcaaatggcagtcatagttcagggcggttcactttgtaagatcaaggtggggctgttttgaaatggaggtaaccagggaatggttgcctgaacaaaaagggtgtgatgcccccaggagggatgtttcacatgagctccggtgaggatggctgggattccccaggtgaaacccagataccttatatctggggaaggggctgtggaggttcctcctgccttatctggtgccaactgggcctctgccacttactccctcctccagcaaatgctctctgcaagctcacctgtgccagctctgggctgggcactggagcagtgagatgcttccaatcccagcttcgctgtagcctgaggcgtgtgaaggcaagaaggattttcccttgtggccccccggggaggagctcccacacctgacttgtgagcatctagcaaggtgtgcatggatggccgacgcttagtaaatgtatgctgtggaatggatggggtcaggggagaatgccgtagggtaggaggactggcccaggaaggacccacgagggcttggtcaaggtagtgtttaagccgcaccttaaagaataaatgcagaagtagaggaaagagtattcaggcaaagagaatggcactagcagagatatgacttttacctgttaccaggtggctacacctggggtttatagagcagagaaatagttctgtttgtctggagtttgtgacgtgactggaaagggtgagggatcagacaggcaggagctaaatcagacccagaggcccagaagtcctgcctgggagtgacacggttgtttgtctgttctagaaaggtccctgtggctgcagagtgggaaagattggaggagctcagacagagaggctggccccaaggctggggaagtcatccaagctctgagtggagagcggcagctggaaggagatgtaggagggaaggaaacacacaagactgagcctcatgtgcctggcacatagtaggtgctcagtcagtatctatggcatggttgtctgaacaaatacttttgagatggtcaaagtcctttgagttccttcctctgttcctagggggatggggtctacatgaagtgggtgtctctactccatgcaggcccttgaccctgctgtctgcctcagtttcccccatttgactttgggaaagacactccagtccgttctccaaattatagggacccaggtaacagctcctcttgttgtcacagatagggtctggggagccaagataacatttatttcatgccagtgggccctctggaatgctccacatcgcccatttggagcagaattcacctgttaaagattaattccgatctcttgagataagtggctgctgttatgaactctgggtacaaggttctgtctggctttagccaaccctgggttgcattaacaactattatgatggtggcaagcctttattgagcacttactgtgtgccaagcactgagtcaagcaccctcagcacatttggatacaaaactatttttgtctctatttttcagagggcagaatgaggtctagagggtgaaatctcttgcctgggttctctcagctgagaaggggcagagctgggacctgaatcccatttgtgtgattgcaaatccatcccttcacctgtaaggtggcccgtccccatttgtctggaccctcattggggtgcctggggtcatgggggagctactctgcagtccagagataggaacctgagttggccgggtgcagtggcccacacctgtaatcccaacactctgggaggccaaggcaggtggatcggtcgagcccgtgagtttgagaccagcctgggcaacatggtgaaactctgtctctagaaaaaatacaaaaattagccgaacgtggtagcacgcacctgtagtgccagctacttgagaggctgaggtgggaggatcgcttaagcccaggagtgagaggttgcagtgaactgcgattgtgccactgcagtccagagcaagagatcctgtctcaaaacaaacaaagagcctgaactgcagacaggcctgggcttaaactgcatccgcatgtttaagacaggcctgctattccccgctggaggagctcagggaagccacctggcctctctgggcttccatttcctcctgtgtcaaagggactctcatcccactttgcagggatgacccaaggcacgtggatggggctctgaagcacagctcttctgcctcagcccgtgtcagctccccttgtccccaggcccattccagggcatgttttcttccagcttatcccccagacatcctcagagagcccctccatgccaggtgggtgggtggaaggtattgggggcaaagctagacttgcatttgggcaaataatgatatgttttcagcaatgaaatatttatgagcattgactgagtgccaggagctgtcaactttttttactttcctgatttaatgcttaaaaactagggctggagcccagctgcccaggttcaaatcccagcttccaataagttccattattcctttggcctcagtttcctcatctggacaatggggataaggtaatgcctgccttgctgggaggttgtggacagtcttcagcacaaccttgagtgtttagtttaaaaccagcatctattgcctgttgttcacttttttttttatttattatttttagagacagggtctcagtctgttgctcaggctggaatgcagtggtgtgatcatagctcacagcagcctcgaactcctgggctcaagagatcctcctacttcagcctcccaagtagttgggacacacccagcttattaaaaaaaaaggtttttttcagacaggggtctcactatgttgcccaggttggtctggaattccagagctcaagtaaccctcctgccttggcctcccaaagtgctcagattacaggtgtgagggctgatgttcattttgatggtgtcacagcttccccactgccgggggtgggcaggggcaggaatgctgagccccattttacagctgaggaaatcgagactcagagaggaagcaatttacccagggatgcccagctggctcatggcagagctggagctggaagccagatctgagtgacactggtgtccttgggtccacgaaaagcccagtggccagcttagcttcttgcgtggaaagctacgctaggctcacccaccttggcgtctgagccaccttagcttacctcccagctccgccagttgctgctctgtgacctcagaaagtggcttaagctctctgttcctgggctttgctgaggtcagagctctgccaacttgaggagggatttgggttattctggctgctgctcttgttctggcctgggctccttcaacctcgggtgcccttgcagcccatgagctggcaccccagtggccggacaggaatgaggaagggacagggcctcactttcaatgtgactctgacttccttcccacccctagccccttcctgagcattggtttcccctttctgccccgagccctggccactgccggctgtgtgaccccaaggaggttacatcacttctctgagcatgtttcctcatcggtgagggaggatcacacgagaccacaccaggcgcacaggaagcccttgccggtctccagatgaggtcagggcattggaaaggccacagaaggaggcgggggctcaggggacagacaggcgggccattgaccaaacgggaatatccttctatttctttggttagtgagtaacagcagcccctcttgtccacccaccctgccccttgcacaaagagctcctcagtctcaccaggcgcccgttttcccctgagggtggagtggcctgggttccacccggttgaccgagtgggctggccaccttctgggaccattccctgtgtgtgtgtttgtgtacgtgtgtatgtgtgtgtatattgatgtgcgtgtgtatgtgcgtatgtgtgtctgtgtgtgtatgtgtatgtgtgtatatgtatgtctatatgtgtatgtgtatatgtgtatatatgtgtatgtgtgtatatgtatgactatatgtttatgtgtatgtttgtgtatatatgtgtgtatgtgtgtatatgtatgtctgtgtgtatgtgtgtgcatatgtgtatgtatatacatgtgtatgtgtgtatgtgaatgtctatgtgtgcatgtgtgtatgtgtgtgtatgtttgcgtgtatatgtatgtatgtgtgtatattgtgtgtatgtatgtgtatatgtgtgtaatgtgtatatgtatttgtgtgtagtgtgtgtgtgtgtgtgtgtttatggagggtgggttccatgggctttgggctgagaccccagcaggtgagggtgggacagggggcatggggttgactgacccatgggtctggctcactcctgtccctgcttggcacacaggaggggctcaggaatacctgtagatagagtgaagggatgaatgaaggaaggaatgagtgactggacaagccagccaggcagggcatcagaaggaagcacctgctcagatacaggctctggctctgagaccaagtgtgcttgagtgagtgtcctggtcttgttgagcctcaatttcttcatctataaaatgggctcacgatagttgtcctcatgagaggtgttggtcttataggccagaaaaccccacacatagcaggtgctccgtaagctgtctgttaaaaaatggatgggaggaagctaattagttagctgggcagaggttcgctttggagacctgtctgccctggagagaatgactaagcccgtctttcactcctttcctctgttcattcattcattcattcattcatccagcaaatacatcttgagcagctgctatgtgccaggacctgttccaggcatctgggcctcagcagttaccagaagggagtccctccgccctagagcttttgtccgagtgacatcattccacacgcagtgctttgaggccactttgtgagactctgatacccacaatgacaagtaatccagcagtgggaactgtgatgagctcccttttacaggtgaggaaactgaagctcggagaggtcaagtgatccgtctggggccacgcagttactaaatggcaaagtcaagattcagactccaagcctgtcaccactgtgccatcttgtcctgctgagttccaagggatatggcgttgagaaggggggtcctagggagagggcatggtagcccccaaagggatgaatgaactcaaatggatttaaaagcagatggttggaagtctagccacattcacttcctgtagcgttgtggactcagttaaatctcattctttctgatcttcagtttgttcatctgtgaaatgataacaataacaccgacctcaaatgagagagaaatgtgaaagtgcttagcatatgataggtattggataaatgtcagcccttacctcctttcccccgggactgactttatacatctgggaatggagacaataatatttaatgtctatagttattatttggattaaaatagatagaaggggccagccatggtggttcacgcctgtaatcacaacactttgggaggccaaggtgtgtggatcacgtgagcccgggcattggagactaacctgggcagtagagtgagactccatctctacaaaaaataaattttaaaagtaggaatggtggtacatgcctgtggtcccagcttctggggaggctgaggtgggaggattgcttgagcctgggaggtcgaggctgcagtgagctatgattgtgccactgcactccagcctgggtgacaaagccataccctgtctcaaaacaaaaaacaaccaaatgggaggtgctgtgtgaagtgtgccatggagggtaggcattactgatggtacattgcaggcattagcctcagtcataattccaagcagttaacccctgaggcagcagcttactgttggcacagactggtgttgaggtgggctgggacagaggaaggatctcaaactggttttctgctgccttgggctcccttccccgactcctgccccatccactcataacgggcacctgccctcttccccctcctctgatttggcaaactcgggacttttgctcctagaagtggggtagaggaacgtatgcatggacgagtgtcctgtcccttctggtccttagtctcccagctgggaggcagcccttgtcctgacagccttctaaaggtgacagaagatggaaatgaggtggcgaggaaaccctttccaaaggtgaggtctctgcagtcacgagccctggttttggagccgggaagtctgggttccagtgcctgcccagttctgacctccctggacctcaatgtcatcatcccccacctcccactgcaaactgagggaatgttagcaagaatggcaaagcagccattgaacatccttatctgtaaaatgggggtaataattgctacgacctgggtggggttaagctgtatttgctccatagttatttggtatacagtacattcatgctttaaactaaaaaataagttcaagttcattgaacacttggtgtttgttgggcactgcactgaaggcttgaattatcacatttaatcctcacaatagctctttggggtaggagctgttattttattttttaatattttaaaaaataaataaatttatttattttttgtagagatgggatctcaccattttgcccaggctggtctcgaactcctgggctcaagcgatcctcccaccttggcctcccaaagtgttgggattacaggtgtgagccactgcacccagccttattttttagtttaaagcatgaatgtgctatacaccaaataactatggagcaaatacggcttaaccccacccaggtcgtagtaattattactcccattttacagataaggaaaccaaggcccagagatgagatgtgacttgtgcaagaccatacagccagtgagtggcagatgagatgtaaagcattgatcaggcaacgttctcagactatagaatcctctctggagttctccgtggctgtgaccatcctctaggagaggggctaggccagagagaaggcgggcctaaggttttgttttgttgagatggagtctcgctcttgtcgcccccgctggagtgcagtggtgctatctctgctcactgcaatctctgcctcctgggttcaagagattctcatgcctcagcctcccgagtagctgggattacaggtgcatgctaccacacccggctaatttttgtatttttggtagagatggggtttcaccatgttggccagtctggtcttgaacttctgacctcaagtgatccgcccacctcggtctcccaaagtgctgggattacaggcgtgagccactgcgcccggccggactaagaatttgatgcctccctcctcctgggctggagctgagtagcatgttctcaagcagggctggctgagagggtggaatcctggggctatgctctgatgggaaggaagcgagataagggaagaaggacctggagcctcctggggtagtgactttgtatccttgagctcctactacgtgccagaccttgtttgaaaccctttatgtggctgggcacggtggccgacgcctgtaatcccagcattttgagaggccgaggcggtcggatcacctgaggtcaggagttcgagaccagcctggccaacatggtgaaaccccgtctctactaaaaatacaaaaattagctggcgcagcggtgggcacctgtaatcccagctacttgggaggctgaggcaggaggattgcttgaacctgggagacggaggttgcagtgagccaagattgtgccacttatactctagcctgggtgacagagcaagatcctgtctctctctgtcacacacacatgcgcacacacacacacacacacaagaaagaaaaaaaagaaaccctttatgtgtgcttaatctccatgacattcccatgttgcaacaaggaaactgaggttctgggagggaagtgacctgcctgaggtcactaagcctggaagggtcatttagatgtaattcacatactcataactcagtcttttaaaacgtacaattcagttggtttcttagtgtattcagagttgtacagacatcagcactatctcattccagaacattttcatcaccccaaaaaaggactctgtacccattagcagtcaccactccccactcccagcccctggcaacaactaatctgctttctgtctctgtggatttgcctgttctgggcatttcatataaatggaatcctgcaatatgtggccttttgtgtctacaaggtgcatgctcttaaccattaagccacaccgcttcttggtggctcctacccaggggccgggacccttggaaatgacttggtccctgtgaaagctcagaggggcatctgtgtgtgctgtcagccggcctccctccagccaagggcttgcagaatgaccaaatgactgccgtggccacgctggccttgccctccgtggggcgcggtgagtcaccccagacctgccctgcctgggtggtgtgagtgcatggggtgggggcccagcaggacactggggctctgtctgtcctggacaggcggccactgtgcagcaaacaggaagcgggctgggccgagacctgctaggtaaatacaggctggccagggaaggtgctgggcatggcatgatgcccccctactgctgccgcctgccaagtgcctgggagccgtggggtagcctggcaggcagtaggtttcgcctggccaaggagttgagctcccagccggctgttcccagcagccgccacttcgaggtggctgccagagtctacctccaaggctctggatctggccgctctgccttctctaggagtcattgccttccttggtcctcagtccttttgttcatctgttcccctaatgatactaataaatagtacactgatactgatgattccaacagcagccatgcttgactgaatgcatgctctgtaccaggcactgggctcagtgttttgcatgctttatctcatgtaaccctcacgacagttcccttggggtaggtgctaggatcattgccatttttcaggtgaggaaaccgaggcatgggcaggccaggtgacttgcccagagctggtgaactggtggttcgtcagggactgcgacccatcccccactccattctttctccagcttctccctcccagagttcccttgtctttgtaaagtgtccatcaaaggcgcaggtcccggggatgcatgggttctaatcctgcctccccctttctggagcaaggcaatgccagacaaatgacttcgcctctctgagcctcagttttcttacctggaaggtggggagggggtggacaggtctgggattttctctctagtaacagcaaagctcagagtccttgtcttcctagtaccttcctatccacatgtccccggcaagactgatttggaatggcaggcactcacagttgtgtttatttgagggtaccacaggaagtgggggcccccaaattggctaaggagccccagggtggagggaggtagaagcacactgggtctgtctgggagcctgagcaccttctctgtgggctccttcctacccatggattccaacccccacccacctccccactgcccacccactcacccatctcttctgctttccttctccctgtgccccaggccacaccattcctctgtgcaccctgcactttcccctctacacctttgtccttgacacctcctctgccctttatcttcctcctcctcctcctcacagcctttccccctccccatcaggattctggctgcccttgctctgcaaccctgcctggaacttcaggtccctgatcttacagcctaaaaaaaccaaatattcattgacacctcattttgcttcagcaccatgctgaatgctggggacacaggggacacgaaatagtccctaccacatggaactaaaactctggaggtgaagagagaagatgaatcaaagaataatatataggccgggtgcggtggctcacacctataatcccaacattttgggaggctgaggcaggtggatcatctgaggtcaggggttcaagaccagactgaccaacatggcaaaaccctgcctctactaaaaatacgaaaaattagccgggtgttgtggtgcatgcctgtaatcccagctactcgaggaggctgaggcacgagaattgcttgaacccaggaggcggaggttgcagtgagctgagatcatgccactgcactccaacctgggggacagagcgagactctcttgaaaaaaaaaatacatatatagaaaagtttaatcgtgggaagtgctgtaaaggaaggcacatgttactctaagagtaaagagcaggggaaacaggagggcttttcagaggaagtgccctttaacatgaggcctgaggagtaagtgggagccagccagcgaagggaagggcattccaggcggagggaacagcctaggcaaaggcctggaggcagagagagccatcagccttccctcctggactgcgagttctctgaggttccacacttttatgtctcccctgtgccctgcaaacaggtgccactgcattgatgcctggtggaatgaattgattccagaagggagggaaccgggagaaaccagctccctggattcctccccgctggggcggagcaggtttgcatgcccaaacttgcccccagatttaagcagctttccttggtcacgtaatcaggaggatgggatttgacaaatgtttgccagggtttccatgagatcaggcaaagccgcgggtaaccccgaggatgggcccctttttccaccctccgcaagttggggcatggggacggagccagagacctccaccgcctttgaatccgggattctcagagagaagccatctgttgtgcaatctgctgtttattgaggctttctttatgccaggcacttgactcaaggtatatacctctcacaacgaccctattacgatcccttaatagggcagctgagggccgggcgtagtggctcacgcctataatcccagcactttgggaggctgaggcaggcggatcacgaggtcaggagatcgagaccatcctggctaacaccatgaaaccccgtctgtactaaaaaaatacaaaaaattagccgggcgtggtggcgggtgcctgtagtcccagctactcaggaggctgagcagaagaatggcgtgaacccgggaggcggagcttgcagtgagtggagatgcgccactgcactccagcctaggcgacagagggagactccgtctcaaaaaaaaaaaaaaaaaaaaaaaaatagggcagctgaagaaagtgaagatcagagaggttgggtaacttgctcatactcacccagcaagtgagctgtgggtctgggatctgaccctctggtctgcctgacgtcaaaatgtgccccaccggctcagggggccatgagagcagaaagccaggtttctggaaagcctggggtctctgtctagggcagaaaggaaggtctggggaccctggctcagccctgtatctcatcaccctactcaggactcctgcaccccttaacttgcccactcctgagcccttctggtctatgcagttcttaacaccatccgacatgactctgctgcttgatttgtctagtttattgtttccccaccagaaggtctgcccccaaagggattgatatctgttctgttcacatctgtgtccctagtctagcacagtgcctggcacatagtaggtgctcaataaatgtgtggaataaataggtagctggcttctactgctgccccttgggccctttccagaggaagatgcagattctttgtccatcctacacaactgccatctctgtgtggaccaccattcagtatatatattctaaagaagagtttgaatataaacctgcttttgaatatataggatttaaaaccaacatattcaaaaaccgctactttggctgggcgcagtggctcatgcctgtaattccagcactttgggaggccgaggcgggtagatcatttgaggtcaggagttcaagaccagcctggccaacatgtgaaaccccgtctgtactaaaaatacaaaaattagctgagtggtagtggcatgtttctgtaatcccagctacttgggaggctgaggcaggagaattgcttgagcctgggaggaggaggttgcagtgagctgagattgtgccactgcactgcagtctgggtgagagagtgagaccctgtctcaacaaacaaacacccgctgctctgaatgaacgctgttgtgaagatgtcagtgtgtgaggatgttcacagtcgtgcaggaacgttcttgggtgcctccctgatgcacacctggtgcagctgggagcttccccactgtggaggggctcctggtaggaggcattgtgagcccgtgcgggaacgaagggcccaccatgcctgctcacagtgggcacacacacatgcacacgcccatggaggaaggtgggaagaaatgtacatgacagtcacacgcagaggagacacatgtggactcacacccaggctctcagcctctctccctgcctgcatccccgacttccctccctcctaaaactggcatgagtttggaatgtgtaataacagcctttagggcaaattagaacagggagtaaactctttctctgaccacagagaacaggacagtgtttggggagggaattgccacagagcagcagagccgggtgtgtgtgtgtgtgtgtacacatgcctatgtgtatgtgtacacgtgagctagtgtgtacacactcctgagtgctgtgatgtggaaggagcccagggctaggagtctagaggttttcttcaaagccatttgctccctagctggcctctcagagcctccgtttccttagctgtaaagtgggagcaatagcctagctttgttcaggttcttcgggggattgaatgagagaggggcttggtggattttagcatgggctataaaatgtcaggctgtagtgctggcacgtgtgtgcatgtgtgttttggggaaggggagtaaggaggacaggtaaatcaggaccatatcatagtggtgatgatgataattaaatgtgacaagatccaacatttatcaaatatttcttaggtgcccaagaaacacttgacctgccttatctcccagaagccctacaagggaggtgctattattgcaatccccattttacaagtagagaaaccgaggctcagagagatgagaatgggcggcagtaatcatcccttcctcctgggggtggttgtgaagcttgaaggagacactgtaagcgctcgggtggtaccctggtactccatcactaacctgctgtgtgacctcaggtaagtcgcttagcctctctgagcctcagtttcctcatctgtaaaatgggaatgattgcaatacctacctccagggcagattttctcaacctcagcgctgttgatgttgttgactgggttattctgtgtggtgcggggctgtcttttgttttggaggatgtttactaccatccggcatggcggatcccagcaaaggcccctgtgcaggcctggtgaggtggccgagcttcctggtggggaggccttccccctctcctccctggtcaatctatttgagggtgaggatggctccccttcaccctcacctggcacccaggacatccccagtccatggagggattcaatctgggctctgcagccagctgcccgcatttcagtcctggctctgtcactaacctgctgtgtgacctcaggcaagtcacttagcctctctgagcctcagtttcctcatctgtagaatgggaacgatcgcagtacctacttccagggcagatgttctcagtctcgacgctattgacattgtgggctgggtcatttttttgtggtgtggggctgtcttttgctttggaggatgtttagtgccatccctggccttgatctaccagatgccagtagtgctccctctcctgtacagttgtgacaacaaaacatgtcatcagatattgccaaatgtccttagaggaggagcagaactgtccttggttgagaaccactggtctggagtcatgatgagggctggatgaggccctgtgctgggcacagcctgagctacgtcatcaggcgaggatggtgatttagttcataattattatttcatcctaattagaatgctaatcatgatcgcggcgtgacttgccgaaggccacacagcagccatacaggttgacagttgctgggagaggatttgaacctgggattggctggcaccagagcccccattttggagtccccaggaacctggggtgctgtccaggcttaggggagggctatcctcctgaggggaggagggtgcaggcatggtgggggatggaaggaccttcttggctgccttctctggccttgggagctccctgggatggggttccattagcccctgaggtgccatggtgaggggtgcagtggatagaagggtactggaaacacagagggtgcgcctgatgcctcgtctccccctgacctcagggcccccagtgaggtggacagggccatgcccaggagagtctaatccacctcccgccaatgcctgtgcccctgcagatgcccctcctgcctcagcaaccccctggcccccattcctgcagagcaaagcccaaatgcatgtggcagccatgagggactagggatccagatccccctctcctgtctggccagtcgaaaggacttcgtgtctccagaggtcctactaggtgctggaactgagtaggtgcctcacatgctggaggaccctaggaggaggcgtggtcactccagtcttacaggtgggaaaaccacggggcagacagaggaagtgatttgcccatggtcaaacggctaatgaccagggccaagagaggaactgggtctcatttcagaacctggcctcctaacttctctttcttcgtttggttataataactgaaagtcccactctatttacagatgaggaaactgaggctcagagaggctaagcaacttacctgaggtatttatttttagatagagtcttgctctgttgccctggctggagtgcagtggcgccatcttggctcactgcaacctctgcctcctgggttcaagtgattctcctgcctcagcctcctaagtagctgggactacagtcacgtgccaccacgcctggctaatttttgtattttttatagagacggggttttgccatgttagccaggctggtctcgaactcctgacttcaagtgatccacccgcctcggcctcccaaagtgctggggttacaggcgtgagctgctgcactgagccaaaaccccactttaatcccagaagtggcactggatatatctgacctcacttcccactgcctgcaaccctatgaagaagtgactacaattgtacccattttgcagaggaggaaactgaggcttggggagctcaagtaacttacctaagatcacactacatgtaaatagcagagctgggattagaacccaggcctgaatgactccaaaggccaggctgtctctcccttttggtgtccaaagggaagcccacccccagtgggagctctgaccctctgtgtcctgctgcgcccactaagggaggcctcttgctgtgtccccacctctctggtccaagtcttccctcctggaagccacagaacaaacaaggtgggaactagtttatttgtttttctacgtgcgtattgggtgggaagggtgagatgtacaagagagggcttttcagacatgcccctgcctcccgggtggggtggtaagagttccaggaaactcacccttggtgcccagccctgcctggctggcaccatgctacagagagcagggcactgacagccaaccagtggggccttgcccctcccttgccctggctcctggctaagcactggacccgggagccagagagacatggttcaagtccagctcttcttcctgcaagctgtttgctgcctttgaaagctgcttcctcatctgagaaatgggaacaaatgacatctttgtcataaagtttttcatttgtgtgaggactcagggatggacaagacagatacatttcctgcctcctggcacccacagcctgggaacgaaccatcccgtgaacagctgggataaagcttctgaggagaggagcatggatcctgggagcgagtgtgtgcaggccagggagggctttccagaggagcccagttgagctggaacaccagtggggaggagttgaccagcaaaggtgcagggagggatcagcactttgcactggggagcagagtttgtgcactggggaagtcaactcaagtattggagcctcagtttcctgttctgtaaaatgggttcatcatgacagtgtttgatgaggaaaaggactgccggcctacacagcaagtccacatggattttctgagcccctcctgtgcctgaagcccacggttaatggttctgccttagcaggtgcttaccacgtgccaggcactgcactgcactggccactggactgcatgttctgtccatgaggcttggatatccccatcttacagatcaggaagctgaggctatgaaatgtcgacttgctcaatgtcatggaatgactaagtgtggagcctggatttgaacttggctctctggggctccaaagctggctttcttggtcagcagtagggtctgggatccaagtatggggtcccagcttgaccctgaagtccaccctctttcagctaatgcccagggtagttggacctggggccaatttgtgtttccaggttcgtgaaagaggctcctgttgcagttcccgcctgaggctggcggccaaccacatctgggagtggcctccctgtgcccctgtcattacaacggtggctttgaagcagctggcagcactgctgcttgtccacgtgggagggggcttcctggagcccccgcccctggccgggttctgcctgactcccctttcattcccttgcaggctgagcagtgcagacgggcctggggcaggcatggcggattccagcgaaggcccccgcgcggggcccggggaggtggctgagctccccggggatgagagtggcaccccaggtggggaggcttttcct

SEQ ID NO: 14721 - DNA, 545 bp, Homo sapiens
acagatgcattcatcgagccacccactgctccagcctgccccagctgttccctctgtctgtcctctctgttttgcagatggggaaactgaggcttaggtcggggatctagacaattgggatttaaacccagggactatccagccccaaagcccttcccaccacaccaggtggcctgtcctggggccagctctgcacacagggcctggtgcccccggggtgcttgggaagtggcagggcagaggtgggccctgtggctgttctggctcagcttctaaaacaagagcctctgctgggggcagaggggccgtgaacccctgaaatgttaggcagataccctgtgggagctttgttctgggatgctaagaaccgcttgaggatttaagctttgccactttggctccggagcaagggcagagggctgagcagtgcagacgggcctggggcaggcatggcggattccagcgaaggcccccgcgcggggcccggggaggtggctgagctccccggggatgagagtggcaccccaggtggggaggcttttcct

SEQ ID NO: 14722 - DNA, 2514 bp, Homo sapiens
atggcggattccagcgaaggcccccgcgcggggcccggggaggtggctgagctccccggggatgagagtggcaccccaggcgatgggcgaccaaatctgcgcatgaagttccagggcgccttccgcaagggggtgcccaaccccatcgatctgctggagtccaccctatatgagtcctcggtggtgcctgggcccaagaaagcacccatggactcactgtttgactacggcacctatcgtcaccactccagtgacaacaagaggtggaggaagaagatcatagagaagcagccgcagagccccaaagcccctgcccctcagccgccccccatcctcaaagtcttcaaccggcctatcctctttgacatcgtgtcccggggctccactgctgacctggacgggctgctcccattcttgctgacccacaagaaacgcctaactgatgaggagtttcgagagccatctacggggaagacctgcctgcccaaggccttgctgaacctgagcaatggccgcaacgacaccatccctgtgctgctggacatcgcggagcgcaccggcaacatgagggagttcattaactcgcccttccgtgacatctactatcgaggtcagacagccctgcacatcgccattgagcgtcgctgcaaacactacgtggaacttctcgtggcccagggagctgatgtccacgcccaggcccgtgggcgcttcttccagcccaaggatgaggggggctacttctactttggggagctgcccctgtcgctggctgcctgcaccaaccagccccacattgtcaactacctgacggagaacccccacaagaaggcggacatgcggcgccaggactcgcgaggcaacacagtgctgcatgcgctggtggccattgctgacaacacccgtgagaacaccaagtttgttaccaagatgtacgacctgctgctgctcaagtgtgcccgcctcttccccgacagcaacctggaggccgtgctcaacaacgacggcctctcgcccctcatgatggctgccaagacgggcaagattgggatctttcagcacatcatccggcgggaggtgacggatgaggacacacggcacctgtcccgcaagttcaaggactgggcctatgggccagtgtattcctcgctttatgacctctcctccctggacacgtgtggggaagaggcctccgtgctggagatcctggtgtacaacagcaagattgagaaccgccacgagatgctggctgtggagcccatcaatgaactgctgcgggacaagtggcgcaagttcggggccgtctccttctacatcaacgtggtctcctacctgtgtgccatggtcatcttcactctcaccgcctactaccagccgctggagggcacaccgccgtacccttaccgcaccacggtggactacctgcggctggctggcgaggtcattacgctcttcactggggtcctgttcttcttcaccaacatcaaagacttgttcatgaagaaatgccctggagtgaattctctcttcattgatggctccttccagctgctctacttcatctactctgtcctggtgatcgtctcagcagccctctacctggcagggatcgaggcctacctggccgtgatggtctttgccctggtcctgggctggatgaatgccctttacttcacccgtgggctgaagctgacggggacctatagcatcatgatccagaagattctcttcaaggaccttttccgattcctgctcgtctacttgctcttcatgatcggctacgcttcagccctggtctccctcctgaacccgtgtgccaacatgaaggtgtgcaatgaggaccagaccaactgcacagtgcccacttacccctcgtgccgtgacagcgagaccttcagcaccttcctcctggacctgtttaagctgaccatcggcatgggcgacctggagatgctgagcagcaccaagtaccccgtggtcttcatcatcctgctggtgacctacatcatcctcacctttgtgctgctcctcaacatgctcattgccctcatgggcgagacagtgggccaggtctccaaggagagcaagcacatctggaagctgcagtgggccaccaccatcctggacattgagcgctccttccccgtattcctgaggaaggccttccgctctggggagatggtcaccgtgggcaagagctcggacggcactcctgaccgcaggtggtgcttcagggtggatgaggtgaactggtctcactggaaccagaacttgggcatcatcaacgaggacccgggcaagaatgagacctaccagtattatggcttctcgcataccgtgggccgcctccgcagggatcgctggtcctcggtggtaccccgcgtggtggaactgaacaagaactcgaacccggacgaggtggtggtgcctctggacagcatggggaacccccgctgcgatggccaccagcagggttacccccgcaagtggaggactgatgacgccccgctctag

SEQ ID NO: 14723 - DNA, 2436 bp, Homo sapiens
atggcggattccagcgaaggcccccgcgcggggcccggggaggtggctgagctccccggggatgagagtggcaccccaggtggggaggcttttcctctctcctccctggccaatctgtttgagggggaggatggctccctttcgccctcaccggctgatgccagtcgccctgctggcccaggcgatgggcgaccaaatctgcgcatgaagttccagggcgccttccgcaagggggtgcccaaccccatcgatctgctggagtccaccctatatgagtcctcggtggtgcctgggcccaagaaagcacccatggactcactgtttgactacggcacctatcgtcaccactccagtgacaacaagaggtggaggaagaagatcatagagaagcagccgcagagccccaaagcccctgcccctcagccgccccccatcctcaaagtcttcaaccggcctatcctctttgacatcgtgtcccggggctccactgctgacctggacgggctgctcccattcttgctgacccacaagaaacgcctaactgatgaggagtttcgagagccatctacggggaagacctgcctgcccaaggccttgctgaacctgagcaatggccgcaacgacaccatccctgtgctgctggacatcgcggagcgcaccggcaacatgagggagttcattaactcgcccttccgtgacatctactatcgaggtcagacagccctgcacatcgccattgagcgtcgctgcaaacactacgtggaacttctcgtggcccagggagctgatgtccacgcccaggcccgtgggcgcttcttccagcccaaggatgaggggggctacttctactttggggagctgcccctgtcgctggctgcctgcaccaaccagccccacattgtcaactacctgacggagaacccccacaagaaggcggacatgcggcgccaggactcgcgaggcaacacagtgctgcatgcgctggtggccattgctgacaacacccgtgagaacaccaagtttgttaccaagatgtacgacctgctgctgctcaagtgtgcccgcctcttccccgacagcaacctggaggccgtgctcaacaacgacggcctctcgcccctcatgatggctgccaagacgggcaagattgggaaccgccacgagatgctggctgtggagcccatcaatgaactgctgcgggacaagtggcgcaagttcggggccgtctccttctacatcaacgtggtctcctacctgtgtgccatggtcatcttcactctcaccgcctactaccagccgctggagggcacaccgccgtacccttaccgcaccacggtggactacctgcggctggctggcgaggtcattacgctcttcactggggtcctgttcttcttcaccaacatcaaagacttgttcatgaagaaatgccctggagtgaattctctcttcattgatggctccttccagctgctctacttcatctactctgtcctggtgatcgtctcagcagccctctacctggcagggatcgaggcctacctggccgtgatggtctttgccctggtcctgggctggatgaatgccctttacttcacccgtgggctgaagctgacggggacctatagcatcatgatccagaagattctcttcaaggaccttttccgattcctgctcgtctacttgctcttcatgatcggctacgcttcagccctggtctccctcctgaacccgtgtgccaacatgaaggtgtgcaatgaggaccagaccaactgcacagtgcccacttacccctcgtgccgtgacagcgagaccttcagcaccttcctcctggacctgtttaagctgaccatcggcatgggcgacctggagatgctgagcagcaccaagtaccccgtggtcttcatcatcctgctggtgacctacatcatcctcacctttgtgctgctcctcaacatgctcattgccctcatgggcgagacagtgggccaggtctccaaggagagcaagcacatctggaagctgcagtgggccaccaccatcctggacattgagcgctccttccccgtattcctgaggaaggccttccgctctggggagatggtcaccgtgggcaagagctcggacggcactcctgaccgcaggtggtgcttcagggtggatgaggtgaactggtctcactggaaccagaacttgggcatcatcaacgaggacccgggcaagaatgagacctaccagtattatggcttctcgcataccgtgggccgcctccgcagggatcgctggtcctcggtggtaccccgcgtggtggaactgaacaagaactcgaacccggacgaggtggtggtgcctctggacagcatggggaacccccgctgcgatggccaccagcagggttacccccgcaagtggaggactgatgacgccccgctctag

SEQ ID NO: 14724 - DNA, 2804 bp, Homo sapiens
gggattcaggaagcgcggatctcccggccgccggcgcccagccgtcccggaggctgagcagtgcagacgggcctggggcaggcatggcggattccagcgaaggcccccgcgcggggcccggggaggtggctgagctccccggggatgagagtggcaccccaggtggggaggcttttcctctctcctccctggccaatctgtttgagggggaggatggctccctttcgccctcaccggctgatgccagtcgccctgctggcccaggcgatgggcgaccaaatctgcgcatgaagttccagggcgccttccgcaagggggtgcccaaccccatcgatctgctggagtccaccctatatgagtcctcggtggtgcctgggcccaagaaagcacccatggactcactgtttgactacggcacctatcgtcaccactccagtgacaacaagaggtggaggaagaagatcatagagaagcagccgcagagccccaaagcccctgcccctcagccgccccccatcctcaaagtcttcaaccggcctatcctctttgacatcgtgtcccggggctccactgctgacctggacgggctgctcccattcttgctgacccacaagaaacgcctaactgatgaggagtttcgagagccatctacggggaagacctgcctgcccaaggccttgctgaacctgagcaatggccgcaacgacaccatccctgtgctgctggacatcgcggagcgcaccggcaacatgagggagttcattaactcgcccttccgtgacatctactatcgaggtcagacagccctgcacatcgccattgagcgtcgctgcaaacactacgtggaacttctcgtggcccagggagctgatgtccacgcccaggcccgtgggcgcttcttccagcccaaggatgaggggggctacttctactttggggagctgcccctgtcgctggctgcctgcaccaaccagccccacattgtcaactacctgacggagaacccccacaagaaggcggacatgcggcgccaggactcgcgaggcaacacagtgctgcatgcgctggtggccattgctgacaacacccgtgagaacaccaagtttgttaccaagatgtacgacctgctgctgctcaagtgtgcccgcctcttccccgacagcaacctggaggccgtgctcaacaacgacggcctctcgcccctcatgatggctgccaagacgggcaagattgggatctttcagcacatcatccggcgggaggtgacggatgaggacacacggcacctgtcccgcaagttcaaggactgggcctatgggccagtgtattcctcgctttatgacctctcctccctggacacgtgtggggaagaggcctccgtgctggagatcctggtgtacaacagcaagattgagaaccgccacgagatgctggctgtggagcccatcaatgaactgctgcgggacaagtggcgcaagttcggggccgtctccttctacatcaacgtggtctcctacctgtgtgccatggtcatcttcactctcaccgcctactaccagccgctggagggcacaccgccgtacccttaccgcaccacggtggactacctgcggctggctggcgaggtcattacgctcttcactggggtcctgttcttcttcaccaacatcaaagacttgttcatgaagaaatgccctggagtgaattctctcttcattgatggctccttccagctgctctagtgagtagaggtccctgggccggcagcttctgggtgaggaagcttcatctactctgtcctggtgatcgtctcagcagccctctacctggcagggatcgaggcctacctggccgtgatggtctttgccctggtcctgggctggatgaatgccctttacttcacccgtgggctgaagctgacggggacctatagcatcatgatccagaagattctcttcaaggaccttttccgattcctgctcgtctacttgctcttcatgatcggctacgcttcagccctggtctccctcctgaacccgtgtgccaacatgaaggtgtgcaatgaggaccagaccaactgcacagtgcccacttacccctcgtgccgtgacagcgagaccttcagcaccttcctcctggacctgtttaagctgaccatcggcatgggcgacctggagatgctgagcagcaccaagtaccccgtggtcttcatcatcctgctggtgacctacatcatcctcacctttgtgctgctcctcaacatgctcattgccctcatgggcgagacagtgggccaggtctccaaggagagcaagcacatctggaagctgcagtgggccaccaccatcctggacattgagcgctccttccccgtattcctgaggaaggccttccgctctggggagatggtcaccgtgggcaagagctcggacggcactcctgaccgcaggtggtgcttcagggtggatgaggtgaactggtctcactggaaccagaacttgggcatcatcaacgaggacccgggcaagaatgagacctaccagtattatggcttctcgcataccgtgggccgcctccgcagggatcgctggtcctcggtggtaccccgcgtggtggaactgaacaagaactcgaacccggacgaggtggtggtgcctctggacagcatggggaacccccgctgcgatggccaccagcagggttacccccgcaagtggaggactgatgacgccccgctctagggactgcagcccagccccagcttctctgcccactcatttctagtccagccgcatttcagcagt

SEQ ID NO: 14725 - DNA, 2475 bp, Homo sapiens
atggcggattccagcgaaggcccccgcgcggggcccggggaggtggctgagctccccggggatgagagtggcaccccaggtggggaggcttttcctctctcctccctggccaatctgtttgagggggaggatggctccctttcgccctcaccggctgatgccagtcgccctgctggcccaggcgatgggcgaccaaatctgcgcatgaagttccagggcgccttccgcaagggggtgcccaaccccatcgatctgctggagtccaccctatatgagtcctcggtggtgcctgggcccaagaaagcacccatggactcactgtttgactacggcacctatcgtcaccactccagtgacaacaagaggtggaggaagaagatcatagagaagcagccgcagagccccaaagcccctgcccctcagccgccccccatcctcaaagtcttcaaccggcctatcctctttgacatcgtgtcccggggctccactgctgacctggacgggctgctcccattcttgctgacccacaagaaacgcctaactgatgaggagtttcgagagccatctacggggaagacctgcctgcccaaggccttgctgaacctgagcaatggccgcaacgacaccatccctgtgctgctggacatcgcggagcgcaccggcaacatgagggagttcattaactcgcccttccgtgacatctactatcgaggggagctgcccctgtcgctggctgcctgcaccaaccagccccacattgtcaactacctgacggagaacccccacaagaaggcggacatgcggcgccaggactcgcgaggcaacacagtgctgcatgcgctggtggccattgctgacaacacccgtgagaacaccaagtttgttaccaagatgtacgacctgctgctgctcaagtgtgcccgcctcttccccgacagcaacctggaggccgtgctcaacaacgacggcctctcgcccctcatgatggctgccaagacgggcaagattgggatctttcagcacatcatccggcgggaggtgacggatgaggacacacggcacctgtcccgcaagttcaaggactgggcctatgggccagtgtattcctcgctttatgacctctcctccctggacacgtgtggggaagaggcctccgtgctggagatcctggtgtacaacagcaagattgagaaccgccacgagatgctggctgtggagcccatcaatgaactgctgcgggacaagtggcgcaagttcggggccgtctccttctacatcaacgtggtctcctacctgtgtgccatggtcatcttcactctcaccgcctactaccagccgctggagggcacaccgccgtacccttaccgcaccacggtggactacctgcggctggctggcgaggtcattacgctcttcactggggtcctgttcttcttcaccaacatcaaagacttgttcatgaagaaatgccctggagtgaattctctcttcattgatggctccttccagctgctctacttcatctactctgtcctggtgatcgtctcagcagccctctacctggcagggatcgaggcctacctggccgtgatggtctttgccctggtcctgggctggatgaatgccctttacttcacccgtgggctgaagctgacggggacctatagcatcatgatccagaagattctcttcaaggaccttttccgattcctgctcgtctacttgctcttcatgatcggctacgcttcagccctggtctccctcctgaacccgtgtgccaacatgaaggtgtgcaatgaggaccagaccaactgcacagtgcccacttacccctcgtgccgtgacagcgagaccttcagcaccttcctcctggacctgtttaagctgaccatcggcatgggcgacctggagatgctgagcagcaccaagtaccccgtggtcttcatcatcctgctggtgacctacatcatcctcacctttgtgctgctcctcaacatgctcattgccctcatgggcgagacagtgggccaggtctccaaggagagcaagcacatctggaagctgcagtgggccaccaccatcctggacattgagcgctccttccccgtattcctgaggaaggccttccgctctggggagatggtcaccgtgggcaagagctcggacggcactcctgaccgcaggtggtgcttcagggtggatgaggtgaactggtctcactggaaccagaacttgggcatcatcaacgaggacccgggcaagaatgagacctaccagtattatggcttctcgcataccgtgggccgcctccgcagggatcgctggtcctcggtggtaccccgcgtggtggaactgaacaagaactcgaacccggacgaggtggtggtgcctctggacagcatggggaacccccgctgcgatggccaccagcagggttacccccgcaagtggaggactgatgacgccccgctctag

SEQ ID NO: 14726 - DNA, 2295 bp, Homo sapiens
atggcggattccagcgaaggcccccgcgcggggcccggggaggtggctgagctccccggggatgagagtggcaccccaggtggggaggcttttcctctctcctccctggccaatctgtttgagggggaggatggctccctttcgccctcaccggctgatgccagtcgccctgctggcccaggcgatgggcgaccaaatctgcgcatgaagttccagggcgccttccgcaagggggtgcccaaccccatcgatctgctggagtccaccctatatgagtcctcggtggtgcctgggcccaagaaagcacccatggactcactgtttgactacggcacctatcgtcaccactccagtgacaacaagaggtggaggaagaagatcatagagaagcagccgcagagccccaaagcccctgcccctcagccgccccccatcctcaaagtcttcaaccggcctatcctctttgacatcgtgtcccggggctccactgctgacctggacgggctgctcccattcttgctgacccacaagaaacgcctaactgatgaggagtttcgagagccatctacggggaagacctgcctgcccaaggccttgctgaacctgagcaatggccgcaacgacaccatccctgtgctgctggacatcgcggagcgcaccggcaacatgagggagttcattaactcgcccttccgtgacatctactatcgaggggagctgcccctgtcgctggctgcctgcaccaaccagccccacattgtcaactacctgacggagaacccccacaagaaggcggacatgcggcgccaggactcgcgaggcaacacagtgctgcatgcgctggtggccattgctgacaacacccgtgagaacaccaagtttgttaccaagatgtacgacctgctgctgctcaagtgtgcccgcctcttccccgacagcaacctggaggccgtgctcaacaacgacggcctctcgcccctcatgatggctgccaagacgggcaagattgggaaccgccacgagatgctggctgtggagcccatcaatgaactgctgcgggacaagtggcgcaagttcggggccgtctccttctacatcaacgtggtctcctacctgtgtgccatggtcatcttcactctcaccgcctactaccagccgctggagggcacaccgccgtacccttaccgcaccacggtggactacctgcggctggctggcgaggtcattacgctcttcactggggtcctgttcttcttcaccaacatcaaagacttgttcatgaagaaatgccctggagtgaattctctcttcattgatggctccttccagctgctctacttcatctactctgtcctggtgatcgtctcagcagccctctacctggcagggatcgaggcctacctggccgtgatggtctttgccctggtcctgggctggatgaatgccctttacttcacccgtgggctgaagctgacggggacctatagcatcatgatccagaagattctcttcaaggaccttttccgattcctgctcgtctacttgctcttcatgatcggctacgcttcagccctggtctccctcctgaacccgtgtgccaacatgaaggtgtgcaatgaggaccagaccaactgcacagtgcccacttacccctcgtgccgtgacagcgagaccttcagcaccttcctcctggacctgtttaagctgaccatcggcatgggcgacctggagatgctgagcagcaccaagtaccccgtggtcttcatcatcctgctggtgacctacatcatcctcacctttgtgctgctcctcaacatgctcattgccctcatgggcgagacagtgggccaggtctccaaggagagcaagcacatctggaagctgcagtgggccaccaccatcctggacattgagcgctccttccccgtattcctgaggaaggccttccgctctggggagatggtcaccgtgggcaagagctcggacggcactcctgaccgcaggtggtgcttcagggtggatgaggtgaactggtctcactggaaccagaacttgggcatcatcaacgaggacccgggcaagaatgagacctaccagtattatggcttctcgcataccgtgggccgcctccgcagggatcgctggtcctcggtggtaccccgcgtggtggaactgaacaagaactcgaacccggacgaggtggtggtgcctctggacagcatggggaacccccgctgcgatggccaccagcagggttacccccgcaagtggaggactgatgacgccccgctctag

SEQ ID NO: 14727 - DNA, 29581 bp, Homo sapiens
agtgcgcagaggacgcggcgggagcatgttccggctcctgagctggagcctgggccgaggcttcctgcgggccgcggggcggcggtgccggggctgctccgcgcgcctgctcccggggctggcaggaggtccggggcccgaggtgcaggtgccgccatcccgagtcgcgccgcacggccggggcccaggcctgctgccgctgctggcaggtgaggggcgcgggccgggcggggccggccgggcggggacaggggcgcgggccgggcccgatgacctcagagccccttcccgcagcgctcgcctggttctcgaggcccgctgcggcagaggaggaggagcagcagggagccgacggggccgctgccgaggacggggcggacgaggccgaggcagagatcatccagctgctgaagcgagccaaggtgaggcggctccgggccctgcgcccggccgagcgcggtagcctttgtgagcggggtcttggcgttgctgcgcattactctctccgcctcgccgaagagtggatggaggctccgcgggtaaaattgccgagaatgaggtgggtcatccgagaggggattggaatccatccaggcttttccgactctaaggcctgcagtaaaacctctgcagtgtcaagtgcaaatggagatggcgccctaggcatcacgctttatgcaaacgaaatatcgggaacgttttgtagtggttttatcaattaaccagcctatctgaaatgacataatttcgcacgtatatagcggcctgaaaatggcaacttagtgttggttatgcggttcggttctcctcctgaattcttccttttctccacatccttttctatttttttttcctcctcttttcccaagttatctcatctcttccattgagctaaatacctactcgatgccaacaacgtccaaatttgtatttccattctgtagtgtgctactgacatgccatttgcactttaggaccatacctacctctcagatttaacatgcccaaaactaaacgatctttaatgcctcctcaacatacgctttcgccatctctttactaccatcagtttttcagcctaaaaacctcatagtcattcttaaaacttgtggtaccttaccattgccttccaatacacttacagtccagcaacaagtcctgttgccaacaaatgcaaaatatttctcaaatctttccccttttgtctatctcccttgctgtcaccctagtgcaaaccatcattgccaccaactatgctccagtagtctttcctggcctcctggcctcttgcaatctattctccatgcagaaaccaaagcgaccaaaaaaaaaaagagtaaattggattatgtcatctccttgtcagaaagctctgaatggctacccactgcatttatgataaaatacaaactccttgccttggcttgcaacaccccacatgatctaaaccagcatataccttgcccacccatttggcagtaatcctctggctcaccatcctcccttcacatctatttctttgcatttcttcctcaaaaccattctcttcagcttgtagggacttcactcattctctaccctctgtttgagtcattgttctccccaggtccttatttggttgactcattctcatccttactacctcagtttagctgtcacttccttggaaggcttccctaagtcctatttagaggagaccccttatcattcctttctgtcatctttatagctcttatcattagttgtaattaagcttacttgtcctatatggtcacctccagcctgcaagaaattagaaagaggatggaggacaagcagcttccttataaaatatgttgtaagatcacattccttctgcctgtgtctcttggccaaaacttcatcagatggccacacctagctgcaagggaggctgacctccctgtcatctctgtagacaatgctttgtacatagtaggaattcagtaaatgtctgatgaatgagttagcttccttctatcagttgggatgtacagttgcatacacttctgtctcttagcatatgcatctactatatgtttcattttctattattttgtcttcccttttcagttgagcattatgaaagatgagccagaagaggctgagttaattttgcatgacgctcttcgtctcgcctatcagactgataacaagaaggccatcacttacacttatgatttggtaactcttataaccagtctgaaccactgatgaggaaggttggatgggagggaagggtagttagttcttctgatttatattcctgactttcacgatgttctaaaactccttttctttttactgagttttcttttggcttcagtttcattttttgttttgttttgtttttttgagatggagcctcactctgttgcccaggctgcagtgcagtggcacaatcttggctcactgcagcctccgcctcatgagttcagacgattcttttgcctcaccctcccgagtagctggattacaggcatgcatcactatgcctggctaaattttgtattgtagtagagacgaggtttcaccatattggccaggctggtctcgaactcctgatctcaggtgatccacctgccttggcctcccaaagtgctgagatttcaggcatgagccaccacgcccggccacagcttcagtttttttacccttggggtgacataagacctctcaattccagaccaaaaaaaaccagtatcattagcatgtttttttaatgatgagtggacctagatttggtttgttaacaacaaagtatgtgcaagtatttaattctcacatgattgctgtcctgtgcttcttcttgcagattaattggtgatgtgcttttcattttcaactattttttaaattttgagggtgaaagcaaaagggaattttaaagttttgaaataagtaggaacacagtattctaaactgaaaaacaatttgtaatttgctttcagatggccaacttagcatttatacggggtcagcttgaaaatgtaagtaaattgctttgtaatatcttgaatttatgaaggagtagcttcaagggaactgtaatagtaagagtacaggctaagctgctataacaaagagaccctagaatatagtgactcaaacaagataaaagtgtatttctctttattgtgttagtccagagataggctaaagactgaaggcagacagacataggcacctttgctctctgatccagaagtccaggtttcttctaagataagccctcctctgcctaggtgagctgactcacctccagtctgcaggaagggggagaagatggactgtgagcagcttccttataaaacatgattagaagttcacgttctttctgcctgcatcccttggcctaaattttatcatatgaccatatctaacttaagggtgtccaatctgctaaaattgactgaattttttttttaagataaggtcttgctctgttgcccaggttggagtgcggtggcttaatcatggctgactgcaacctcgacctgccaggctcagttgatcctctcacctcagcctcctgagtagctgggattccaggcgtgtgccacaacacttggctaattttcttatttatttatttatttatttatttatttattgtagagacgggatttcaccatatttcccaggctaaatcgaggggactctgtaatcaaaaagatggagaagagaatgactattaggagacagtttgtagtctctgccacagtgggtttggataagaacttaatctctgaggttgttttctactcatcagagagtagtttaaggtacacagaggatgttgagggtcctgatattttgatctgttttcgcttcaaaagggtacttttctgtgtgtgagtgtgcgtgtgtgtgggtatatgggttttacaaggaatgttgcatcagactggcacttagaatccagggtcatatatatatatataaaatggggcccaattaaaagaaaaatcttttccttatgcttttaggctgaacaactttttaaagcaacaatgagttacctccttggagggggcatgaagcaggtaaggacattgcctagtattggcccctcactgaagcagttttcaaaacagtcttgtctcctgaaaactcctcctagccccaccacatgctttggtcaggaaaggtggagtttcccttctgagatctctatacaaattgccattctttcactaaatgcaacagcatgcttgccaaggaattcacagttggctcatcactctaaaagaataaagactgtggctttgaggccaccgtcagtctggaagttgatctgaaatatgccatgaaaaaatttacttgttatgagttcccttcattctctttctctcacaggaggacaatgcaataattgaaatttccctaaagctggccagtatctatgctgcgcagaacaggtaagtacagcagccagggagtaggactgtgggcaggaaactttgactctgggatgttacataatattcattgtctactggtcatctgggtctcccagaaattgggtgtcacactcaaagtgttccatccctcatctttgaaattgtcagtctttttccagtttgcccctactgtttccatcagcctgcctagtggggcacacaacatctctggctgccctgtgacaaaactaactaagttttctgttgctgcttgaagtgggaagggaagttagagttagaactttagtttaacttttcctagaagaggaaagagcagtgtgaaagctgctggggataatatattaatactctgaagaagccattttgctggtataaatagagttcaaagatgaagcatctaggttgtaagcagagaactcctctagagagttgtatttgggatgaatttagggagagacctaagactagcttcccttcaggttttagtggtgcagaagttggtgcgagaggtttggagtgacatggagcctgatgctgtagaaagggtgctcactgaggccaggccctggcactgttccctactgtcctactcaccagctcctttgttctcatcaggacctgcatagtctccttgcattttgattggacactagataggctagagcttcctggagcctttgacttcaagtcttttgaggagctttgagcttggcccatgccagggaacactgcagcttggtcaatctttcttggagttgtaacaaacatgcctagttcttgattgggtatgaatccctagggtaagaagaagcccagagcctaataaacattgttgagtaagacaaattcatagtcttctagaggtgaaagctagtaacaattagcctctgagttacatggtactctgtacttttcattttgttttattaagagaagcatgagactagaaaagacatggccagatctgaggcttcgaaaggctgatataggttatgaggggaattgtttgtagacctcttgctccgactgggagcgtcttctgggcagtgtccacttgccctgtgttatggctagagagggccctcttgccaagttttgagcgtagggaaggaaggggatgcttctgttcttctgagaacagagcagaacagtagggtcataagttctcccctggcaaagcactagagaacaggtgagctttttagtgccacttctgtaagaaactagagccaaaactgaagaaaagaaccaaagctgagctcctaaatggagaagggatttctgtcacatttcctctgcatctctgtaaaaagcagcagtcagtcggcctgcttgggttgactcaaccctctccagttgattgagggtccagggctacagagttgggttaaatgacttctattgccatagctaggagtcccatttctgcaaaagaaacttttatcagagacttatagcttgaaagaaatataaaatgactaaagctcctcagaagctgtatgaggtcaacagttggaatcctcactgtagggcggcctgaactgtttagggtagtattactttgaacaggggtaaggctttcacacatggagaagttgattcactggaggccatctgttagtgggagatgatgaatactgctggctatgtcagttattaaaattagggcagcattcctagctttttgtgtcctaagttatattaaatggatgacttaaaaaaactgctttgagaaatggcagatttgacactacttagactttaagcaaagttccctcttcccattttacacttcctttactgataatgtttaaactgagctggaaaaatgaagataaaaagaatttgtgaaaaggtaaatgggccgggcgcagtggctcacgcctgtaatcccaccactttgggaggccgaggtgggtggatcacttaaggtcaggagttccagaccagcctggccaacatggtgaaactctgtctttaccaaaaatacaaaaattagctgggcatagtggcgggcacctgtaatcccagctattcgagaggctaaggcaggagaatcgcttgaaccccggaggtggaggttgctctgagccgaggtcacgccattgcactccagcctgggcaacaagagcgaaactccatctcaacagaaggaagaaaaaaaaaagaagaaaaggtaaatggctgattattgattttgctttacagacaggaatttgctgttgctggctatgaattctgcatttcaactctagaggaaaaaattgaaagagaaaaggaattagcagaagacattatgtcaggtaggaaacccattatctgggcattgccttttctccacaaaaggctttactttacacttttgagaaatggaaagagatctaaattgggaagagggaaagttacctattttgcaaaataagtgtctgtctttaaggtatcagcagaagttttggaataagatgttttatttaaaatatttgactgctgttttggtggtggttttttttttaacccccttggtaacatggtcataatttatttgttaacttttagttacatataacttaaggaaaattggggagcagaaggagaaggtgtttctcgtatctcttagttcagctaccaatcaaaatgcttattacgttttagccctagatatacagcaaattaagaaagaagagaaaaaaagctcatgtttttacaatccatcctcactcattctggaggctaggaatagaactggatgagcaggaagctctctagctctccaccattttgggtttcttaatttgggttgaagtattgagaattttcagatttgacatttattcaatacctactctataccaagagctaccgagatggtagggatacagcagtcaactcttctgtacctagtggtcttctaactctctcttgaacatagagtagtcccccgttatccatggggaatatgttccaagacccccagcagatgcctgaaacgacttctaatacactgtgtttttttcttatatatatgtacctatgataaagtttaatttataagttaggcacagtaagagattaacaacaataacttttaatagaacaattataactatatactgttaacagtgtcacagacaggagattcattcttattgtagatcttatcaacctcagcatacagttttttgttttttgttttttgttttcttactaagttgagaactttcaccttttcattaaaaggaagcactttatgacttctctttgtcatattcaaattgccagtatcaccactctcacactttggggccattatgtaaaatatggattgcttgagcacaagtactgcaacattgtgggttgatctgataactgagactgctgctaagtgactgaggccagctgccgtatacaacttgggtacactggacaaagatgattcatgtcctgggcaggatggagtgtgacagtgtaagatttcttcatgccacccagaatggcatgcaatttaaaaacttacggattatttcttgaatttttcatttaatatttttcggactctggttgactgcagataactgaaaccccagaaaatgaaactgtggagtaggagggatcactgtacaccaatttttttgttttcatcactccactgaagctacctttatcaaagtcaccaaatccaatggttacttctcaatccttaacttactcatcagcagctttaacttaggggatcactgtctcctactgaaaatactttcacttggcttctgggatgcctcactggtctctctagtgaggtgaatagacttccctacctcttaatgttggcacgccttagggctgttttcagccctattctcttttctctctgccccaacacctaggagatatcttttagttccatagttttaaatattagatttataccttcagccccaacttgcccccaaatggcagacttataattatgattgcccacccgacatcttgacttgaagtctaatggtcatctcatacttaacatgtccaaaataggtctcagttttgccgctcacaacttgtttcgtcaccagtcagccccagatttgtaaatggcacactactcatttagttgctttggccaagaacctaagaattgtccatgatttcttcctcattcctcatatctaatccatcagcaagttatactggatcagccatcaaaatatatccatactgaccatgtctcatcccattaccctactgctttggtccaggccatcactgtttcaagacctcagtacctttgtatcacctttagaataaatttagaatccctgcatggacctgtaaggcgcttatgacctgggcccacccacctcttccatgccatctgctgctctccccttgctcgttccagtctcaccacactggtcttattctggcacattccaagcttagtgccacctcaaggcctctttgcttgatattccccctacctagactgttctctcttacctttctctggccaactcccgtacttcactcaggtctctgctcaaatagcacttcctcagagtgctcccttcactaaaactatcatctcttcccaccttactattgctctactcctctttcctttacttttcttcatcacacttaaaagtagaggtgtgtgtgttgtgtgcttgtgtttctccactaaaagtatgtttttgtttaaaaatttttagtctttgtcttccatatcaaagaaggatagagacttcatccattatactcagtgctaaatcctcggtgcctagaacagtgcctggcacataatagaggctcaataattactgaatgaaagaacaaaagacccaagaaagaccagcaaataaatccagtttcagtgcagtgtggaagtgctttgaggaaatccacaagaggtgtaaaaacaagtctagctgtcaagtaagtcacttctgaactatttacacctttgctgtctttcatttatagtgttgactatggtttcttaggagtgtaaagctatattttctgattcaaaaaataataccagtaaacactgaagaaagtttagaaaagcactaagtaaaaatcatctgtaatcatactattaagaaagagctactgttttatttattactacggcttttcgggttacattttaagaaataaatttgggatgatactgtatatcctactttgtaacctgagttttaacaatttagtaacatattatgaaaacactttttttttccaggcaaaggaattcttgttagatagagcaagctaatttctattataaatattatttttacattttactagttgcacagtatagaaaatgtgttacatgattcttcatcttattttttctagaaaaggaattcctacctattcagttttgcacaaagcaaatccattatcaaatttacgtgctttttattgacacaactatctctattctaggataacattacttaattacataaaattacattacttaattacataaaaccttgctctaggataattattttgttacctatgttgtagacatatatgtacttactgaggaaatgcccataaaaaattaagtgaaaactttggttacaaaacagtatagttagtatgtagactaaaaataggaatggaacaaaggctgaatgatagatatcaaaatacaggcagtgattctctttggttggtaggtttatagggaatttatattttatttgtgtttctctgagtattctataattttgtacaaatttatatttttctttttaatttccaatgttatctgttagtataaaaagtcaaataatattaatagtacaaagcttaatttaagagagcattttcttggctatctcacccaccccatctattttttttattttttaatttttaattttttttttttttttttttttttgagacagagtctcactcttgtcaccaggctggagtgcagtggtgcaatctcggctcactgcaacctccgcctcccgggtttaagcggttctcctgcctcagcctcccgagtagccgggactacaggcacgtgccaccatgcccagctaatttttgtgtttttagtagagacagggtttcaccatgttagccaggatggtctcaatctcttgacctcataatctgcctgcctcagcctcccaaagtgctgggattacaggtgtgagccaccgcacttggccctattttcaacttttgtttttgagacagagtcccgctctgtcgcccaggctggagtgcagtggcgtgatctcggctcactgcaacctctgcctccccggttcaagcgattctcctgcctcagcctcccgagtagctgggactacaggcacccgccaccacacctggctatttttgtatttttagtagagactgggttttaccatgttagccaggatggtctcgatctcctgacctcatgatccgcctgcctttgcctcccaaagtgctgggattacaggcatgagccactgtgcccggcccctattttcaactcttaaccagtttcctctggtatttaccttcacatttctcaataatataaaattgctatttcctagttcattattttcagaatatgttgatttatggaaaagtgaagatttagtgcagtttctggttgtgtctacattatgagtgtatgaatagtgttagctgctgagccaagtaacatgattacacagttacatttccttttgtgtacgttttgcttcctctgaagttaactaggtttttttgtggctccgtttgttatgtatatgccagattcttcacttttacatattacttgctttcttcaattcataagctttcccagtattctagagttcatgttggctcacttttcattggcatggctggccataggcattcagtcttcatcttcttttttttgtttttgtttttgttgagacggagtctcactctgtcacccaggctggagtgcagtggctcaattttggctcacagcaagctccacctcctgggttcaagcaattctcatgcctctgcttcctgagtagctgggattacaggcgtgagctaccacacccggctaattttgtatttttagtagagacgggatttcaccatgttggccggcctggtctcctgacttaggtgatccacccgccccagcctccccaagtgttgggattacaggcgtgagccaccgcgcccggccgcgttatatctttttcatcctgtaagtttcattttagtggtatttggggaaggagtggagaggaatgcctgtgttcagttcagaatagtaaatctgttattgggcatcaagatagtgtccaaacctgtttttttaaagtggattcttagcactgagatttccaagtcaagagtagcacattttaaggttgttgatgactattgccaaattgccattgaaaggactgtgttaatttacatttcctggtttggctatttatgtactttgtgactttggccaaattacataatccctgtgtgctttttcttcagtgtgggattaagagtaacactcataggacctttaggaaggtggaatgagttaatacataaaacgtacttagaataatacattgtagctgctcaaaaagggtttgttagtggtttttattattgtgataagcctatgtcctcctccccaaaactcattaacttttataatctttgttagcttgatgatatggccttgatgcattatctagcatttctttgataaacagtgaggtttatctttttttttttctcaccatgtcttagggtgctaagaggtttattttttattggagctttattgtaaaaatattaatcctttgtctcttgggttttcctcctgatttgtgtttatagagtggggtttttttttctaataaaaagggaatgtgaaattaacatttgtataaagaatttatgagaattggcgagggacagtggctcacgcctgtaatcccagcactttgggaggccaaggcgggtggatcacttgaggtcagtcgttaaagaccagccctggaaacgtggcaaaaccccatgtttacaaaaattatctgggcatggtgttgcgcacttgtagtcccagctactcgggaggctgaggtgagaatctcttgagcctgggaggtggaggttgcagtgagctgagatcgcaccacctgtggtccagcctgggtgacagagcaagaccctgtcttggggctggggggtggaagaggattgtgagaatagacaagtgatccagcattgccagtacctttggagctcttcctacctgggatactattctccttaatcttgtcactatcattcaatggcatgatctcggctcactgcaacctccgcctcctgggttcaagtgattctcctgtctcagcctcccgagtagctgggattacaggcatatgccaccacgcctggctaattttgtatttttagtagagacggggtttctccatgttggtcaggctggtctcgaactgccgacctcaggtgatctgcccgcctcaacctcccaaagtgctgggattacaggcatgagccaccacgctaggcctatttgcttttctttcattttactctgtgtcccttaagaagatgtcatttagtttttgcatattgcttttaaaaatttaaataggctgggtggagtgactcaagcctgtaaccccaacactttgggaggccaaggtgggaggatcgcttgagcctaggagttttgagaccagactgggcaacatggtgagatcctgtctcttcaaaaaataaaaaaattacctgggcacggtggcacatgcctgtggtcccagctacttaggagactgaggcaggaggataacttgagcccaagaggtcgaggctgcagtgagctatcatagtgccactgtccttcagcacaggcaatagagaccctgtctcaaaaaaaattaaaattatacaaatgaatcataatatgtattcattttagggcatttttatgacttgcatgagtaatcttttcagaattagatcagaattcatttctaatttcctttgcttttattcatctttaataaatactgagtagctgttctgtgccaggtattctaggatttgaatagcagcaagtaaggcaaaagtccttgctcttctggagcttaatgcttagagagatatttttcaagctttgaaattgtatgcattctcactcatctttccttataattttctatttttttccttttatttctaaacagttttaactttttagtatatctggtattttggtgtgaagctggtgactgttttcttgcagatagtaatcaatctatatgtactaattagtacatacttgggtttcttttggggttttccattctgatgtatttacctgatgagttttataacagtatacattctttgaattatatatttgagttatatggtaggacagttgacacatgcttcctttgtaaaattccttcccacatttcactgttttcacatgaattttagaattattttgtcaagttcgtaaagtgccttcagactgaattatcagatatgcattatatttataaattagtttggggagattgccatctgaataagttagcatatctttgactgcaaagagcagaaatttcagctaaattaggtttaacagtaaggacatttatgtcaagtaactggcagttcagcaatagggagcaggctgttgagttagttgacagtgtgattcactgaaatcataaaggaacaggctctttccatccttcctcactcatgtattggctttttccccatgctcccctggtggttgaaacgtgaaactataacaattcccaggaatctcatccagaaatgacagtgtccagaggaaaaggagacttctttgatgtttctcataggatcaaggtaatctttcctagaagtctccaagtagatttgtccttacttctcattggttagaattgggttacatgccatttctaacccagtccttggcaagaaaaatggattatcatgattggctaaaatacatcagtctcctttcctgaggatgtgagtcatgtgagaaaagaacggatactgggacaaagcagctgctctgctagcaaaggaagatctttgtaatagtgagccgtctcactgaggaacattctatagctcctgcttatagttttcttcatatagatgacagctatttattaaatttgattctaactgactccttgactgaactctttgcttttcagttgatattcacactaattccagatttataatcatacattccggaaatcatgatacaggttgagcatcccccagaaccgaagctttctgagtgccaacatgatgcataaagaaagtacgcattggagcatttggatttgggtttttggttttgggatgctggcagtatccaaaggaaatattccaaactcaaaaaatctgaaatctgaaacacttttggtcctaaacatttcagataaggaatacttaacctgtaattgtttccttccagagagttatactactgtctcccttccccaccctttataaaattagttcattggctgtaccttcagaacatcaagcaatagtagtaataggaaacttagtcttatatccaatttggtaccaagatatatgaatagatttattactattatatatctagagcggaccaggcttgcttgtaggttaattgcttagtacctgtgtagtgctggataatatttaatgctgatatgtaacttgcgtttcttatgagatccacagtaaatttcttattgtattgtttgtactattatgtttgtattatttgttatcgcaggattgttattaatgtgataaaatgaattgggatgctttctgtattttctattctgaaataagtgtgggatattgcattggaatggtctgttccttgaaagttgcagagtctgtgatgccagatggaccagaactcctgagttaattctccggcagctttttttttccttcttgattactcatgtatttcttccattttcttaatttcaatataggacagtgctaaaaacataaacattaataaatatctattgaataaatgaacgtatgggtgaacaaattttataactattaatttcctagaagaaactttaaggaattatatttttaaagcatattttacactactcttacgtatctgagatcctcttccttttctagatcctaattttatggatttccttttaaattagtaaaaagatgtttcccattgattccttcctcctcctttccttgaaagtttttattttcatatattaaataaaacatttctagaaagttatttttgatgacataatatttggttccatgagtgcttaaagtctggagcctgagttcagattctggttctgccacttactagcagtggacaagttatttaacttctctgttctcagcttccttatcaataaaatgaaaataataatagaacttacctcatagagttacaagaattaaatactccaggactatgaccagtactcattaggcactattatataagagtttgtggaatgtgatatatttactaatcttatttattatatgatttggcacctatattttactattatcaatttatgaaggaccttcctggccattttatttatagtttctccttggtttttgttaattttgtttattcattcaaagagccaacttctggtttcattaattttctttattgtctttctattttccatttcacttatttctactttgtctttattacctctctcctgtttgctttgggtttattttgttcccttttttctggtcccttaggtgggagatgaggttattgatttaaggtttttcttctaacataattgccatttataactataagctttagctgcatctcattaattttggtaagttatattttcatgtatctcaagtattttccaattttgggggggatttcttctttgaccctttggatatttaggagtatattgattaatttccacatacagtgaatttctcaaattttcttctgttgaatccagtttcattccattgtgttcagagaacaactgtgcttgattttatttattgagatttgttgtatggcctcacatatggcttatcctggagaatgttgtatgtgcatttgagaagtatgtgtattctgttgaatggagttttctatgaatgtctgttaggtctagttggtttatagtgttattcaagtcttctgggtccttactaattttgtctagttgttctaatttttttttttttttttttttttgggatggagtcttgctttgtcgcccaggctggagtgcagtggcgtgatctcggctcactgcaacctccacctcccgggttcaagtgattcttgcacttcagcctcccgagtagctgggagtacaggtgtgcaccactgcatctggctaatttttgtatttttagttgagatcgggtttcaccatgttgtccaggctggtctcgaactcctgacctcaggtgatccgcctgcctcagcctcccagagtgctgggattacaggcatgagctactgtgcccagccagtttttggtatttttagtagagacgaggtttcaccatgttggccaagctgttcttgaactcctgacctcaggtgatccacctgcctgagcctcccaaagtgctgggattacaggcatgagccaccatgcccggccgataaattttttaaaatcttctttctttatacatgtttctgtgctctgtttagacagtctcatagatatatttatttgttacgaattgtcccttcatcaggaaaatgattcctttttccctatttaaggtatttgttacgaattctagttttatattatctactatatcttacccttaacttttctgagtcattttcagtgtatcttttatagaaggctatggttggaatttttttaaaacctgagtatcattgtcttctgatacagaatctgaaaaccttttaaaaattagtgaggcgaaaaaaattagccaggcatggtgacgggtgcctatagtcccagctactcgggaggctgaggcaggagaatggcacgaacccagaagccagagcttgcagtgagccgagatcgcgccactgcactccagcctgggcgacagagtgagactccggctcaaaaaaaaaaaaaaaaaaaaaagtattcaggctgggtgcagtggctcacgcctgtaatcccagcactttgggaggctgaggcaggtggatcgcctgaggtcaggagttcaagaccagcctggccaacatagtgaaaccccgtctctactaaaaatacaaaaaatgagctaggtgtggtggcgggtgcctgtaacctcagctactcgggaggctgaagcaggagaatcgcatgaacctgggaggcggaggttgcagtgagccgagatcacgccattgcactccagcctggttaagaagagcgaaactccatctcaaacaacaaaacaaaacaaattagtattgaaagggataattggtctaattattgcattttaaaaagtgctttccatttttgttaattcctttgttttcagttcctcttacaggaacttttccctctctgatctgtatttgtattttgtagggaaggtatatgtatatatgattttcagttgtataaggagtaacctaaacatttcttaaagacagttgactcagaggaaaaaaaatttttttcagtttcttctctaaaatgagatgagtacattttaacattatccttctttcccttttcctcacttgttttttctctgtgatctggaattttagacttagtggaatttattgcagaggagaattctaaagcctgcatatttgccttgttttttaaatagtctattttctcctgctcagatgctttgctggactcagaagttaaatgagcataaggttagggagttgtctgtttatgaagcttgcttagtccctggtgaaccttcatttttagcatccagttctctggagcttctgtagtctattctggctcaatgcttctgtcccacatgctctggcctcttaccctggaatgtcatttacctgtatgttgacctctcttctctatccttcacattatcccctcttccatcagttttctcatgtatattttgggagtttcttcagttgatattccacattaccaatttattattaagaaaagtcagttctgtgcttttcttttgatttgttttttgttttttgagatagggtctcactgtgtcgcccaggctggagtgcagtggtgcagtcatggctcactgcagcctcaacctcccaggctcaactgatcctcctacctcagcctcccaagtagctgagactgcatgctcatgtcaccatgcctggctaatttccggattttttcatagaggcggagtttcaccatcttgcccaggctggtcttgaacttctgagctaaagcaatctacctgccttgacctcccaaaatgctggcattacaggcatgaggcatcacgcctggcttccctctgatgtaattttttaaaattagatttcaaacaaaagtaaagttttgaggacttaccaaatatctgtgtactttcagccttggccagatttcaatattttaccatatttgctttagaattttttttggatatttaaatccctgtatacccttccctccctgcctaggggtagctactatcctgagtttggttttgtttgcctacttattgcacttgtatatatcaataaacaatatattgctgggtacagtggctcacacctgtaatcccagcactttgagaagccgggacaggtggatcacctgaggttaggagttcaagaccagcctggccaacatggcgaaaccttgtctctactaaaaatacaaaaattagcccaacatggtggcgggcgcctgtaatccccactactcgggaggctgaggcaggagaatcgcttcaacctgagaggcagagattgcagtgagccgagatcgtgccactgcactccagcctgggtgacagagtgaagactccgtctccaaaacaaaaaaacaatatacaatagggctaatatgtttttaaacttaatatgaatggtatcatactgtacaattggttttgtagtttgcttttgtcactcaatattatgttgatgagatttattgggctgctatttaaagcagttttcttagcacagaggccctgtttgcttgccaaactgcatgtctgctgggttgcgtctgtctttaaagggtgacttcctctaattaatccactggggtgaggggtaagttgaacctgttttttctgttcacaagtgtggatacaagctaaaggtggccctgtgtggttccctcactacaaccatggtatagtagtccattgtagaaatataccacagttctattgatggacctgttgggttattctatatgttttgctgttaaaagtcatacttcactgaacattcttggacttgcatctttgtgcacacctggaatattacataaaagtggagttgccagggtgcatataccaaattgcttaacaggctgggtgtagtggctcacacctgtaatcccagcattttgggaggctgaggcaggcagatcatttgaggtcaggagttggagaccagcctggccaatatggtgaaaccccatctctacttaaaaaaaaaaaaaaaaaagccaggcatgctggtgggtacctgtaatcccaactacttgggaggctgaggcatgcgaatcgcttaaacccaggaaggcagaggttgtaatgagctgagatcaagccactgcaagactttgtctcaaaaacaacaacaaaaaccaaattgctgatcaaagtggttttaccagtttacattttgactagcagtatattagtgttcatgatgttctctgtatatctttgttatcagatttttttgataatctgctgggtttgaaaaggaatttcattgtggcttcactatgtgtttctgattactgtatttatcggttattcagattacctgctctgaaaattatttcttcatatcttttgcttatatttttgaggggttgtctttttcttaacgattcgtaagagttccttacgtattcgatcattttgtatttttgtgggttacgtatctctttgtagcttgtcttttcacattagggcatttgatgtagattaaaaatttgtatattaacagaatcttgatatttatcttcatagtttgtgcttcttatgtcttgatttgtaatgacatctctatattgggttttcatagattcatggggtgctaatgtttaaatctgtaattataactatttttagtttcattataatttttccctatttaattcagtactttatttcccccactaccccccaccccccaagagacaaggtcttcctttgttggccaggctgaagtgagtgcagtgacacgatcacagctcactgcaaccttaaactcctgatatcaagtgatcctcccacctcagcctccagaagaattaggagtacaggcacgtgccaccatgtctggcttatatatatttttggggggtggtgggggagagtagagatgaggtttcgctatgttgtccaggctggtctcgacctcttgggctgaagtggtcctcctgcctcagcctcccaaagtacaggattgcaggtgtgagccaccacgcctagcccttttataattccttctatttgttcattcattcaacaattcagtcagaaatactgagtgcccattacacactagatatgctgctaggtgctgagatacagatataaataaaagaaagttggctgggcgcagtggctcacgcctgtaatcccagcactttgggaggccaaggcgggcggatcatgaggtcaggagttcaagaccagcctggcaaatattgtgaaaccccgtctctaataaaaatacaaaaaaaatttagctgggcgtggtggcgcacctgtagtcccagctactcgggaggctgaggcagaagaatcacttgaactcaggaggcggaggttgcagtgagctgagattttgcaactgcactgcagcctgggcgacagagtgagacttcgtctcaaaaaagaaaaaacaaaaaaacaaagtcaccgcctcatggagctacatttctggtgggggaaagacgcatagtaagcactacccagtaagttggtgtgtccaaagtgctatgtagatatttatgaaggaatatgtataccaggaatatgttggggcagtatggtgtcttatagagggggtagggaaggccttgttagtatgaaacctggtgaatgggagagaataggccaagtggctatttgtgagggaaaaaaattacagacaaagggcaattacaggtacaagactctgaggtggtgtatgctgcttgacttactggaagtaaggagttagaattactggagttgtctgattttctaaaattttgggggatgaggcctgcttttttactgtctgctgattctcatttatgatgaattgtcatgtttactaatcttggattatacattcatcttcagcaaggttttagctataagtgagattccagaatagttttgtgtcttccaggcactcagctcctggccgaagtggatgctacaaatttagacatcaaatttacagggtagtcatttttctcctctttagattccagacttggccattcaaggctccttgttgtctccctgtgcctgtggtcggggggttaaggggagtgtaggctggagtggtgcaatttttttcacatacatgcttttcctggggttgtggtcctaatggtaatcatcctggtttatgcattggcttcagatctcattttgtttagtacacatcaacagctttaattcctggattacagagacaactcaagctacaacaaaaaccgggcttctgctgtgtcaactcacagactctccactttgggttttagcttactcctaatttgtggctcttgggagctcagctgtgcagggaaaggatgtgtgttatagtttatctaaggtttccaggtgtttgaagcagatgggtttcatctatagtgttacgttagattctgctttattccctccactaaaaccattaacactcatcagaaagtgctaatcagttgattaacaagagatttagtttagcagaaatttcaggatattcttggaatttgggcaacaaatatctctagtttcaaagacccttgtagactttcctatattgctattgatggtgagggggtaggggagtgttagaggcctatgctcaagttttcctaaattagagatgctcttttgctattgttacaaatgcatataattgctccagtactttatcaaattccctttagtctatatttatgtaaacctagtttgatatactgaaccattcttttattcctggaataaatgctgtttggtcatcttaatacatctgattattccatttggtaatattttgagtaaaaaattctatagtgaatcctgtttgcttcatggactgagtatagtagcgtatctttttctgtgactagaagttatttatgaaagagaatcatttatgtttgaagaagtaaatatgcctcagtttcaaatggtcctttaagggctctgtataaacgattccaatatatttctcagttgttattaaagtacttgatttttttcttgtctaacttttagcaatttttatattaatatttcaaagaaccatgtttaagtaaattactagcaaaggaactctttgggggaactttatgaaattttctcttggcagttgctaaaagttttcttacgttttctaaaagttcagtaatagtacatttatctttagaaaagtttgcttttcagaaagtgtttccatttttcttgtggtcagaatgtgctgtgaattttaaatgtatttttaagatattatagctaaattgtacctcactgttttctctaaaaagttttactgcttttgcttccactccactattcagtgataacaagggtaacaagtttccactagaattgcttgtcactttattcttgtacttttgttttactactgaacatctttttaaatcgttgccacaaaatatctcgcttttatcattttcacattgctctagtatatcaactttggaaacaagacatcattctatttatagcattctgtttttagtagtggtatttccatttacaaaatacagtaattcttgatcgctgaagacgtcaaatcctagaaaacatagcatgcctacgcgtgatgttaacatcattctcgaatagttgttggttgaagattcatttgatgaatccgatttttcagaaatagacgagtctgatgatacagacgattctggtgttagttctctgtagaaataactccaagaacacttttaatagtttattttcacattgaaaatcagatttgctccagcctcaaagagtatatttatgtaaaattaggtaagcgatatagaagcaagctgcactttttttctaaatgggaaggtattaaaaaagaaaagtctcattttagtaacatagtcttccttaaactctatgccacttgtaagatttctgaaaactgaagacatagaagggaacgggcttgatatgaacgacagctttgctggtaaataaacccaactgaacctaagattatctaaggtaacctctttttctagtcttttattgtgtgaacagttacctcctgctgagttgttggcagaatttccatataatcttgcttatgaccatttctacattatttgtatcatcttttagaagtcttacccaggttgatataggttaccgttctctagatctgtgtctccaattcttcttacatggcattaggtattttaagcttgttttttttcagacatcgtatagtcaattcttgaatgtgttgagaggtgctatgtcattgtaagctttattcttcttctctgaatgattagcttgtttaaattttaccttaaattcttttttttctttttttttcttttgagactgagtcttgctctgtcgcccaggctggagtgcagtggtgtgatctcggctcactgcaagctccacctcctgggttcacgccattcccctgcctcagcctcctgagtagctgggactacaggtacccgccaccacgcctggctaattttttttttttttttgtatttttagtagagacggggtttcaccatgttagccaggatggtctcaatctcctgaccttgtgatccacccgcctcggcctcccaaagtgctgtgattacaggtgtgagccaccgcgcccggcctttacgttgaattctttaaattcagcttgtgactttgcacttcaggattctgagtgttctctgtcttcttcctgcattgtttttcttataccatacaggtttttcattggccttgactttttgttgttaactcattcttctttgggtttattttcatttgtttctgctgaatattatttgtttcaaactaaaaataacattccacattttaattgatgtgcggactcttaatctacttaaaatgtgggctgaagttccatgattccagctagtctggaataggtcatttaactggatgttaattcacctacattgttccctaagtgacatgtgggtcccattctgctgacatatttgtgggtcctggtaacaaccatttgggtagatttgctgattcctcttttctccttagtggaagagaaagccaatacccacctcctcttgggcatgtgcttagacgcctgtgctcgctaccttctgttctccaagcagccgtcacaggcacaaaggatgtatgaaaaagctctgcagatttctgaagaaatacaaggagaaagacacccacaggtaagggaggaaaacacagaagggggaatataaaacaaaggcttcaaaattgaagggtgtgaaatgtcacactcattggtaacaggatcagcagatggtcctagatcctccttggtccccagtctactcattttcttatcaccagcaccctcaccccaactacttgtttcagaaaggatttgagactagttatcagttactaggtctgcccagaactttttgcatgatccatggtttgcacaacagagcaacctttctacagagcaggactggtcaggcttcaatggacacagcacagtatttcagagtggggtctctagatacccctattagaagcttatgaggaacggtttaatacacaaatatccttgcctcccttgccccacagttaaaatggcaagaggtgagggaagggcaagggaccacattaaaaacacttaaaccattggcatattatagaatttaagtataacgtgtaaagctctgtgttagaacattaaacacattgaattgaaatcatctctttgggtctcccctccatccgagtaagttcttagatgtaaggagtgcattgctttgtctatgaatgcttgctactgccaatataagacataacaattttaactgaatgtgtcccaaggctggggtacatgggtagggtgagtaatatgttttggaagaaaagggaggttgagctatgaattatctccatgaaagggatttataacttattatgaagagtcccttaatggagtgaggaataataaacaagcaagtacagaattcagatctccaagtactagagtcagggggcttaaagcatggcatcagtggggaagtaggtatggaagtctacctcttccatactgaaattccatttcagtagccaaattaaaaaaactcctactgggcatcttcctaaaatagatggtgtatttcttgtttttgatgagcctcagggttatcagcaggaacaacataatacagtggggctccagaggcaatcaaaccataggaggctggcttctcaaagttgctcagccttaaaggagataatatgtgtagcttcttgctgttgtttttcatttggtgcttctaactgggtaattagttggattaataagcactgtctgttacctaatttccagatttgtattatttcccaaaaggtcgaactaacattgtccactgtacaatgtgattatgattaacaaatgcccacaaatttgttaaagaatggtatccctcatcttttgtggaatgctaggaaagatgaaatcttatgtattcagagttggatgcactccacattaaagttctgtgaaggcatgtttttaaagaaaaaattgttttttcttttacatacagaccattgtgctgatgagtgacctggctactaccctggatgcacagggccgctttgatgaggcctatatttatatgcaaagggcatcagatctggcaagacagataaatcatcctgagctacacatggtactcagtaatctagctgcagttttgatgcacagaggtaggtagcaatgtaaacttaactgacttgctttaagggagggatgtcactggattgatagatttgtgaagtggtatgtagggagggcaagggccaacgaataaacatgtaaattaaaagactggttgaatggcagaaaaaggaggtattgattaggttgaagtactattgtgttcaattcacgtaacttctacagacctgcactagcctgtcgaaccccatcaagctggagaaaaccttgcaatgatagtaccttacgtcagtagtgctttacagatttctaaatgtgttcagttacaatgtgtttctcacagtgtgctggtgaagctttatgacaggaagtatcattttgtcagacatttcttagtgtcagcacactataccgatcattttcagaaacctgggatgacaggtgtattacacataccaccattcatgaaatcttgggctcatcaaagtcctcaggatatactggaaagggccgttaggaatcccacagcattcagtggagttccagcctgtcagatggggatgaaatgaggcagcaccagcttgtcgcttcataagcacacagtaaattagccctatatctgcattcatgctctctcttcagaatcaccttgaaaacatacactttcttcttactgtcccttctctctgggttattttagaacgatatacacaagcaaaagagatctaccaggaagcactgaagcaagcaaagctgaaaaaagatgaaatttctgtacaacacatcagggaagagttggctgagctgtcaaagaaaagtagacctttgacaaattctgtcaagctctaaatccatttttgtgtagggagaataatgtctagtaatgtggaagaatagctatcattcctgtctctgtggcacccgatcaatggcttaaatctgtcgtttttgatattcaggtttcctcaatttagccttagtgaaggaggggttgtacacactgccatttttgtattttaaaggaaaaatgactttcattcccaactgattatgacctttcaggatgtcgtcaagtgatgctttcagttgtaacacgtgacttggtgctgtccctgctggtctaagtagaactgtagattcatatgggctggtgttcctgtgcgctgtgggtgtggtgattcagcctggcatttctaccataagtttttggtctgctgatttgctgccctgtcttctcttactttactttatcaatacctggcaaactgaccagaattaccttcctcatggcaaagggggattatggtgaattgttgttcttatagtctgtttcatgaagcacaagtggaatttaatacataaaagagaaaaatatcttagtttgctaccagcatccagcatgaagttgtaaagtggggattaggcacgtgacagtatagcacccatttgaatttaaataaaagtgaaccatatttatctggttatataaaactaaaaatgggggtgtttatataaaactaaaaactaagaatgatgtaaccttttgtctgtgttatctgaacactctacttcctttgcagccttagtcacacaactgagtcatctcaagtactctttaaggacacacagcccaggctgttctgagtcagaataggcccctacaggtatattttaaaactcttcgtaattctaatgtgtactgctggtatagctgaactactgacctggatcttagtcctagcctttttgcttttgcaatttcagtatcttcatctctaaactagggaaacactgggattctttcttagctgtgggggaaggtatttggttagatgactttgaatgaatagactgctgtgctgaaagagctttatcacactgtctcaaagtatgtaaagatacataggtggatgctcttactgcagcagtcatgaatacatttttagccatttacctaaggaaaaagacagtttttctaggtaccatgaaggaagattgaccctgttggtatgcctgtgggggtgggatgtgagtgggactgataaactgatacttttggttcgtatgtacatactggaagaatcttcataataaatgagactacacaacaatattgtatgtatcccagtaatctttgcatttctcaaaaaaaaaaaaaaaaaaaaaaaaaaaactttctgaagaaaataaaaacaccagaaaccttgaggtccaaatcctcagggattagactaaaactagagttttgtatgttgcagatgtaaatttcttcctattttctgtctaatctcatattatttaccatgcagctaatgccgtttaccaagtctagctcagagagataagatacaatataaatcagactgtttcagtagaaaccagtattaacgtatggtgatttcttaaaaaaattaatgtcaaccactcaccttttgcattgagaatgtttttaccttttcacaactgcaggggttactgaaaggtttttcattccaagttttatttatttattaattttaaatcatccacagtgactcagctcatggtctcgttgttggaaacactaggagttttcaggacagtctcttcatgtgggtgttttcattacagttcatttacactgttgtaaaataaggtactgaagcaaaaggaggactgatctcctttactgattggtctaaattcaaaagtgaattggttaaaatcgtgtcattaaaattttttaactgtc

SEQ ID NO: 14728 - DNA, 3050 bp, Homo sapiens
agtgcgcagaggacgcggcgggagcatgttccggctcctgagctggagcctgggccgaggcttcctgcgggccgcggggcggcggtgccggggctgctccgcgcgcctgctcccggggctggcaggaggtccggggcccgaggtgcaggtgccgccatcccgagtcgcgccgcacggccggggcccaggcctgctgccgctgctggcagcgctcgcctggttctcgaggcccgctgcggcagaggaggaggagcagcagggagccgacggggccgctgccgaggacggggcggacgaggccgaggcagagatcatccagctgctgaagcgagccaagttgagcattatgaaagatgagccagaagaggctgagttaattttgcatgacgctcttcgtctcgcctatcagactgataacaagaaggccatcacttacacttatgatttgatggccaacttagcatttatacggggtcagcttgaaaatgctgaacaactttttaaagcaacaatgagttacctccttggagggggcatgaagcaggaggacaatgcaataattgaaatttccctaaagctggccagtatctatgctgcgcagaacagacaggaatttgctgttgctggctatgaattctgcatttcaactctagaggaaaaaattgaaagagaaaaggaattagcagaagacattatgtcagtggaagagaaagccaatacccacctcctcttgggcatgtgcttagacgcctgtgctcgctaccttctgttctccaagcagccgtcacaggcacaaaggatgtatgaaaaagctctgcagatttctgaagaaatacaaggagaaagacacccacagaccattgtgctgatgagtgacctggctactaccctggatgcacagggccgctttgatgaggcctatatttatatgcaaagggcatcagatctggcaagacagataaatcatcctgagctacacatggtactcagtaatctagctgcagttttgatgcacagagaacgatatacacaagcaaaagagatctaccaggaagcactgaagcaagcaaagctgaaaaaagatgaaatttctgtacaacacatcagggaagagttggctgagctgtcaaagaaaagtagacctttgacaaattctgtcaagctctaaatccatttttgtgtagggagaataatgtctagtaatgtggaagaatagctatcattcctgtctctgtggcacccgatcaatggcttaaatctgtcgtttttgatattcaggtttcctcaatttagccttagtgaaggaggggttgtacacactgccatttttgtattttaaaggaaaaatgactttcattcccaactgattatgacctttcaggatgtcgtcaagtgatgctttcagttgtaacacgtgacttggtgctgtccctgctggtctaagtagaactgtagattcatatgggctggtgttcctgtgcgctgtgggtgtggtgattcagcctggcatttctaccataagtttttggtctgctgatttgctgccctgtcttctcttactttactttatcaatacctggcaaactgaccagaattaccttcctcatggcaaagggggattatggtgaattgttgttcttatagtctgtttcatgaagcacaagtggaatttaatacataaaagagaaaaatatcttagtttgctaccagcatccagcatgaagttgtaaagtggggattaggcacgtgacagtatagcacccatttgaatttaaataaaagtgaaccatatttatctggttatataaaactaaaaatgggggtgtttatataaaactaaaaactaagaatgatgtaaccttttgtctgtgttatctgaacactctacttcctttgcagccttagtcacacaactgagtcatctcaagtactctttaaggacacacagcccaggctgttctgagtcagaataggcccctacaggtatattttaaaactcttcgtaattctaatgtgtactgctggtatagctgaactactgacctggatcttagtcctagcctttttgcttttgcaatttcagtatcttcatctctaaactagggaaacactgggattctttcttagctgtgggggaaggtatttggttagatgactttgaatgaatagactgctgtgctgaaagagctttatcacactgtctcaaagtatgtaaagatacataggtggatgctcttactgcagcagtcatgaatacatttttagccatttacctaaggaaaaagacagtttttctaggtaccatgaaggaagattgaccctgttggtatgcctgtgggggtgggatgtgagtgggactgataaactgatacttttggttcgtatgtacatactggaagaatcttcataataaatgagactacacaacaatattgtatgtatcccagtaatctttgcatttctcaaaaaaaaaaaaaaaaaaaaaaaaaaaactttctgaagaaaataaaaacaccagaaaccttgaggtccaaatcctcagggattagactaaaactagagttttgtatgttgcagatgtaaatttcttcctattttctgtctaatctcatattatttaccatgcagctaatgccgtttaccaagtctagctcagagagataagatacaatataaatcagactgtttcagtagaaaccagtattaacgtatggtgatttcttaaaaaaattaatgtcaaccactcaccttttgcattgagaatgtttttaccttttcacaactgcaggggttactgaaaggtttttcattccaagttttatttatttattaattttaaatcatccacagtgactcagctcatggtctcgttgttggaaacactaggagttttcaggacagtctcttcatgtgggtgttttcattacagttcatttacactgttgtaaaataaggtactgaagcaaaaggaggactgatctcctttactgattggtctaaattcaaaagtgaattggttaaaatcgtgtcattaaaattttttaactgtc

SEQ ID NO: 14729 - DNA, 4169 bp, Homo sapiens
ctttaaattcagcttgtgactttgcacttcaggattctgagtgttctctgtcttcttcctgcattgtttttcttataccatacaggtttttcattggccttgactttttgttgttaactcattcttctttgggtttattttcatttgtttctgctgaatattatttgtttcaaactaaaaataacattccacattttaattgatgtgcggactcttaatctacttaaaatgtgggctgaagttccatgattccagctagtctggaataggtcatttaactggatgttaattcacctacattgttccctaagtgacatgtgggtcccattctgctgacatatttgtgggtcctggtaacaaccatttgggtagatttgctgattcctcttttctccttagtggaagagaaagccaatacccacctcctcttgggcatgtgcttagacgcctgtgctcgctaccttctgttctccaagcagccgtcacaggcacaaaggatgtatgaaaaagctctgcagatttctgaagaaatacaaggagaaagacacccacaggtaagggaggaaaacacagaagggggaatataaaacaaaggcttcaaaattgaagggtgtgaaatgtcacactcattggtaacaggatcagcagatggtcctagatcctccttggtccccagtctactcattttcttatcaccagcaccctcaccccaactacttgtttcagaaaggatttgagactagttatcagttactaggtctgcccagaactttttgcatgatccatggtttgcacaacagagcaacctttctacagagcaggactggtcaggcttcaatggacacagcacagtatttcagagtggggtctctagatacccctattagaagcttatgaggaacggtttaatacacaaatatccttgcctcccttgccccacagttaaaatggcaagaggtgagggaagggcaagggaccacattaaaaacacttaaaccattggcatattatagaatttaagtataacgtgtaaagctctgtgttagaacattaaacacattgaattgaaatcatctctttgggtctcccctccatccgagtaagttcttagatgtaaggagtgcattgctttgtctatgaatgcttgctactgccaatataagacataacaattttaactgaatgtgtcccaaggctggggtacatgggtagggtgagtaatatgttttggaagaaaagggaggttgagctatgaattatctccatgaaagggatttataacttattatgaagagtcccttaatggagtgaggaataataaacaagcaagtacagaattcagatctccaagtactagagtcagggggcttaaagcatggcatcagtggggaagtaggtatggaagtctacctcttccatactgaaattccatttcagtagccaaattaaaaaaactcctactgggcatcttcctaaaatagatggtgtatttcttgtttttgatgagcctcagggttatcagcaggaacaacataatacagtggggctccagaggcaatcaaaccataggaggctggcttctcaaagttgctcagccttaaaggagataatatgtgtagcttcttgctgttgtttttcatttggtgcttctaactgggtaattagttggattaataagcactgtctgttacctaatttccagatttgtattatttcccaaaaggtcgaactaacattgtccactgtacaatgtgattatgattaacaaatgcccacaaatttgttaaagaatggtatccctcatcttttgtggaatgctaggaaagatgaaatcttatgtattcagagttggatgcactccacattaaagttctgtgaaggcatgtttttaaagaaaaaattgttttttcttttacatacagaccattgtgctgatgagtgacctggctactaccctggatgcacagggccgctttgatgaggcctatatttatatgcaaagggcatcagatctggcaagacagataaatcatcctgagctacacatggtactcagtaatctagctgcagttttgatgcacagaggtaggtagcaatgtaaacttaactgacttgctttaagggagggatgtcactggattgatagatttgtgaagtggtatgtagggagggcaagggccaacgaataaacatgtaaattaaaagactggttgaatggcagaaaaaggaggtattgattaggttgaagtactattgtgttcaattcacgtaacttctacagacctgcactagcctgtcgaaccccatcaagctggagaaaaccttgcaatgatagtaccttacgtcagtagtgctttacagatttctaaatgtgttcagttacaatgtgtttctcacagtgtgctggtgaagctttatgacaggaagtatcattttgtcagacatttcttagtgtcagcacactataccgatcattttcagaaacctgggatgacaggtgtattacacataccaccattcatgaaatcttgggctcatcaaagtcctcaggatatactggaaagggccgttaggaatcccacagcattcagtggagttccagcctgtcagatggggatgaaatgaggcagcaccagcttgtcgcttcataagcacacagtaaattagccctatatctgcattcatgctctctcttcagaatcaccttgaaaacatacactttcttcttactgtcccttctctctgggttattttagaacgatatacacaagcaaaagagatctaccaggaagcactgaagcaagcaaagctgaaaaaagatgaaatttctgtacaacacatcagggaagagttggctgagctgtcaaagaaaagtagacctttgacaaattctgtcaagctctaaatccatttttgtgtagggagaataatgtctagtaatgtggaagaatagctatcattcctgtctctgtggcacccgatcaatggcttaaatctgtcgtttttgatattcaggtttcctcaatttagccttagtgaaggaggggttgtacacactgccatttttgtattttaaaggaaaaatgactttcattcccaactgattatgacctttcaggatgtcgtcaagtgatgctttcagttgtaacacgtgacttggtgctgtccctgctggtctaagtagaactgtagattcatatgggctggtgttcctgtgcgctgtgggtgtggtgattcagcctggcatttctaccataagtttttggtctgctgatttgctgccctgtcttctcttactttactttatcaatacctggcaaactgaccagaattaccttcctcatggcaaagggggattatggtgaattgttgttcttatagtctgtttcatgaagcacaagtggaatttaatacataaaagagaaaaatatcttagtttgctaccagcatccagcatgaagttgtaaagtggggattaggcacgtgacagtatagcacccatttgaatttaaataaaagtgaaccatatttatctggttatataaaactaaaaatgggggtgtttatataaaactaaaaactaagaatgatgtaaccttttgtctgtgttatctgaacactctacttcctttgcagccttagtcacacaactgagtcatctcaagtactctttaaggacacacagcccaggctgttctgagtcagaataggcccctacaggtatattttaaaactcttcgtaattctaatgtgtactgctggtatagctgaactactgacctggatcttagtcctagcctttttgcttttgcaatttcagtatcttcatctctaaactagggaaacactgggattctttcttagctgtgggggaaggtatttggttagatgactttgaatgaatagactgctgtgctgaaagagctttatcacactgtctcaaagtatgtaaagatacataggtggatgctcttactgcagcagtcatgaatacatttttagccatttacctaaggaaaaagacagtttttctaggtaccatgaaggaagattgaccctgttggtatgcctgtgggggtgggatgtgagtgggactgataaactgatacttttggttcgtatgtacatactggaagaatcttcataataaatgagactacacaacaata

SEQ ID NO: 14730 - DNA, 2801 bp, Homo sapiens
ctttaaattcagcttgtgactttgcacttcaggattctgagtgttctctgtcttcttcctgcattgtttttcttataccatacaggtttttcattggccttgactttttgttgttaactcattcttctttgggtttattttcatttgtttctgctgaatattatttgtttcaaactaaaaataacattccacattttaattgatgtgcggactcttaatctacttaaaatgtgggctgaagttccatgattccagctagtctggaataggtcatttaactggatgttaattcacctacattgttccctaagtgacatgtgggtcccattctgctgacatatttgtgggtcctggtaacaaccatttgggtagatttgctgattcctcttttctccttagtggaagagaaagccaatacccacctcctcttgggcatgtgcttagacgcctgtgctcgctaccttctgttctccaagcagccgtcacaggcacaaaggatgtatgaaaaagctctgcagatttctgaagaaatacaaggagaaagacacccacagaccattgtgctgatgagtgacctggctactaccctggatgcacagggccgctttgatgaggcctatatttatatgcaaagggcatcagatctggcaagacagataaatcatcctgagctacacatggtactcagtaatctagctgcagttttgatgcacagaggtaggtagcaatgtaaacttaactgacttgctttaagggagggatgtcactggattgatagatttgtgaagtggtatgtagggagggcaagggccaacgaataaacatgtaaattaaaagactggttgaatggcagaaaaaggaggtattgattaggttgaagtactattgtgttcaattcacgtaacttctacagacctgcactagcctgtcgaaccccatcaagctggagaaaaccttgcaatgatagtaccttacgtcagtagtgctttacagatttctaaatgtgttcagttacaatgtgtttctcacagtgtgctggtgaagctttatgacaggaagtatcattttgtcagacatttcttagtgtcagcacactataccgatcattttcagaaacctgggatgacaggtgtattacacataccaccattcatgaaatcttgggctcatcaaagtcctcaggatatactggaaagggccgttaggaatcccacagcattcagtggagttccagcctgtcagatggggatgaaatgaggcagcaccagcttgtcgcttcataagcacacagtaaattagccctatatctgcattcatgctctctcttcagaatcaccttgaaaacatacactttcttcttactgtcccttctctctgggttattttagaacgatatacacaagcaaaagagatctaccaggaagcactgaagcaagcaaagctgaaaaaagatgaaatttctgtacaacacatcagggaagagttggctgagctgtcaaagaaaagtagacctttgacaaattctgtcaagctctaaatccatttttgtgtagggagaataatgtctagtaatgtggaagaatagctatcattcctgtctctgtggcacccgatcaatggcttaaatctgtcgtttttgatattcaggtttcctcaatttagccttagtgaaggaggggttgtacacactgccatttttgtattttaaaggaaaaatgactttcattcccaactgattatgacctttcaggatgtcgtcaagtgatgctttcagttgtaacacgtgacttggtgctgtccctgctggtctaagtagaactgtagattcatatgggctggtgttcctgtgcgctgtgggtgtggtgattcagcctggcatttctaccataagtttttggtctgctgatttgctgccctgtcttctcttactttactttatcaatacctggcaaactgaccagaattaccttcctcatggcaaagggggattatggtgaattgttgttcttatagtctgtttcatgaagcacaagtggaatttaatacataaaagagaaaaatatcttagtttgctaccagcatccagcatgaagttgtaaagtggggattaggcacgtgacagtatagcacccatttgaatttaaataaaagtgaaccatatttatctggttatataaaactaaaaatgggggtgtttatataaaactaaaaactaagaatgatgtaaccttttgtctgtgttatctgaacactctacttcctttgcagccttagtcacacaactgagtcatctcaagtactctttaaggacacacagcccaggctgttctgagtcagaataggcccctacaggtatattttaaaactcttcgtaattctaatgtgtactgctggtatagctgaactactgacctggatcttagtcctagcctttttgcttttgcaatttcagtatcttcatctctaaactagggaaacactgggattctttcttagctgtgggggaaggtatttggttagatgactttgaatgaatagactgctgtgctgaaagagctttatcacactgtctcaaagtatgtaaagatacataggtggatgctcttactgcagcagtcatgaatacatttttagccatttacctaaggaaaaagacagtttttctaggtaccatgaaggaagattgaccctgttggtatgcctgtgggggtgggatgtgagtgggactgataaactgatacttttggttcgtatgtacatactggaagaatcttcataataaatgagactacacaacaata

SEQ ID NO: 14731 - DNA, 4468 bp, Homo sapiens
ctcggcgcgtggtcgggggccaggagcgcgtctggcctgcagtgcgcagaggacgcggcgggagcatgttccggctcctgagctggagcctgggccgaggcttcctgcgggccgcggggcggcggtgccggggctgctccgcgcgcctgctcccggggctggcaggaggtccggggcccgaggtgcaggtgccgccatcccgagtcgcgccgcacggccggggcccaggcctgctgccgctgctggcaggtgaggggcgcgggccgggcggggccggccgggcggggacaggggcgcgggccgggcccgatgacctcagagccccttcccgcagcgctcgcctggttctcgaggcccgctgcggcagaggaggaggagcagcagggagccgacggggccgctgccgaggacggggcggacgaggccgaggcagagatcatccagctgctgaagcgagccaaggtgaggcggctccgggccctgcgcccggccgagcgcggtagcctttgtgagcggggtcttggcgttgctgcgcattactctctccgcctcgccgaagagtggatggaggctccgcgggtaaaattgccgagaatgaggtgggtcatccgagaggggattggaatccatccaggcttttccgactctaaggcctgcagtaaaacctctgcagtgtcaagtgcaaatggagatggcgccctaggcatcacgctttatgcaaacgaaatatcgggaacgttttgtagtggttttatcaattaaccagcctatctgaaatgacataatttcgcacgtatatagcggcctgaaaatggcaacttagtgttggttatgcggttcggttctcctcctgaattcttccttttctccacatccttttctatttttttttcctcctcttttcccaagttatctcatctcttccattgagctaaatacctactcgatgccaacaacgtccaaatttgtatttccattctgtagtgtgctactgacatgccatttgcactttaggaccatacctacctctcagatttaacatgcccaaaactaaacgatctttaatgcctcctcaacatacgctttcgccatctctttactaccatcagtttttcagcctaaaaacctcatagtcattcttaaaacttgtggtaccttaccattgccttccaatacacttacagtccagcaacaagtcctgttgccaacaaatgcaaaatatttctcaaatctttccccttttgtctatctcccttgctgtcaccctagtgcaaaccatcattgccaccaactatgctccagtagtctttcctggcctcctggcctcttgcaatctattctccatgcagaaaccaaagcgaccaaaaaaaaaaagagtaaattggattatgtcatctccttgtcagaaagctctgaatggctacccactgcatttatgataaaatacaaactccttgccttggcttgcaacaccccacatgatctaaaccagcatataccttgcccacccatttggcagtaatcctctggctcaccatcctcccttcacatctatttctttgcatttcttcctcaaaaccattctcttcagcttgtagggacttcactcattctctaccctctgtttgagtcattgttctccccaggtccttatttggttgactcattctcatccttactacctcagtttagctgtcacttccttggaaggcttccctaagtcctatttagaggagaccccttatcattcctttctgtcatctttatagctcttatcattagttgtaattaagcttacttgtcctatatggtcacctccagcctgcaagaaattagaaagaggatggaggacaagcagcttccttataaaatatgttgtaagatcacattccttctgcctgtgtctcttggccaaaacttcatcagatggccacacctagctgcaagggaggctgacctccctgtcatctctgtagacaatgctttgtacatagtaggaattcagtaaatgtctgatgaatgagttagcttccttctatcagttgggatgtacagttgcatacacttctgtctcttagcatatgcatctactatatgtttcattttctattattttgtcttcccttttcagttgagcattatgaaagatgagccagaagaggctgagttaattttgcatgacgctcttcgtctcgcctatcagactgataacaagaaggccatcacttacacttatgatttggtaactcttataaccagtctgaaccactgatgaggaaggttggatgggagggaagggtagttagttcttctgatttatattcctgactttcacgatgttctaaaactccttttctttttactgagttttcttttggcttcagtttcattttttgttttgttttgtttttttgagatggagcctcactctgttgcccaggctgcagtgcagtggcacaatcttggctcactgcagcctccgcctcatgagttcagacgattcttttgcctcaccctcccgagtagctggattacaggcatgcatcactatgcctggctaaattttgtattgtagtagagacgaggtttcaccatattggccaggctggtctcgaactcctgatctcaggtgatccacctgccttggcctcccaaagtgctgagatttcaggcatgagccaccacgcccggccacagcttcagtttttttacccttggggtgacataagacctctcaattccagaccaaaaaaaaccagtatcattagcatgtttttttaatgatgagtggacctagatttggtttgttaacaacaaagtatgtgcaagtatttaattctcacatgattgctgtcctgtgcttcttcttgcagattaattggtgatgtgcttttcattttcaactattttttaaattttgagggtgaaagcaaaagggaattttaaagttttgaaataagtaggaacacagtattctaaactgaaaaacaatttgtaatttgctttcagatggccaacttagcatttatacggggtcagcttgaaaatgtaagtaaattgctttgtaatatcttgaatttatgaaggagtagcttcaagggaactgtaatagtaagagtacaggctaagctgctataacaaagagaccctagaatatagtgactcaaacaagataaaagtgtatttctctttattgtgttagtccagagataggctaaagactgaaggcagacagacataggcacctttgctctctgatccagaagtccaggtttcttctaagataagccctcctctgcctaggtgagctgactcacctccagtctgcaggaagggggagaagatggactgtgagcagcttccttataaaacatgattagaagttcacgttctttctgcctgcatcccttggcctaaattttatcatatgaccatatctaacttaagggtgtccaatctgctaaaattgactgaattttttttttaagataaggtcttgctctgttgcccaggttggagtgcggtggcttaatcatggctgactgcaacctcgacctgccaggctcagttgatcctctcacctcagcctcctgagtagctgggattccaggcgtgtgccacaacacttggctaattttcttatttatttatttatttatttatttatttattgtagagacgggatttcaccatatttcccaggctaaatcgaggggactctgtaatcaaaaagatggagaagagaatgactattaggagacagtttgtagtctctgccacagtgggtttggataagaacttaatctctgaggttgttttctactcatcagagagtagtttaaggtacacagaggatgttgagggtcctgatattttgatctgttttcgcttcaaaagggtacttttctgtgtgtgagtgtgcgtgtgtgtgggtatatgggttttacaaggaatgttgcatcagactggcacttagaatccagggtcatatatatatatataaaatggggcccaattaaaagaaaaatcttttccttatgcttttaggctgaacaactttttaaagcaacaatgagttacctccttggagggggcatgaagcaggtaaggacattgcctagtattggcccctcactgaagcagttttcaaaacagtcttgtctcctgaaaactcctcctagccccaccacatgctttggtcaggaaaggtggagtttcccttctgagatctctatacaaattgccattctttcactaaatgcaacagcatgcttgccaaggaattcacagttggctcatcactctaaaagaataaagactgtggctttgaggccaccgtcagtctggaagttgatctgaaatatgccatgaaaaaatttacttgttatgagttcccttcattctctttctctcacaggaggacaatgcaataattgaaatttccctaaagctggccagtatctatgct

SEQ ID NO: 14732 - DNA, 908 bp, Homo sapiens
ctcggcgcgtggtcgggggccaggagcgcgtctggcctgcagtgcgcagaggacgcggcgggagcatgttccggctcctgagctggagcctgggccgaggcttcctgcgggccgcggggcggcggtgccggggctgctccgcgcgcctgctcccggggctggcaggaggtccggggcccgaggtgcaggtgccgccatcccgagtcgcgccgcacggccggggcccaggcctgctgccgctgctggcagcgctcgcctggttctcgaggcccgctgcggcagaggaggaggagcagcagggagccgacggggccgctgccgaggacggggcggacgaggccgaggcagagatcatccagctgctgaagcgagccaaggtgaggcggctccgggccctgcgcccggccgagcgcggtagcctttgtgagcggggtcttggcgttgctgcgcattactctctccgcctcgccgaagagtggatggaggctccgcgggtaaaattgccgagaatgagttgagcattatgaaagatgagccagaagaggctgagttaattttgcatgacgctcttcgtctcgcctatcagactgataacaagaaggccatcacttacacttatgatttgattaattggtgatgtgcttttcattttcaactattttttaaattttgagggtgaaagcaaaagggaattttaaagttttgaaataagtaggaacacagtattctaaactgaaaaacaatttgtaatttgctttcagatggccaacttagcatttatacggggtcagcttgaaaatgctgaacaactttttaaagcaacaatgagttacctccttggagggggcatgaagcaggaggacaatgcaataattgaaatttccctaaagctggccagtatctatgct

SEQ ID NO: 14733 - DNA, 4020 bp, Homo sapiens
ggacgcggcgggagcatgttccggctcctgagctggagcctgggccgaggcttcctgcgggccgcggggcggcggtgccggggctgctccgcgcgcctgctcccggggctggcaggaggtccggggcccgaggtgcaggtgccgccatcccgagtcgcgccgcacggccggggcccaggcctgctgccgctgctggcaggtgaggggcgcgggccgggcggggccggccgggcggggacaggggcgcgggccgggcccgatgacctcagagccccttcccgcagcgctcgcctggttctcgaggcccgctgcggcagaggaggaggagcagcagggagccgacggggccgctgccgaggacggggcggacgaggccgaggcagagatcatccagctgctgaagcgagccaaggtgaggcggctccgggccctgcgcccggccgagcgcggtagcctttgtgagcggggtcttggcgttgctgcgcattactctctccgcctcgccgaagagtggatggaggctccgcgggtaaaattgccgagaatgaggtgggtcatccgagaggggattggaatccatccaggcttttccgactctaaggcctgcagtaaaacctctgcagtgtcaagtgcaaatggagatggcgccctaggcatcacgctttatgcaaacgaaatatcgggaacgttttgtagtggttttatcaattaaccagcctatctgaaatgacataatttcgcacgtatatagcggcctgaaaatggcaacttagtgttggttatgcggttcggttctcctcctgaattcttccttttctccacatccttttctatttttttttcctcctcttttcccaagttatctcatctcttccattgagctaaatacctactcgatgccaacaacgtccaaatttgtatttccattctgtagtgtgctactgacatgccatttgcactttaggaccatacctacctctcagatttaacatgcccaaaactaaacgatctttaatgcctcctcaacatacgctttcgccatctctttactaccatcagtttttcagcctaaaaacctcatagtcattcttaaaacttgtggtaccttaccattgccttccaatacacttacagtccagcaacaagtcctgttgccaacaaatgcaaaatatttctcaaatctttccccttttgtctatctcccttgctgtcaccctagtgcaaaccatcattgccaccaactatgctccagtagtctttcctggcctcctggcctcttgcaatctattctccatgcagaaaccaaagcgaccaaaaaaaaaaagagtaaattggattatgtcatctccttgtcagaaagctctgaatggctacccactgcatttatgataaaatacaaactccttgccttggcttgcaacaccccacatgatctaaaccagcatataccttgcccacccatttggcagtaatcctctggctcaccatcctcccttcacatctatttctttgcatttcttcctcaaaaccattctcttcagcttgtagggacttcactcattctctaccctctgtttgagtcattgttctccccaggtccttatttggttgactcattctcatccttactacctcagtttagctgtcacttccttggaaggcttccctaagtcctatttagaggagaccccttatcattcctttctgtcatctttatagctcttatcattagttgtaattaagcttacttgtcctatatggtcacctccagcctgcaagaaattagaaagaggatggaggacaagcagcttccttataaaatatgttgtaagatcacattccttctgcctgtgtctcttggccaaaacttcatcagatggccacacctagctgcaagggaggctgacctccctgtcatctctgtagacaatgctttgtacatagtaggaattcagtaaatgtctgatgaatgagttagcttccttctatcagttgggatgtacagttgcatacacttctgtctcttagcatatgcatctactatatgtttcattttctattattttgtcttcccttttcagttgagcattatgaaagatgagccagaagaggctgagttaattttgcatgacgctcttcgtctcgcctatcagactgataacaagaaggccatcacttacacttatgatttggtaactcttataaccagtctgaaccactgatgaggaaggttggatgggagggaagggtagttagttcttctgatttatattcctgactttcacgatgttctaaaactccttttctttttactgagttttcttttggcttcagtttcattttttgttttgttttgtttttttgagatggagcctcactctgttgcccaggctgcagtgcagtggcacaatcttggctcactgcagcctccgcctcatgagttcagacgattcttttgcctcaccctcccgagtagctggattacaggcatgcatcactatgcctggctaaattttgtattgtagtagagacgaggtttcaccatattggccaggctggtctcgaactcctgatctcaggtgatccacctgccttggcctcccaaagtgctgagatttcaggcatgagccaccacgcccggccacagcttcagtttttttacccttggggtgacataagacctctcaattccagaccaaaaaaaaccagtatcattagcatgtttttttaatgatgagtggacctagatttggtttgttaacaacaaagtatgtgcaagtatttaattctcacatgattgctgtcctgtgcttcttcttgcagattaattggtgatgtgcttttcattttcaactattttttaaattttgagggtgaaagcaaaagggaattttaaagttttgaaataagtaggaacacagtattctaaactgaaaaacaatttgtaatttgctttcagatggccaacttagcatttatacggggtcagcttgaaaatgtaagtaaattgctttgtaatatcttgaatttatgaaggagtagcttcaagggaactgtaatagtaagagtacaggctaagctgctataacaaagagaccctagaatatagtgactcaaacaagataaaagtgtatttctctttattgtgttagtccagagataggctaaagactgaaggcagacagacataggcacctttgctctctgatccagaagtccaggtttcttctaagataagccctcctctgcctaggtgagctgactcacctccagtctgcaggaagggggagaagatggactgtgagcagcttccttataaaacatgattagaagttcacgttctttctgcctgcatcccttggcctaaattttatcatatgaccatatctaacttaagggtgtccaatctgctaaaattgactgaattttttttttaagataaggtcttgctctgttgcccaggttggagtgcggtggcttaatcatggctgactgcaacctcgacctgccaggctcagttgatcctctcacctcagcctcctgagtagctgggattccaggcgtgtgccacaacacttggctaattttcttatttatttatttatttatttatttatttattgtagagacgggatttcaccatatttcccaggctaaatcgaggggactctgtaatcaaaaagatggagaagagaatgactattaggagacagtttgtagtctctgccacagtgggtttggataagaacttaatctctgaggttgttttctactcatcagagagtagtttaaggtacacagaggatgttgagggtcctgatattttgatctgttttcgcttcaaaagggtacttttctgtgtgtgagtgtgcgtgtgtgtgggtatatgggttttacaaggaatgttgcatcagactggcacttagaatccagggtcatatatatatatataaaatggggcccaattaaaagaaaaatcttttccttatgcttttaggctgaacaactttttaaagcaac

SEQ ID NO: 14734 - DNA, 636 bp, Homo sapiens
ggacgcggcgggagcatgttccggctcctgagctggagcctgggccgaggcttcctgcgggccgcggggcggcggtgccggggctgctccgcgcgcctgctcccggggctggcaggaggtccggggcccgaggtgcaggtgccgccatcccgagtcgcgccgcacggccggggcccaggcctgctgccgctgctggcagcgctcgcctggttctcgaggcccgctgcggcagaggaggaggagcagcagggagccgacggggccgctgccgaggacggggcggacgaggccgaggcagagatcatccagctgctgaagcgagccaagttgagcattatgaaagatgagccagaagaggctgagttaattttgcatgacgctcttcgtctcgcctatcagactgataacaagaaggccatcacttacacttatgatttgattaattggtgatgtgcttttcattttcaactattttttaaattttgagggtgaaagcaaaagggaattttaaagttttgaaataagtaggaacacagtattctaaactgaaaaacaatttgtaatttgctttcagatggccaacttagcatttatacggggtcagcttgaaaatgctgaacaactttttaaagcaac

SEQ ID NO: 14735 - DNA, 19928 bp, Homo sapiens
tccaagcagccgtcacaggcacaaaggatgtatgaaaaagctctgcagatttctgaagaaatacaaggagaaagacacccacaggtaagggaggaaaacacagaagggggaatataaaacaaaggcttcaaaattgaagggtgtgaaatgtcacactcattggtaacaggatcagcagatggtcctagatcctccttggtccccagtctactcattttcttatcaccagcaccctcaccccaactacttgtttcagaaaggatttgagactagttatcagttactaggtctgcccagaactttttgcatgatccatggtttgcacaacagagcaacctttctacagagcaggactggtcaggcttcaatggacacagcacagtatttcagagtggggtctctagatacccctattagaagcttatgaggaacggtttaatacacaaatatccttgcctcccttgccccacagttaaaatggcaagaggtgagggaagggcaagggaccacattaaaaacacttaaaccattggcatattatagaatttaagtataacgtgtaaagctctgtgttagaacattaaacacattgaattgaaatcatctctttgggtctcccctccatccgagtaagttcttagatgtaaggagtgcattgctttgtctatgaatgcttgctactgccaatataagacataacaattttaactgaatgtgtcccaaggctggggtacatgggtagggtgagtaatatgttttggaagaaaagggaggttgagctatgaattatctccatgaaagggatttataacttattatgaagagtcccttaatggagtgaggaataataaacaagcaagtacagaattcagatctccaagtactagagtcagggggcttaaagcatggcatcagtggggaagtaggtatggaagtctacctcttccatactgaaattccatttcagtagccaaattaaaaaaactcctactgggcatcttcctaaaatagatggtgtatttcttgtttttgatgagcctcagggttatcagcaggaacaacataatacagtggggctccagaggcaatcaaaccataggaggctggcttctcaaagttgctcagccttaaaggagataatatgtgtagcttcttgctgttgtttttcatttggtgcttctaactgggtaattagttggattaataagcactgtctgttacctaatttccagatttgtattatttcccaaaaggtcgaactaacattgtccactgtacaatgtgattatgattaacaaatgcccacaaatttgttaaagaatggtatccctcatcttttgtggaatgctaggaaagatgaaatcttatgtattcagagttggatgcactccacattaaagttctgtgaaggcatgtttttaaagaaaaaattgttttttcttttacatacagaccattgtgctgatgagtgacctggctactaccctggatgcacagggccgctttgatgaggcctatatttatatgcaaagggcatcagatctggcaagacagataaatcatcctgagctacacatggtactcagtaatctagctgcagttttgatgcacagaggtaggtagcaatgtaaacttaactgacttgctttaagggagggatgtcactggattgatagatttgtgaagtggtatgtagggagggcaagggccaacgaataaacatgtaaattaaaagactggttgaatggcagaaaaaggaggtattgattaggttgaagtactattgtgttcaattcacgtaacttctacagacctgcactagcctgtcgaaccccatcaagctggagaaaaccttgcaatgatagtaccttacgtcagtagtgctttacagatttctaaatgtgttcagttacaatgtgtttctcacagtgtgctggtgaagctttatgacaggaagtatcattttgtcagacatttcttagtgtcagcacactataccgatcattttcagaaacctgggatgacaggtgtattacacataccaccattcatgaaatcttgggctcatcaaagtcctcaggatatactggaaagggccgttaggaatcccacagcattcagtggagttccagcctgtcagatggggatgaaatgaggcagcaccagcttgtcgcttcataagcacacagtaaattagccctatatctgcattcatgctctctcttcagaatcaccttgaaaacatacactttcttcttactgtcccttctctctgggttattttagaacgatatacacaagcaaaagagatctaccaggaagcactgaagcaagcaaagctgaaaaaagatgaaatttctgtacaacacatcagggaagagttggctgagctgtcaaagaaaagtagacctttgacaaattctgtcaagctctaaatccatttttgtgtagggagaataatgtctagtaatgtggaagaatagctatcattcctgtctctgtggcacccgatcaatggcttaaatctgtcgtttttgatattcaggtttcctcaatttagccttagtgaaggaggggttgtacacactgccatttttgtattttaaaggaaaaatgactttcattcccaactgattatgacctttcaggatgtcgtcaagtgatgctttcagttgtaacacgtgacttggtgctgtccctgctggtctaagtagaactgtagattcatatgggctggtgttcctgtgcgctgtgggtgtggtgattcagcctggcatttctaccataagtttttggtctgctgatttgctgccctgtcttctcttactttactttatcaatacctggcaaactgaccagaattaccttcctcatggcaaagggggattatggtgaattgttgttcttatagtctgtttcatgaagcacaagtggaatttaatacataaaagagaaaaatatcttagtttgctaccagcatccagcatgaagttgtaaagtggggattaggcacgtgacagtatagcacccatttgaatttaaataaaagtgaaccatatttatctggttatataaaactaaaaatgggggtgtttatataaaactaaaaactaagaatgatgtaaccttttgtctgtgttatctgaacactctacttcctttgcagccttagtcacacaactgagtcatctcaagtactctttaaggacacacagcccaggctgttctgagtcagaataggcccctacaggtatattttaaaactcttcgtaattctaatgtgtactgctggtatagctgaactactgacctggatcttagtcctagcctttttgcttttgcaatttcagtatcttcatctctaaactagggaaacactgggattctttcttagctgtgggggaaggtatttggttagatgactttgaatgaatagactgctgtgctgaaagagctttatcacactgtctcaaagtatgtaaagatacataggtggatgctcttactgcagcagtcatgaatacatttttagccatttacctaaggaaaaagacagtttttctaggtaccatgaaggaagattgaccctgttggtatgcctgtgggggtgggatgtgagtgggactgataaactgatacttttggttcgtatgtacatactggaagaatcttcataataaatgagactacacaacaatattgtatgtatcccagtaatctttgcatttctcaaaaaaaaaaaaaaaaaaaaaaaaaaaactttctgaagaaaataaaaacaccagaaaccttgaggtccaaatcctcagggattagactaaaactagagttttgtatgttgcagatgtaaatttcttcctattttctgtctaatctcatattatttaccatgcagctaatgccgtttaccaagtctagctcagagagataagatacaatataaatcagactgtttcagtagaaaccagtattaacgtatggtgatttcttaaaaaaattaatgtcaaccactcaccttttgcattgagaatgtttttaccttttcacaactgcaggggttactgaaaggtttttcattccaagttttatttatttattaattttaaatcatccacagtgactcagctcatggtctcgttgttggaaacactaggagttttcaggacagtctcttcatgtgggtgttttcattacagttcatttacactgttgtaaaataaggtactgaagcaaaaggaggactgatctcctttactgattggtctaaattcaaaagtgaattggttaaaatcgtgtcattaaaattttttaactgtccaatggtcactggagttttctgggcataaatatttttaaaatagaatcactcagtgtaccaaaattaaaagcattatgaaatttgcagtcataaacatgcagtggaaaactggctgtcagaatacttttatgaagagtattaggaagaccttaatttagttctgggtgctaaaaaaatcacgtgtaaggatatagtgtcagaacactgaaatctaagtctacaaagaatatcatgttttggtttgcagtgaaccacagtaagttgtcagtgctgctctgtgcttaccacttaaatcatgataaggtgaacctccataggtaaaccatgtgagaattctgtcctttcatttattttgaaccaagaactattattggattttaactctcattctgagatttcttctccaggtgatggtaaataaagtaatacgcacatgcattatgatgaggatggagggagtggttcacagcacctcaccttcgggtcctcaggtagaactgcaagagtaagaagttaggctctgatctgacatgttctcagaaactatacggttgaccttcaaataatgcaggagttaggggcatagaccccctaagtagtcaaaaatccacatctaactttgactcctccaaaacttaactactcatggcctactgctgaccagaagtcttacggataacatagtcgattgacacatattttgtatatgtattatatactgtattcttacaataaagtaagctagagaagagaaaatgtttgttaagattataaggaagagaaaatatatttactattcattaagtggaagtggatcatcatgaaggtcttcatccttgtcatcttcatgttgaataggctgaggatgagaaggggttggtcttgctatcttgggtggcagaggtggaagaaaatccatgtataagtggacccacacagttcaaacccgtgttgttcaagggtcaactgtattctgactcagaatagcttaagaccctcagggtcatagaaaaataccatcataatctcttttatggtaggttggcaatataaattattaacaaactctaaaatattaccagtacctgaaaaaaaaaaattcagcagaaaactgtgaagtggaacatttagtcactgtttttcattcattttgaaatttttatatgtttacatatatctgttgtaaaaaataccaactttccaagtactaggaatgctgaccactaagcctgatctaaagtttatgttggggacctcaggtatacaggagtggaacagggacaggagtgaaagctttgactgaagacaaatgtgggcttatggcctatctctgtcactaatttaactatatgggcaaagtactaaacctgtgtcttcatctgtaacatagggattagacaccagtgataggagggtcttggtcagtagctaatcacagagctgcttccttaaaagccttgagtacttttgtttaaaagtttaggtctacttgaaagtctgtaaagtgctaatttttatcatcctgagagatctgtttctcccctttccagttaccagtggcattctcccaaaactgttagtatctatgttatagaaagatacttaaatgctatgataaattgtatgaaaaaaactttaaaattcagcaagcaattcttaatgaaagataaaactggccctctagtaccataattagtttagaattcagtcttttaaattatttgcaccttgagactctgtgaaatgaaaacatttaacagtaaactcttgtcccaagggagcaaagtgagagtaaatgctggtccatagtgatggggaaaaaggactgtgttcaccatgagtttttcaggatgcagcataaagcttatctaaatactacacagatcattatcttttaacccaaccaatcatatattcaaactaagggaaaaatatgtaagcttttcctttggaacctgagacaccaggagccttaaaccacaaataatctactgtagctatggacagggtagtcaaatttatttcaaaacaaaagctttgttgggctgcatcaaatgcaggagaaaaggaatacttaggggcatggttaaattaccagtgtgcgtaacagtgaggtatgcctcaaataagcctttaaaactttataaactgaactagaacatacccatgcagtaatattttttcagtgctactaatgaaaaaaaaaaattaaagcctgcactggaaatttacaatatggcagaatttgttacttttaccttttgaccctaatgtacagattttatgacagggtctgtgttaaaaatctaaacattttcacaagattttaaacatcactggaaagctgaatttagaggaaacaatatcagataaaagtacaatgcccgtgacagccaacattatgtaactgggctgtatgaggttgtttagaaggctagggttaaaaagatagatagacaaaaagatttttaaaaatcacccccaaagttgatgcgctgatttgaacataagtacaccagatactacagcaaggggatatacactgcaaaaaggtcatctatttacagaagagtgatttaaagacattatggttttctttacagatgtaagaacagcaactgttcactttttaaaaactctacatctcaaccctccactattattatagtccactgaattgcctgtatcaaaggcagttttttgtttgtttttttcccatttgactctccaaatgaacttccatcatttcttcatcatctgtgggctggctctcctgaaaagtctcagggaataagtcacaggagggcaggtttttgacctgctactaaaaattaaaccacaaaaactagagatccctctcctgcaccctgttcccctcactttgtgcagttcagtcatcactatccgacagggtctcgtactgtgctgagagcagtggggcaggctctcgctcccagatcctgttctgttggtgaggagctgcttggttcaccgcagagggagcacatgcaatcggtgttggtggagtactgctgagcatccgcatagtcagagggttataaggaaactgagttgagcctgacaaaagaaaaattaggttttcattgtcatgaacataactggtatttcatccaatccaacttttgtaggatggagtagaataggattattgtaaaatggtcatgtgacaccatgaaagcaaaatgaatacaacacggaatggccaaagtctcaccacttaaatcctagccaatgatatatagcagtcagtgcgggtccaaaaaagaagagtaacatgagtagcatatgagtgagggctgctgagcccagaagagaaagcccaggctagatttttagttaagtctatatcagatgtttccatggagaatcacagagtcaggttatagcaagagctttcttaactcttcaagagaaatgcaagagtatagttctcagacgacaatggacaagtacccaggaacgtctgcagactgaggggcagcaggatgcaagtcatctgctgaatctcactgggcagattttaaagtctacaagattgagaaatgaggtaattaatgaacactgctacccttcatcagtttctagatgtttaactgtccccagaaagcctcctacagcttaagaaaacgcaaaaacaggctgggcgcagtggctcacgcctgtaatcccagcactttgggaggccaaggtgggcagatcacctgaggtcgggagttcaagaccagcctgaccaacatggagaaaccccatcttacaaaattagccgggtgtggtggtgcatgcctgtaatcccagctagtcgggaggctgaggcaggagaatcgcctgaacccaggaggcggaggttgctgtgagccaagatagcaccattgcactccagcctgggcaacaagaacgaaactccgtctccaaaaaaaaaaaaaaaaaaacccaaaaacataaaacataaccatttaatcaaataataaatctcatgtatggcctaattaattcttccctaagagatctgagaagcagcaaccactggtctgggctgtaagctttcaaactcaaaacaaccactttgcatgtgacatgagttttataatgcaaaagcctgatataatttacatatatcttacagggaagggcacatttcagatttttttcagtgacatatttgtatttaatcctaaggaaaagatggcttataattctctgaaactctaaaattcgtaatatcccagttttaaaagtctgttgctttttaaagctactgtgatcatagttattacatacattaagtttacaaataggcacaaaatagaaaataataagtatcctggagtattgtttttcatcagtttgtgtaaatgtagtgaacgtacagacagatgatggctttttttgtttttgttaagatggagtctctttttgttgcccaggctggagtgcagtggcgcaatctcagctcactgcaatttccgcctcccaggttcaagtgattctcccacctctgacctcaagtgatctgcccgcctcagcctcccaaaatgctgggataacaggcatgagccaccgcgcccagctagatgatggctttttaaactagtcttctcatttctaattttgatttcttagtatttccctaagaactttttctaagaataccaatatgaaaggtgaagtactcttagaagtggcatgggtacattcaggtacagttctcaaaagaactaaaaccaccttatttgctttgcaaatagtcaatgttcgctaccagtgtaatacagaagtgaggagaatggttgagattattttttcatagctcttcctttgtttatggtaatcaggctttgcattctaaaaatgtttcaggttatatgtgcattcagtttctattctgggtgtgtgcattggttgactcctgtaatactaacactttgtgaggccaaggcaggaggaatgagttcaggagttcgagaccagcctgggcaacgtagtgagaccttgtccctacaaaaaataaaaattaaaatgaaaatgaaaaaaattagccaggcatggtcgtgcacgcctgtagtcccagctacttgggtcgctcaggtgagaggatcacctgagcctcagaggtcgaggctgcagtgagccatgatcatgccattgcattccagcctgggtgacagaacaagacccctcaaaaaaatacttctattcgggaaagtggaacatattaatgatacagaaatgggaatataggtttccaaattagaagagttgctgaattttgaagaactaataaccaagacattgatattattgctctgtctcattttctaagttaaagcagaatccttacctgttgaagagggcctgtcttcccaggcccaccctggcgtctgcctatggtaatccccttctgaatgtacagaggagactgaagagggccgttccgttcctaagtagccttgcccaggtataggagacttagatttcctgctgtttgacttgctgatcagctttggtttgcaaactcctcctgaaagtgaaattcaagttaaagtattaatatattaagttctcaaaaattaccaaaatgctaatgattatatattgctaaatgaaaaaaaagcagaatggtaacatgaagaatccagatcctggtactcaatgaaataaaatactacaggcatacctcagagatactgagggtttagtaagtcacaattattttgctggtggatggtcttgcctccatgttgatggctgctgactaatctgcatggcggttgccaaaggctgggatggctgtggcaatttcttttcctttcatgaaagacttatttgtagcatgcaatgatagcattttagccacagtagaactttcaaaattggagttgatccctcaaacccttctttattaactgggtttatgtaatgtagtattctaaatcctttgttgtcatttcagccatgttcacagcatcttcaggggcagattcaatctcaagaaaccactttctttgctcatccctaagaagcaactcctcatccatttcaagtttgatcatgagattgcagcaattcagttacatcttcaggctccactactagttctcttgttcttttttttttttttttttttttaaggcagggtctcacctctgctgcccaggctgcactgcagtggcacaatcacggcttaccagctcactaaagcctcaacttcttgggctcaagcaatcctcccacctcagacccaagtagctgggaccacaggtacacaccaccacacccggctactttttaaaatttttgtagagatggggtctcaccatgttgcccaggttggtctcaaactcctgggttcaagtgattctactgcctcagccacccaaagtgctgggattacaggcatgagtcatcatacccggcctctcttgctatttctcctacacctgcagtgactccctccactgacgtcttgatcccctcccaagttatccatgggagctggaatcatctttttccaaactcctgttaatgttgatattcttacctcctcccatgaattacaaatgtcgttaatagcatctaaaatggtgaatccttttcagaaggttttcagtttactttgctcagatccgtcagaggaatcactatggcagctattgccttatgaaatgtatttcttaaataataagacttgaaagtagaaattattccttgatccatgggcttcagaatggatgttgtgttagcaggcatgaaaacaacattcatctccttgaacctttccatcagagctcttgggtgactaagtggattgttaatgagcagtattgaaaattattttttctaagcagtaggtctgaacagtgggcttaaaatattcagcaagccattctgtaaacacatgctgtcatctaggctttgttccatttctagagcacaggcgagtagaccaagcataattcttaagtggcctaggattttcagaatggtaaaggagcactggcttcaacttaaaagtcaccacctgcattagcccctaacaagagagtcagcctgtcttttgaagttttggactcttccagtagaaggctgttttgtctacatggaagatctgttgtttaatgcagtcacctttatcaaagatcttagctaggtcttctgagtaacttgctgcaacatcttcatcagcactttctccctcaccttgcacttttatgttacagagacggcttcttcaacctctgaatggcctctgctagcttcagccttctcatctgtggcttcctcgcctctctgagccttcagagaattgaagagttagggcttggattaggattaggttttggcttaagggaatgttgtggctggtttggtcttctatccagaccactaaaatcttctgtgtgtcacgaaacactgttttgctttattaccatttgtgtgttcactggaatagcactttcaatttccttcaaaaacttttcctttgcattcacaatttggctaactgtttggcacatgaggtctagctttcagcctgtcttggctttcaacatgcctttctcactaagcttaatcatttctaacttttcatttcaagtgacagacttagtgattcttcttttcacttgaacacttagaagccattgcagggttaattggccgaatttgaatattgttgtgtgtcagggaataagggagccagaggaggagagagacagggaacaaccagtcagtggaggagtcaggacacacaccacctttatgggttgtttgccatcttatacaggtgctcctcatggtgcccccaaacaattacaatagtaatatcaaaggtcactgatcaccatcacagagataataatcatgaacaagtttgaaatattgtgagaattaccaaaatatgacacagacacaaaggagagcccatgctattagaaaaataatgctgatagacttgcttgacacagggttgccataaaccttcagttaaaaaaaaaagcacaataaaacgaggtatgcttgcatttaaaagaaagccaggatttcacttgtaacaatcaaaacaaaaaacaaggttcgtcctcctgccattaaaatgtggtaattaaggaactgaaatttctgggacatcaagccttctttactggcctcagagtacagaaactactaaagaaagaaggcagggtgacaaaaatcatacttcactaatgaccaacccccctttcccaactggaattaatacaccacacaaagaaataatatgtaaaggaaaaactgcagaacaaagcttcttcatgctactacaggacttgagcagaggctcagcaagttttggtagcccttttgatttttccagactgtgtagctgatgaactcagcagaatttcacagaagtgagacacctctgactgtgctctaaaagaaaacatcaaaaagagctcagaagagatcagagcccaggtcatcagcaaattttttcctcagccccagcaaaacaatttcacactgccccaaattcctatacaaccagtacaattgtaattgactaagtcaccagtcttataaccttaaaacacacacacttaaagccaataaaaattggaaggtaagaacagaaaggggaaggtcttaaagttaacatgtatagttttttttttaagacctctaatctctttaatctttttcttaaccatagtgagatagatcttttgcttgaagataacaggaaaataaatctaaactaaaacagaaatactgctgaacttcaggtaattttgaaaagcacaagagatattctcaaaatattaagaaaaaggttgtaagattaaagcttaggattattatggtttttttgtgtgcttgtttttaacagaatgtataaaatctcattctagcaactcttatctggctatccagagacatgtctgaaacaatgcttatcagatacaagcattagcattccggatgatgtgatctgaagaactgtttctttttcttccctttttcctactctttttttttttccttttttgagacagggtctcactttgtcacctgggctggagtgcagtggtgcaattgcagctcactgcaacctctgcctcctgggctcaagtgatcttcccacctcggcccccacaagtaactgggactacagcgtgagccaccacacccagctaatttttgtaatttttgtagagacggggttttcatcatgttgcccaggctggtctcaaactcctgagctcaagtgatccacccaacttaccctcccaaagtgctatgattacaccttttttcctactctttttttatggcttacgattattttattttattgtgtgtgtctgtgtatgtatgtattttgagacggagtctcactctgtttccaggctggagtgcagtggtgtgatctcagctcacagcaacctccgcctctcgggttcaagcaattctcctgcctcagcctcctgagtacctgggattacaggcacacgccatcatgcccagctaatttttgtatttttagtagagatggggtttcaccatgttggccaggatggtctcgatctcttgaccttgtgatccgcccgcctccgccccccaaagtgctgggattacaggcgtgaaccaccgcacccggctggcttatgtttcttttctactgagcctaatttttacagttaaatcacttttattcaaaaacattatatttgtgttacaattacaatgcagtatgtatagatgaggactaggtgcaaacaaataaaaaatggacatcccaggagggtgacactttgggtaaaaattttcttccattttatttctgttcatattataatgtctgggtaggttttcaaaaaccttttttaagtaacggaaaccctaagaggtgactctgagcacataaagacataaatgaaatgtcttagtgatgcatcagaatttgggaaataaactggcttttttggggaaaagcagcagaaaagcactaaaatgaaagctgtacctgaatgaggtgatgggtccccttcctctcttcgtgtctcaccactggtcacaactgaggtgttggcagtaccaggcactactcccataggctgggacatgacaactccatgatcctcaactttgtcatcaaagcttcccatgagagccttcctgataatgtcttccagcccaagattactggcaggatcagcaaaagaatggcctctagagctaactgagcctgaaagagaatcaaaaacatttccacttatttctgaaaggccaatcaggaaacaaacatgcattgccccatcagcccactgaatacacacagcacttggcaagtgacctagaacaataccaggacccaccacacagagacctttttttttggagacagagtctctctctgtcgcacccaggctggagtgcagtggcgcgatcttggctcactgcaacctccgcctcccagattcaagggattctcctacctcagtctcccaagtagctgggactacaggcacccaccaccacaccaggctaattttttgtatttttaggagatggggtttcaccatattggtcaggctgatctcgaattccgaacctcaggtgatccgcccgccttggcctcccaaagtgctgggattacaggcgtgagccaccgcacccagcccagagaccatcttaatccacagataactccttaaggaaatttgtttcccaagtgaatcagtcacccacacttctattaaagttactcaacaattttctcagttccctagttttgacagtgttctttaatagtttcattctttttgttcatttatcttttcaataggtatttactggatctcagttcctttctgtgctactgggtaaaccttccttcactaaattatttatttatttttccatattagagcagtcactcccctggtatacagttggtactcagtacatatttgttggactgactactgctgtgccaattttgtattggtaaataatgtcttttcaatcttacctgacgtagtaactgctggcagattaaagatctcagttcctggctgagcagctgctatatttaagcaaacattcaagttaattaagatgtgataatcatatataccaaactaaagtctcaaaaaattcctataataaaattaatctttttatttttcatgatctcaacctttatttctcacccattaagtgaagataaaatggaagtattttttttttttgagacagggtctcactctgttgcccaggctatttttaaagggaaatcaggaaataggtaaggtaggaacatcaaaagaagagcaataagctgtgtgcagtggtgcactcctagtcccccagctactcagcaggctgaggcggtaggactgcttgagcataggaatttgaggccagcctgggcaacacagtgagactctcccatctgtttaccaaaaataaataaataaataaaaaaagaagcagtgtaacccagaaaagggaaaggaactttgcactgctggagaaaaacaaataggaaaatgctgttctcagaacaggaaccaaggctttctgacgaagaagaaaccttggactctgggatgaccgccacaaataccaacaggtttgaggcagcctgggatgtgatccagaggaaagccaccacagtgaatactatgaaaatgactgtgtttccctgcatggctaactggaaactcaggatatttgctggaaaaaacaaaagactctgttgatccttttcattcctgctgactgtgcaacttgtaatctgcagtttgaatgataacagcataagacctgggaaccgcctataataaagcagtgtgccagaaaggggaagaatttgggacataaattggtgtttccgtcattcccaacttgacgctaagaattttaaagagaaaaaaagaatgcagaaagcaagtgggcagccaaatgatgtgtcccaaagaatgtgaaagttcttttttttttttttttttcctttgagatggtggtgttttattcttgtcacccaggctggagtgcaatggcgtgatctaggctcactgcaacctctgcctcctgggttcaagcagttctcctgcctcagcctcccgagcagctgggattataggccccccgccaccatgcccagctaatttttgtatttttagtagagacggagtttcaccattttggccaggctggtctcgaactcctgacctcaggtgatctacccacctcagcctcctaaagtgctgggattacaggcatgggccactgtgctcagccagaatgtgaaattaattaatttattaattaatttatttttaagacggagtctcactctgccgcccaggctggagtgcagcggtgcgatcttggctcactgcaagctctgcctcccaggttcacgccactctcctgcctcagccccccgagtggctgggactacaggcgcccgccactatgcctggctaattttttacatttttagtagagatgggatttcaccgtgttagccaggatggtcttgatctcctgacctcgatatgcccgcctcggcctcccaaagtgctgggattacaggtgtgagccaccgtgcccggccagaatgtgaaatttctaatgagaccacagaaggatggactcttacccaagggctgagcacatgagaggagggaagagtgcatgtgcctagaaacaaacttggttgattagggaggctttaaactgacagaggagaaaagtcctcagaagaactagaaaacaatggccatggatgacagtcttcttacttatgggccaggtgacaaggtaaataaattgagcctgaaacagcagagccctgttatcatgaagtgtgtggaacaggagtcattcatttgatagatatttaattgagcagttatttgactgaattgttaagattaccttattgatcaaaaatggtcagatgaagacaatttcctataagttaaccaatgataatccttagatactgcacttgcaggataacccttcctttgctaatggagcttacagtgcagtgtggtacttgctaaggccatacaaattagaatcacctgggtagcttagtaaattttctacattcctggggctccataattcaactatttaataagcaatccaggtgactggtacctactgttgagcaagaatgtggtaactgctcagaaattagcagaatggaaggtagacatgtgaaagccactgtggaggccaacttgacaggaggagctgactcccatcaggaggcagagagaccaggatagtaatggccagagtaatggtaactgttaactgtggtagggaaggaggaggaactttttgtatggggaggtagaacatggattcaattttagatatttaaggagccagtaagttagtcaagaagtaatgaggtctgcaaagatatgtaagtagagcttagtaggaaaagctgggctacagatacaaatttgggagttttcagcatacaagcgaccattcaactccccagagtagatgagatgactcaaattataagacatgaggagaaaggggctaagaagtgagccctggggaaaactaacaatcaagggccaggcaaagcaagactgagcttctaaggagacagaagtggccagagaagtagagaagaaacaggagaacatggcatcagaaagccaagagaggaaagcatttcaggaaaggaaagtggttcactgtgtcaaaagctgcaaagagatccaataaagtaagttttaaagcattacagttttcaaaaaaataaagtcactgatgtccttgggaacactggattcagatacaatgagctgaagtgaagctgtgttggctgctgatggctttcatttagttctacttcccagtgaaggctaaatgtgccatggtgggcccaggagcccactggttctttaatataaattctcctttccaccatgaaaaatagttcttgcaataaaaaaaaaatcccagactctaaagcaattctgttagtacttcccttaagacattaattatctcctgttaaagttaggtacttgtttcatcatacagcttcagagaatagagaccatgtggcatactaaaacacccaacatagtacgctactgaaaacattaggcaagagagaaaaaactataaagtaggcttcttcagttcaaacatggcatttccctgtcaaagagtttcccactttaagggtaagacaaagactacagaatgagcagaccacacaaaggtgaaatgatttgcatctcagttcctggctgctctgagatctctagctctccgtgctcacacagattcatctctgagtgccaagagaaattgaaaacaagagtatatttttgttggtgacacttgaggagctgtaaataatagattaaactgttgaagactggagacagaaaatagtaataacaatattttttgaaaaggtggccggatacagtggttcacgcctgtaatcccaacactttgggatgctgaggtgggtggatcacctgaggtcaggagttcgagaccagcctggccaacatggataaaccccgtctgtactaaaaatacaaaattagccggatatggtggctggtgcctgtaatcccagctactcgggaggctggcccaggagaaacacttgaacccgggaggcggaggttgcggtgagccgagatcgtgccactgcactccagcctgggccacagagtaagactccatctcaaaaaaaaaaaaaaaaaaaagaaagaaagaaaggctatctgtaagcctgataacaattctggtcagcattctaaaatatttgtcttttattttgttgccacctaaacagaacctagtaattaagagcgaggacaagttcagaaacagtggtgacactggctcatccttttttccttggtgttcaacatttattaatcacaagagtgacacagatctaaacaaacatccaccaggcagttcacagtgcaaggcccccactttcctttcttttgacaggatcaggagactagtagatggtagatcacagaaataaagcagatcgtcctttcctcagctgccaccacagtgcttggtccttccaaggaagctaaggccacgttgggatgaggccctcacttcatccggcaactaccaccacgtccggcagcgccagccccacacttgcccataccatgtcctctgtctccgagctcgcctgcatctactcagccctcactctgcatgacaatgaggtgaccatcacggaggataagatcaatgccctcgttaaagcagctggtgtaaatgttgaacctttttggtccagcttgtttgcaatggccctggccaatgtcaacattgggagcctcatctacaatgtaggggctggtggacctgctccagcagctggtgctgcaccagtgggatcctgcccactccactgctgctgctccagctgagaagaaagtggaagcaaacaaagaagaatctgaggagtctgatgatgacatgggcttttggttgttttgactaaatttcttataacgtgttcaatacaaagctgaacttaagaaaaaaaaaaaaagaa

SEQ ID NO: 14736 - DNA, 760 bp, Homo sapiens
tccaagcagccgtcacaggcacaaaggatgtatgaaaaagctctgcagatttctgaagaaatacaaggagaaagacacccacagaccattgtgctgatgagtgacctggctactaccctggatgcacagggccgctttgatgaggcctatatttatatgcaaagggcatcagatctggcaagacagataaatcatcctgagctacacatggtactcagtaatctagctgcagttttgatgcacagagctgccaccacagtgcttggtccttccaaggaagctaaggccacgttgggatgaggccctcacttcatccggcaactaccaccacgtccggcagcgccagccccacacttgcccataccatgtcctctgtctccgagctcgcctgcatctactcagccctcactctgcatgacaatgaggtgaccatcacggaggataagatcaatgccctcgttaaagcagctggtgtaaatgttgaacctttttggtccagcttgtttgcaatggccctggccaatgtcaacattgggagcctcatctacaatgtaggggctggtggacctgctccagcagctggtgctgcaccagtgggatcctgcccactccactgctgctgctccagctgagaagaaagtggaagcaaacaaagaagaatctgaggagtctgatgatgacatgggcttttggttgttttgactaaatttcttataacgtgttcaatacaaagctgaacttaagaaaaaaaaaaaaagaa

SEQ ID NO: 14737 - DNA, 28985 bp, Homo sapiens
gccaggagcgcgtctggcctgcagtgcgcagaggacgcggcgggagcatgttccggctcctgagctggagcctgggccgaggcttcctgcgggccgcggggcggcggtgccggggctgctccgcgcgcctgctcccggggctggcaggaggtccggggcccgaggtgcaggtgccgccatcccgagtcgcgccgcacggccggggcccaggcctgctgccgctgctggcaggtgaggggcgcgggccgggcggggccggccgggcggggacaggggcgcgggccgggcccgatgacctcagagccccttcccgcagcgctcgcctggttctcgaggcccgctgcggcagaggaggaggagcagcagggagccgacggggccgctgccgaggacggggcggacgaggccgaggcagagatcatccagctgctgaagcgagccaaggtgaggcggctccgggccctgcgcccggccgagcgcggtagcctttgtgagcggggtcttggcgttgctgcgcattactctctccgcctcgccgaagagtggatggaggctccgcgggtaaaattgccgagaatgaggtgggtcatccgagaggggattggaatccatccaggcttttccgactctaaggcctgcagtaaaacctctgcagtgtcaagtgcaaatggagatggcgccctaggcatcacgctttatgcaaacgaaatatcgggaacgttttgtagtggttttatcaattaaccagcctatctgaaatgacataatttcgcacgtatatagcggcctgaaaatggcaacttagtgttggttatgcggttcggttctcctcctgaattcttccttttctccacatccttttctatttttttttcctcctcttttcccaagttatctcatctcttccattgagctaaatacctactcgatgccaacaacgtccaaatttgtatttccattctgtagtgtgctactgacatgccatttgcactttaggaccatacctacctctcagatttaacatgcccaaaactaaacgatctttaatgcctcctcaacatacgctttcgccatctctttactaccatcagtttttcagcctaaaaacctcatagtcattcttaaaacttgtggtaccttaccattgccttccaatacacttacagtccagcaacaagtcctgttgccaacaaatgcaaaatatttctcaaatctttccccttttgtctatctcccttgctgtcaccctagtgcaaaccatcattgccaccaactatgctccagtagtctttcctggcctcctggcctcttgcaatctattctccatgcagaaaccaaagcgaccaaaaaaaaaaagagtaaattggattatgtcatctccttgtcagaaagctctgaatggctacccactgcatttatgataaaatacaaactccttgccttggcttgcaacaccccacatgatctaaaccagcatataccttgcccacccatttggcagtaatcctctggctcaccatcctcccttcacatctatttctttgcatttcttcctcaaaaccattctcttcagcttgtagggacttcactcattctctaccctctgtttgagtcattgttctccccaggtccttatttggttgactcattctcatccttactacctcagtttagctgtcacttccttggaaggcttccctaagtcctatttagaggagaccccttatcattcctttctgtcatctttatagctcttatcattagttgtaattaagcttacttgtcctatatggtcacctccagcctgcaagaaattagaaagaggatggaggacaagcagcttccttataaaatatgttgtaagatcacattccttctgcctgtgtctcttggccaaaacttcatcagatggccacacctagctgcaagggaggctgacctccctgtcatctctgtagacaatgctttgtacatagtaggaattcagtaaatgtctgatgaatgagttagcttccttctatcagttgggatgtacagttgcatacacttctgtctcttagcatatgcatctactatatgtttcattttctattattttgtcttcccttttcagttgagcattatgaaagatgagccagaagaggctgagttaattttgcatgacgctcttcgtctcgcctatcagactgataacaagaaggccatcacttacacttatgatttggtaactcttataaccagtctgaaccactgatgaggaaggttggatgggagggaagggtagttagttcttctgatttatattcctgactttcacgatgttctaaaactccttttctttttactgagttttcttttggcttcagtttcattttttgttttgttttgtttttttgagatggagcctcactctgttgcccaggctgcagtgcagtggcacaatcttggctcactgcagcctccgcctcatgagttcagacgattcttttgcctcaccctcccgagtagctggattacaggcatgcatcactatgcctggctaaattttgtattgtagtagagacgaggtttcaccatattggccaggctggtctcgaactcctgatctcaggtgatccacctgccttggcctcccaaagtgctgagatttcaggcatgagccaccacgcccggccacagcttcagtttttttacccttggggtgacataagacctctcaattccagaccaaaaaaaaccagtatcattagcatgtttttttaatgatgagtggacctagatttggtttgttaacaacaaagtatgtgcaagtatttaattctcacatgattgctgtcctgtgcttcttcttgcagattaattggtgatgtgcttttcattttcaactattttttaaattttgagggtgaaagcaaaagggaattttaaagttttgaaataagtaggaacacagtattctaaactgaaaaacaatttgtaatttgctttcagatggccaacttagcatttatacggggtcagcttgaaaatgtaagtaaattgctttgtaatatcttgaatttatgaaggagtagcttcaagggaactgtaatagtaagagtacaggctaagctgctataacaaagagaccctagaatatagtgactcaaacaagataaaagtgtatttctctttattgtgttagtccagagataggctaaagactgaaggcagacagacataggcacctttgctctctgatccagaagtccaggtttcttctaagataagccctcctctgcctaggtgagctgactcacctccagtctgcaggaagggggagaagatggactgtgagcagcttccttataaaacatgattagaagttcacgttctttctgcctgcatcccttggcctaaattttatcatatgaccatatctaacttaagggtgtccaatctgctaaaattgactgaattttttttttaagataaggtcttgctctgttgcccaggttggagtgcggtggcttaatcatggctgactgcaacctcgacctgccaggctcagttgatcctctcacctcagcctcctgagtagctgggattccaggcgtgtgccacaacacttggctaattttcttatttatttatttatttatttatttatttattgtagagacgggatttcaccatatttcccaggctaaatcgaggggactctgtaatcaaaaagatggagaagagaatgactattaggagacagtttgtagtctctgccacagtgggtttggataagaacttaatctctgaggttgttttctactcatcagagagtagtttaaggtacacagaggatgttgagggtcctgatattttgatctgttttcgcttcaaaagggtacttttctgtgtgtgagtgtgcgtgtgtgtgggtatatgggttttacaaggaatgttgcatcagactggcacttagaatccagggtcatatatatatatataaaatggggcccaattaaaagaaaaatcttttccttatgcttttaggctgaacaactttttaaagcaacaatgagttacctccttggagggggcatgaagcaggtaaggacattgcctagtattggcccctcactgaagcagttttcaaaacagtcttgtctcctgaaaactcctcctagccccaccacatgctttggtcaggaaaggtggagtttcccttctgagatctctatacaaattgccattctttcactaaatgcaacagcatgcttgccaaggaattcacagttggctcatcactctaaaagaataaagactgtggctttgaggccaccgtcagtctggaagttgatctgaaatatgccatgaaaaaatttacttgttatgagttcccttcattctctttctctcacaggaggacaatgcaataattgaaatttccctaaagctggccagtatctatgctgcgcagaacaggtaagtacagcagccagggagtaggactgtgggcaggaaactttgactctgggatgttacataatattcattgtctactggtcatctgggtctcccagaaattgggtgtcacactcaaagtgttccatccctcatctttgaaattgtcagtctttttccagtttgcccctactgtttccatcagcctgcctagtggggcacacaacatctctggctgccctgtgacaaaactaactaagttttctgttgctgcttgaagtgggaagggaagttagagttagaactttagtttaacttttcctagaagaggaaagagcagtgtgaaagctgctggggataatatattaatactctgaagaagccattttgctggtataaatagagttcaaagatgaagcatctaggttgtaagcagagaactcctctagagagttgtatttgggatgaatttagggagagacctaagactagcttcccttcaggttttagtggtgcagaagttggtgcgagaggtttggagtgacatggagcctgatgctgtagaaagggtgctcactgaggccaggccctggcactgttccctactgtcctactcaccagctcctttgttctcatcaggacctgcatagtctccttgcattttgattggacactagataggctagagcttcctggagcctttgacttcaagtcttttgaggagctttgagcttggcccatgccagggaacactgcagcttggtcaatctttcttggagttgtaacaaacatgcctagttcttgattgggtatgaatccctagggtaagaagaagcccagagcctaataaacattgttgagtaagacaaattcatagtcttctagaggtgaaagctagtaacaattagcctctgagttacatggtactctgtacttttcattttgttttattaagagaagcatgagactagaaaagacatggccagatctgaggcttcgaaaggctgatataggttatgaggggaattgtttgtagacctcttgctccgactgggagcgtcttctgggcagtgtccacttgccctgtgttatggctagagagggccctcttgccaagttttgagcgtagggaaggaaggggatgcttctgttcttctgagaacagagcagaacagtagggtcataagttctcccctggcaaagcactagagaacaggtgagctttttagtgccacttctgtaagaaactagagccaaaactgaagaaaagaaccaaagctgagctcctaaatggagaagggatttctgtcacatttcctctgcatctctgtaaaaagcagcagtcagtcggcctgcttgggttgactcaaccctctccagttgattgagggtccagggctacagagttgggttaaatgacttctattgccatagctaggagtcccatttctgcaaaagaaacttttatcagagacttatagcttgaaagaaatataaaatgactaaagctcctcagaagctgtatgaggtcaacagttggaatcctcactgtagggcggcctgaactgtttagggtagtattactttgaacaggggtaaggctttcacacatggagaagttgattcactggaggccatctgttagtgggagatgatgaatactgctggctatgtcagttattaaaattagggcagcattcctagctttttgtgtcctaagttatattaaatggatgacttaaaaaaactgctttgagaaatggcagatttgacactacttagactttaagcaaagttccctcttcccattttacacttcctttactgataatgtttaaactgagctggaaaaatgaagataaaaagaatttgtgaaaaggtaaatgggccgggcgcagtggctcacgcctgtaatcccaccactttgggaggccgaggtgggtggatcacttaaggtcaggagttccagaccagcctggccaacatggtgaaactctgtctttaccaaaaatacaaaaattagctgggcatagtggcgggcacctgtaatcccagctattcgagaggctaaggcaggagaatcgcttgaaccccggaggtggaggttgctctgagccgaggtcacgccattgcactccagcctgggcaacaagagcgaaactccatctcaacagaaggaagaaaaaaaaaagaagaaaaggtaaatggctgattattgattttgctttacagacaggaatttgctgttgctggctatgaattctgcatttcaactctagaggaaaaaattgaaagagaaaaggaattagcagaagacattatgtcaggtaggaaacccattatctgggcattgccttttctccacaaaaggctttactttacacttttgagaaatggaaagagatctaaattgggaagagggaaagttacctattttgcaaaataagtgtctgtctttaaggtatcagcagaagttttggaataagatgttttatttaaaatatttgactgctgttttggtggtggttttttttttaacccccttggtaacatggtcataatttatttgttaacttttagttacatataacttaaggaaaattggggagcagaaggagaaggtgtttctcgtatctcttagttcagctaccaatcaaaatgcttattacgttttagccctagatatacagcaaattaagaaagaagagaaaaaaagctcatgtttttacaatccatcctcactcattctggaggctaggaatagaactggatgagcaggaagctctctagctctccaccattttgggtttcttaatttgggttgaagtattgagaattttcagatttgacatttattcaatacctactctataccaagagctaccgagatggtagggatacagcagtcaactcttctgtacctagtggtcttctaactctctcttgaacatagagtagtcccccgttatccatggggaatatgttccaagacccccagcagatgcctgaaacgacttctaatacactgtgtttttttcttatatatatgtacctatgataaagtttaatttataagttaggcacagtaagagattaacaacaataacttttaatagaacaattataactatatactgttaacagtgtcacagacaggagattcattcttattgtagatcttatcaacctcagcatacagttttttgttttttgttttttgttttcttactaagttgagaactttcaccttttcattaaaaggaagcactttatgacttctctttgtcatattcaaattgccagtatcaccactctcacactttggggccattatgtaaaatatggattgcttgagcacaagtactgcaacattgtgggttgatctgataactgagactgctgctaagtgactgaggccagctgccgtatacaacttgggtacactggacaaagatgattcatgtcctgggcaggatggagtgtgacagtgtaagatttcttcatgccacccagaatggcatgcaatttaaaaacttacggattatttcttgaatttttcatttaatatttttcggactctggttgactgcagataactgaaaccccagaaaatgaaactgtggagtaggagggatcactgtacaccaatttttttgttttcatcactccactgaagctacctttatcaaagtcaccaaatccaatggttacttctcaatccttaacttactcatcagcagctttaacttaggggatcactgtctcctactgaaaatactttcacttggcttctgggatgcctcactggtctctctagtgaggtgaatagacttccctacctcttaatgttggcacgccttagggctgttttcagccctattctcttttctctctgccccaacacctaggagatatcttttagttccatagttttaaatattagatttataccttcagccccaacttgcccccaaatggcagacttataattatgattgcccacccgacatcttgacttgaagtctaatggtcatctcatacttaacatgtccaaaataggtctcagttttgccgctcacaacttgtttcgtcaccagtcagccccagatttgtaaatggcacactactcatttagttgctttggccaagaacctaagaattgtccatgatttcttcctcattcctcatatctaatccatcagcaagttatactggatcagccatcaaaatatatccatactgaccatgtctcatcccattaccctactgctttggtccaggccatcactgtttcaagacctcagtacctttgtatcacctttagaataaatttagaatccctgcatggacctgtaaggcgcttatgacctgggcccacccacctcttccatgccatctgctgctctccccttgctcgttccagtctcaccacactggtcttattctggcacattccaagcttagtgccacctcaaggcctctttgcttgatattccccctacctagactgttctctcttacctttctctggccaactcccgtacttcactcaggtctctgctcaaatagcacttcctcagagtgctcccttcactaaaactatcatctcttcccaccttactattgctctactcctctttcctttacttttcttcatcacacttaaaagtagaggtgtgtgtgttgtgtgcttgtgtttctccactaaaagtatgtttttgtttaaaaatttttagtctttgtcttccatatcaaagaaggatagagacttcatccattatactcagtgctaaatcctcggtgcctagaacagtgcctggcacataatagaggctcaataattactgaatgaaagaacaaaagacccaagaaagaccagcaaataaatccagtttcagtgcagtgtggaagtgctttgaggaaatccacaagaggtgtaaaaacaagtctagctgtcaagtaagtcacttctgaactatttacacctttgctgtctttcatttatagtgttgactatggtttcttaggagtgtaaagctatattttctgattcaaaaaataataccagtaaacactgaagaaagtttagaaaagcactaagtaaaaatcatctgtaatcatactattaagaaagagctactgttttatttattactacggcttttcgggttacattttaagaaataaatttgggatgatactgtatatcctactttgtaacctgagttttaacaatttagtaacatattatgaaaacactttttttttccaggcaaaggaattcttgttagatagagcaagctaatttctattataaatattatttttacattttactagttgcacagtatagaaaatgtgttacatgattcttcatcttattttttctagaaaaggaattcctacctattcagttttgcacaaagcaaatccattatcaaatttacgtgctttttattgacacaactatctctattctaggataacattacttaattacataaaattacattacttaattacataaaaccttgctctaggataattattttgttacctatgttgtagacatatatgtacttactgaggaaatgcccataaaaaattaagtgaaaactttggttacaaaacagtatagttagtatgtagactaaaaataggaatggaacaaaggctgaatgatagatatcaaaatacaggcagtgattctctttggttggtaggtttatagggaatttatattttatttgtgtttctctgagtattctataattttgtacaaatttatatttttctttttaatttccaatgttatctgttagtataaaaagtcaaataatattaatagtacaaagcttaatttaagagagcattttcttggctatctcacccaccccatctattttttttattttttaatttttaattttttttttttttttttttttttgagacagagtctcactcttgtcaccaggctggagtgcagtggtgcaatctcggctcactgcaacctccgcctcccgggtttaagcggttctcctgcctcagcctcccgagtagccgggactacaggcacgtgccaccatgcccagctaatttttgtgtttttagtagagacagggtttcaccatgttagccaggatggtctcaatctcttgacctcataatctgcctgcctcagcctcccaaagtgctgggattacaggtgtgagccaccgcacttggccctattttcaacttttgtttttgagacagagtcccgctctgtcgcccaggctggagtgcagtggcgtgatctcggctcactgcaacctctgcctccccggttcaagcgattctcctgcctcagcctcccgagtagctgggactacaggcacccgccaccacacctggctatttttgtatttttagtagagactgggttttaccatgttagccaggatggtctcgatctcctgacctcatgatccgcctgcctttgcctcccaaagtgctgggattacaggcatgagccactgtgcccggcccctattttcaactcttaaccagtttcctctggtatttaccttcacatttctcaataatataaaattgctatttcctagttcattattttcagaatatgttgatttatggaaaagtgaagatttagtgcagtttctggttgtgtctacattatgagtgtatgaatagtgttagctgctgagccaagtaacatgattacacagttacatttccttttgtgtacgttttgcttcctctgaagttaactaggtttttttgtggctccgtttgttatgtatatgccagattcttcacttttacatattacttgctttcttcaattcataagctttcccagtattctagagttcatgttggctcacttttcattggcatggctggccataggcattcagtcttcatcttcttttttttgtttttgtttttgttgagacggagtctcactctgtcacccaggctggagtgcagtggctcaattttggctcacagcaagctccacctcctgggttcaagcaattctcatgcctctgcttcctgagtagctgggattacaggcgtgagctaccacacccggctaattttgtatttttagtagagacgggatttcaccatgttggccggcctggtctcctgacttaggtgatccacccgccccagcctccccaagtgttgggattacaggcgtgagccaccgcgcccggccgcgttatatctttttcatcctgtaagtttcattttagtggtatttggggaaggagtggagaggaatgcctgtgttcagttcagaatagtaaatctgttattgggcatcaagatagtgtccaaacctgtttttttaaagtggattcttagcactgagatttccaagtcaagagtagcacattttaaggttgttgatgactattgccaaattgccattgaaaggactgtgttaatttacatttcctggtttggctatttatgtactttgtgactttggccaaattacataatccctgtgtgctttttcttcagtgtgggattaagagtaacactcataggacctttaggaaggtggaatgagttaatacataaaacgtacttagaataatacattgtagctgctcaaaaagggtttgttagtggtttttattattgtgataagcctatgtcctcctccccaaaactcattaacttttataatctttgttagcttgatgatatggccttgatgcattatctagcatttctttgataaacagtgaggtttatctttttttttttctcaccatgtcttagggtgctaagaggtttattttttattggagctttattgtaaaaatattaatcctttgtctcttgggttttcctcctgatttgtgtttatagagtggggtttttttttctaataaaaagggaatgtgaaattaacatttgtataaagaatttatgagaattggcgagggacagtggctcacgcctgtaatcccagcactttgggaggccaaggcgggtggatcacttgaggtcagtcgttaaagaccagccctggaaacgtggcaaaaccccatgtttacaaaaattatctgggcatggtgttgcgcacttgtagtcccagctactcgggaggctgaggtgagaatctcttgagcctgggaggtggaggttgcagtgagctgagatcgcaccacctgtggtccagcctgggtgacagagcaagaccctgtcttggggctggggggtggaagaggattgtgagaatagacaagtgatccagcattgccagtacctttggagctcttcctacctgggatactattctccttaatcttgtcactatcattcaatggcatgatctcggctcactgcaacctccgcctcctgggttcaagtgattctcctgtctcagcctcccgagtagctgggattacaggcatatgccaccacgcctggctaattttgtatttttagtagagacggggtttctccatgttggtcaggctggtctcgaactgccgacctcaggtgatctgcccgcctcaacctcccaaagtgctgggattacaggcatgagccaccacgctaggcctatttgcttttctttcattttactctgtgtcccttaagaagatgtcatttagtttttgcatattgcttttaaaaatttaaataggctgggtggagtgactcaagcctgtaaccccaacactttgggaggccaaggtgggaggatcgcttgagcctaggagttttgagaccagactgggcaacatggtgagatcctgtctcttcaaaaaataaaaaaattacctgggcacggtggcacatgcctgtggtcccagctacttaggagactgaggcaggaggataacttgagcccaagaggtcgaggctgcagtgagctatcatagtgccactgtccttcagcacaggcaatagagaccctgtctcaaaaaaaattaaaattatacaaatgaatcataatatgtattcattttagggcatttttatgacttgcatgagtaatcttttcagaattagatcagaattcatttctaatttcctttgcttttattcatctttaataaatactgagtagctgttctgtgccaggtattctaggatttgaatagcagcaagtaaggcaaaagtccttgctcttctggagcttaatgcttagagagatatttttcaagctttgaaattgtatgcattctcactcatctttccttataattttctatttttttccttttatttctaaacagttttaactttttagtatatctggtattttggtgtgaagctggtgactgttttcttgcagatagtaatcaatctatatgtactaattagtacatacttgggtttcttttggggttttccattctgatgtatttacctgatgagttttataacagtatacattctttgaattatatatttgagttatatggtaggacagttgacacatgcttcctttgtaaaattccttcccacatttcactgttttcacatgaattttagaattattttgtcaagttcgtaaagtgccttcagactgaattatcagatatgcattatatttataaattagtttggggagattgccatctgaataagttagcatatctttgactgcaaagagcagaaatttcagctaaattaggtttaacagtaaggacatttatgtcaagtaactggcagttcagcaatagggagcaggctgttgagttagttgacagtgtgattcactgaaatcataaaggaacaggctctttccatccttcctcactcatgtattggctttttccccatgctcccctggtggttgaaacgtgaaactataacaattcccaggaatctcatccagaaatgacagtgtccagaggaaaaggagacttctttgatgtttctcataggatcaaggtaatctttcctagaagtctccaagtagatttgtccttacttctcattggttagaattgggttacatgccatttctaacccagtccttggcaagaaaaatggattatcatgattggctaaaatacatcagtctcctttcctgaggatgtgagtcatgtgagaaaagaacggatactgggacaaagcagctgctctgctagcaaaggaagatctttgtaatagtgagccgtctcactgaggaacattctatagctcctgcttatagttttcttcatatagatgacagctatttattaaatttgattctaactgactccttgactgaactctttgcttttcagttgatattcacactaattccagatttataatcatacattccggaaatcatgatacaggttgagcatcccccagaaccgaagctttctgagtgccaacatgatgcataaagaaagtacgcattggagcatttggatttgggtttttggttttgggatgctggcagtatccaaaggaaatattccaaactcaaaaaatctgaaatctgaaacacttttggtcctaaacatttcagataaggaatacttaacctgtaattgtttccttccagagagttatactactgtctcccttccccaccctttataaaattagttcattggctgtaccttcagaacatcaagcaatagtagtaataggaaacttagtcttatatccaatttggtaccaagatatatgaatagatttattactattatatatctagagcggaccaggcttgcttgtaggttaattgcttagtacctgtgtagtgctggataatatttaatgctgatatgtaacttgcgtttcttatgagatccacagtaaatttcttattgtattgtttgtactattatgtttgtattatttgttatcgcaggattgttattaatgtgataaaatgaattgggatgctttctgtattttctattctgaaataagtgtgggatattgcattggaatggtctgttccttgaaagttgcagagtctgtgatgccagatggaccagaactcctgagttaattctccggcagctttttttttccttcttgattactcatgtatttcttccattttcttaatttcaatataggacagtgctaaaaacataaacattaataaatatctattgaataaatgaacgtatgggtgaacaaattttataactattaatttcctagaagaaactttaaggaattatatttttaaagcatattttacactactcttacgtatctgagatcctcttccttttctagatcctaattttatggatttccttttaaattagtaaaaagatgtttcccattgattccttcctcctcctttccttgaaagtttttattttcatatattaaataaaacatttctagaaagttatttttgatgacataatatttggttccatgagtgcttaaagtctggagcctgagttcagattctggttctgccacttactagcagtggacaagttatttaacttctctgttctcagcttccttatcaataaaatgaaaataataatagaacttacctcatagagttacaagaattaaatactccaggactatgaccagtactcattaggcactattatataagagtttgtggaatgtgatatatttactaatcttatttattatatgatttggcacctatattttactattatcaatttatgaaggaccttcctggccattttatttatagtttctccttggtttttgttaattttgtttattcattcaaagagccaacttctggtttcattaattttctttattgtctttctattttccatttcacttatttctactttgtctttattacctctctcctgtttgctttgggtttattttgttcccttttttctggtcccttaggtgggagatgaggttattgatttaaggtttttcttctaacataattgccatttataactataagctttagctgcatctcattaattttggtaagttatattttcatgtatctcaagtattttccaattttgggggggatttcttctttgaccctttggatatttaggagtatattgattaatttccacatacagtgaatttctcaaattttcttctgttgaatccagtttcattccattgtgttcagagaacaactgtgcttgattttatttattgagatttgttgtatggcctcacatatggcttatcctggagaatgttgtatgtgcatttgagaagtatgtgtattctgttgaatggagttttctatgaatgtctgttaggtctagttggtttatagtgttattcaagtcttctgggtccttactaattttgtctagttgttctaatttttttttttttttttttttttgggatggagtcttgctttgtcgcccaggctggagtgcagtggcgtgatctcggctcactgcaacctccacctcccgggttcaagtgattcttgcacttcagcctcccgagtagctgggagtacaggtgtgcaccactgcatctggctaatttttgtatttttagttgagatcgggtttcaccatgttgtccaggctggtctcgaactcctgacctcaggtgatccgcctgcctcagcctcccagagtgctgggattacaggcatgagctactgtgcccagccagtttttggtatttttagtagagacgaggtttcaccatgttggccaagctgttcttgaactcctgacctcaggtgatccacctgcctgagcctcccaaagtgctgggattacaggcatgagccaccatgcccggccgataaattttttaaaatcttctttctttatacatgtttctgtgctctgtttagacagtctcatagatatatttatttgttacgaattgtcccttcatcaggaaaatgattcctttttccctatttaaggtatttgttacgaattctagttttatattatctactatatcttacccttaacttttctgagtcattttcagtgtatcttttatagaaggctatggttggaatttttttaaaacctgagtatcattgtcttctgatacagaatctgaaaaccttttaaaaattagtgaggcgaaaaaaattagccaggcatggtgacgggtgcctatagtcccagctactcgggaggctgaggcaggagaatggcacgaacccagaagccagagcttgcagtgagccgagatcgcgccactgcactccagcctgggcgacagagtgagactccggctcaaaaaaaaaaaaaaaaaaaaaagtattcaggctgggtgcagtggctcacgcctgtaatcccagcactttgggaggctgaggcaggtggatcgcctgaggtcaggagttcaagaccagcctggccaacatagtgaaaccccgtctctactaaaaatacaaaaaatgagctaggtgtggtggcgggtgcctgtaacctcagctactcgggaggctgaagcaggagaatcgcatgaacctgggaggcggaggttgcagtgagccgagatcacgccattgcactccagcctggttaagaagagcgaaactccatctcaaacaacaaaacaaaacaaattagtattgaaagggataattggtctaattattgcattttaaaaagtgctttccatttttgttaattcctttgttttcagttcctcttacaggaacttttccctctctgatctgtatttgtattttgtagggaaggtatatgtatatatgattttcagttgtataaggagtaacctaaacatttcttaaagacagttgactcagaggaaaaaaaatttttttcagtttcttctctaaaatgagatgagtacattttaacattatccttctttcccttttcctcacttgttttttctctgtgatctggaattttagacttagtggaatttattgcagaggagaattctaaagcctgcatatttgccttgttttttaaatagtctattttctcctgctcagatgctttgctggactcagaagttaaatgagcataaggttagggagttgtctgtttatgaagcttgcttagtccctggtgaaccttcatttttagcatccagttctctggagcttctgtagtctattctggctcaatgcttctgtcccacatgctctggcctcttaccctggaatgtcatttacctgtatgttgacctctcttctctatccttcacattatcccctcttccatcagttttctcatgtatattttgggagtttcttcagttgatattccacattaccaatttattattaagaaaagtcagttctgtgcttttcttttgatttgttttttgttttttgagatagggtctcactgtgtcgcccaggctggagtgcagtggtgcagtcatggctcactgcagcctcaacctcccaggctcaactgatcctcctacctcagcctcccaagtagctgagactgcatgctcatgtcaccatgcctggctaatttccggattttttcatagaggcggagtttcaccatcttgcccaggctggtcttgaacttctgagctaaagcaatctacctgccttgacctcccaaaatgctggcattacaggcatgaggcatcacgcctggcttccctctgatgtaattttttaaaattagatttcaaacaaaagtaaagttttgaggacttaccaaatatctgtgtactttcagccttggccagatttcaatattttaccatatttgctttagaattttttttggatatttaaatccctgtatacccttccctccctgcctaggggtagctactatcctgagtttggttttgtttgcctacttattgcacttgtatatatcaataaacaatatattgctgggtacagtggctcacacctgtaatcccagcactttgagaagccgggacaggtggatcacctgaggttaggagttcaagaccagcctggccaacatggcgaaaccttgtctctactaaaaatacaaaaattagcccaacatggtggcgggcgcctgtaatccccactactcgggaggctgaggcaggagaatcgcttcaacctgagaggcagagattgcagtgagccgagatcgtgccactgcactccagcctgggtgacagagtgaagactccgtctccaaaacaaaaaaacaatatacaatagggctaatatgtttttaaacttaatatgaatggtatcatactgtacaattggttttgtagtttgcttttgtcactcaatattatgttgatgagatttattgggctgctatttaaagcagttttcttagcacagaggccctgtttgcttgccaaactgcatgtctgctgggttgcgtctgtctttaaagggtgacttcctctaattaatccactggggtgaggggtaagttgaacctgttttttctgttcacaagtgtggatacaagctaaaggtggccctgtgtggttccctcactacaaccatggtatagtagtccattgtagaaatataccacagttctattgatggacctgttgggttattctatatgttttgctgttaaaagtcatacttcactgaacattcttggacttgcatctttgtgcacacctggaatattacataaaagtggagttgccagggtgcatataccaaattgcttaacaggctgggtgtagtggctcacacctgtaatcccagcattttgggaggctgaggcaggcagatcatttgaggtcaggagttggagaccagcctggccaatatggtgaaaccccatctctacttaaaaaaaaaaaaaaaaaagccaggcatgctggtgggtacctgtaatcccaactacttgggaggctgaggcatgcgaatcgcttaaacccaggaaggcagaggttgtaatgagctgagatcaagccactgcaagactttgtctcaaaaacaacaacaaaaaccaaattgctgatcaaagtggttttaccagtttacattttgactagcagtatattagtgttcatgatgttctctgtatatctttgttatcagatttttttgataatctgctgggtttgaaaaggaatttcattgtggcttcactatgtgtttctgattactgtatttatcggttattcagattacctgctctgaaaattatttcttcatatcttttgcttatatttttgaggggttgtctttttcttaacgattcgtaagagttccttacgtattcgatcattttgtatttttgtgggttacgtatctctttgtagcttgtcttttcacattagggcatttgatgtagattaaaaatttgtatattaacagaatcttgatatttatcttcatagtttgtgcttcttatgtcttgatttgtaatgacatctctatattgggttttcatagattcatggggtgctaatgtttaaatctgtaattataactatttttagtttcattataatttttccctatttaattcagtactttatttcccccactaccccccaccccccaagagacaaggtcttcctttgttggccaggctgaagtgagtgcagtgacacgatcacagctcactgcaaccttaaactcctgatatcaagtgatcctcccacctcagcctccagaagaattaggagtacaggcacgtgccaccatgtctggcttatatatatttttggggggtggtgggggagagtagagatgaggtttcgctatgttgtccaggctggtctcgacctcttgggctgaagtggtcctcctgcctcagcctcccaaagtacaggattgcaggtgtgagccaccacgcctagcccttttataattccttctatttgttcattcattcaacaattcagtcagaaatactgagtgcccattacacactagatatgctgctaggtgctgagatacagatataaataaaagaaagttggctgggcgcagtggctcacgcctgtaatcccagcactttgggaggccaaggcgggcggatcatgaggtcaggagttcaagaccagcctggcaaatattgtgaaaccccgtctctaataaaaatacaaaaaaaatttagctgggcgtggtggcgcacctgtagtcccagctactcgggaggctgaggcagaagaatcacttgaactcaggaggcggaggttgcagtgagctgagattttgcaactgcactgcagcctgggcgacagagtgagacttcgtctcaaaaaagaaaaaacaaaaaaacaaagtcaccgcctcatggagctacatttctggtgggggaaagacgcatagtaagcactacccagtaagttggtgtgtccaaagtgctatgtagatatttatgaaggaatatgtataccaggaatatgttggggcagtatggtgtcttatagagggggtagggaaggccttgttagtatgaaacctggtgaatgggagagaataggccaagtggctatttgtgagggaaaaaaattacagacaaagggcaattacaggtacaagactctgaggtggtgtatgctgcttgacttactggaagtaaggagttagaattactggagttgtctgattttctaaaattttgggggatgaggcctgcttttttactgtctgctgattctcatttatgatgaattgtcatgtttactaatcttggattatacattcatcttcagcaaggttttagctataagtgagattccagaatagttttgtgtcttccaggcactcagctcctggccgaagtggatgctacaaatttagacatcaaatttacagggtagtcatttttctcctctttagattccagacttggccattcaaggctccttgttgtctccctgtgcctgtggtcggggggttaaggggagtgtaggctggagtggtgcaatttttttcacatacatgcttttcctggggttgtggtcctaatggtaatcatcctggtttatgcattggcttcagatctcattttgtttagtacacatcaacagctttaattcctggattacagagacaactcaagctacaacaaaaaccgggcttctgctgtgtcaactcacagactctccactttgggttttagcttactcctaatttgtggctcttgggagctcagctgtgcagggaaaggatgtgtgttatagtttatctaaggtttccaggtgtttgaagcagatgggtttcatctatagtgttacgttagattctgctttattccctccactaaaaccattaacactcatcagaaagtgctaatcagttgattaacaagagatttagtttagcagaaatttcaggatattcttggaatttgggcaacaaatatctctagtttcaaagacccttgtagactttcctatattgctattgatggtgagggggtaggggagtgttagaggcctatgctcaagttttcctaaattagagatgctcttttgctattgttacaaatgcatataattgctccagtactttatcaaattccctttagtctatatttatgtaaacctagtttgatatactgaaccattcttttattcctggaataaatgctgtttggtcatcttaatacatctgattattccatttggtaatattttgagtaaaaaattctatagtgaatcctgtttgcttcatggactgagtatagtagcgtatctttttctgtgactagaagttatttatgaaagagaatcatttatgtttgaagaagtaaatatgcctcagtttcaaatggtcctttaagggctctgtataaacgattccaatatatttctcagttgttattaaagtacttgatttttttcttgtctaacttttagcaatttttatattaatatttcaaagaaccatgtttaagtaaattactagcaaaggaactctttgggggaactttatgaaattttctcttggcagttgctaaaagttttcttacgttttctaaaagttcagtaatagtacatttatctttagaaaagtttgcttttcagaaagtgtttccatttttcttgtggtcagaatgtgctgtgaattttaaatgtatttttaagatattatagctaaattgtacctcactgttttctctaaaaagttttactgcttttgcttccactccactattcagtgataacaagggtaacaagtttccactagaattgcttgtcactttattcttgtacttttgttttactactgaacatctttttaaatcgttgccacaaaatatctcgcttttatcattttcacattgctctagtatatcaactttggaaacaagacatcattctatttatagcattctgtttttagtagtggtatttccatttacaaaatacagtaattcttgatcgctgaagacgtcaaatcctagaaaacatagcatgcctacgcgtgatgttaacatcattctcgaatagttgttggttgaagattcatttgatgaatccgatttttcagaaatagacgagtctgatgatacagacgattctggtgttagttctctgtagaaataactccaagaacacttttaatagtttattttcacattgaaaatcagatttgctccagcctcaaagagtatatttatgtaaaattaggtaagcgatatagaagcaagctgcactttttttctaaatgggaaggtattaaaaaagaaaagtctcattttagtaacatagtcttccttaaactctatgccacttgtaagatttctgaaaactgaagacatagaagggaacgggcttgatatgaacgacagctttgctggtaaataaacccaactgaacctaagattatctaaggtaacctctttttctagtcttttattgtgtgaacagttacctcctgctgagttgttggcagaatttccatataatcttgcttatgaccatttctacattatttgtatcatcttttagaagtcttacccaggttgatataggttaccgttctctagatctgtgtctccaattcttcttacatggcattaggtattttaagcttgttttttttcagacatcgtatagtcaattcttgaatgtgttgagaggtgctatgtcattgtaagctttattcttcttctctgaatgattagcttgtttaaattttaccttaaattcttttttttctttttttttcttttgagactgagtcttgctctgtcgcccaggctggagtgcagtggtgtgatctcggctcactgcaagctccacctcctgggttcacgccattcccctgcctcagcctcctgagtagctgggactacaggtacccgccaccacgcctggctaattttttttttttttttgtatttttagtagagacggggtttcaccatgttagccaggatggtctcaatctcctgaccttgtgatccacccgcctcggcctcccaaagtgctgtgattacaggtgtgagccaccgcgcccggcctttacgttgaattctttaaattcagcttgtgactttgcacttcaggattctgagtgttctctgtcttcttcctgcattgtttttcttataccatacaggtttttcattggccttgactttttgttgttaactcattcttctttgggtttattttcatttgtttctgctgaatattatttgtttcaaactaaaaataacattccacattttaattgatgtgcggactcttaatctacttaaaatgtgggctgaagttccatgattccagctagtctggaataggtcatttaactggatgttaattcacctacattgttccctaagtgacatgtgggtcccattctgctgacatatttgtgggtcctggtaacaaccatttgggtagatttgctgattcctcttttctccttagtggaagagaaagccaatacccacctcctcttgggcatgtgcttagacgcctgtgctcgctaccttctgttctccaagcagccgtcacaggcacaaaggatgtatgaaaaagctctgcagatttctgaagaaatacaaggagaaagacacccacaggtaagggaggaaaacacagaagggggaatataaaacaaaggcttcaaaattgaagggtgtgaaatgtcacactcattggtaacaggatcagcagatggtcctagatcctccttggtccccagtctactcattttcttatcaccagcaccctcaccccaactacttgtttcagaaaggatttgagactagttatcagttactaggtctgcccagaactttttgcatgatccatggtttgcacaacagagcaacctttctacagagcaggactggtcaggcttcaatggacacagcacagtatttcagagtggggtctctagatacccctattagaagcttatgaggaacggtttaatacacaaatatccttgcctcccttgccccacagttaaaatggcaagaggtgagggaagggcaagggaccacattaaaaacacttaaaccattggcatattatagaatttaagtataacgtgtaaagctctgtgttagaacattaaacacattgaattgaaatcatctctttgggtctcccctccatccgagtaagttcttagatgtaaggagtgcattgctttgtctatgaatgcttgctactgccaatataagacataacaattttaactgaatgtgtcccaaggctggggtacatgggtagggtgagtaatatgttttggaagaaaagggaggttgagctatgaattatctccatgaaagggatttataacttattatgaagagtcccttaatggagtgaggaataataaacaagcaagtacagaattcagatctccaagtactagagtcagggggcttaaagcatggcatcagtggggaagtaggtatggaagtctacctcttccatactgaaattccatttcagtagccaaattaaaaaaactcctactgggcatcttcctaaaatagatggtgtatttcttgtttttgatgagcctcagggttatcagcaggaacaacataatacagtggggctccagaggcaatcaaaccataggaggctggcttctcaaagttgctcagccttaaaggagataatatgtgtagcttcttgctgttgtttttcatttggtgcttctaactgggtaattagttggattaataagcactgtctgttacctaatttccagatttgtattatttcccaaaaggtcgaactaacattgtccactgtacaatgtgattatgattaacaaatgcccacaaatttgttaaagaatggtatccctcatcttttgtggaatgctaggaaagatgaaatcttatgtattcagagttggatgcactccacattaaagttctgtgaaggcatgtttttaaagaaaaaattgttttttcttttacatacagaccattgtgctgatgagtgacctggctactaccctggatgcacagggccgctttgatgaggcctatatttatatgcaaagggcatcagatctggcaagacagataaatcatcctgagctacacatggtactcagtaatctagctgcagttttgatgcacagaggtaggtagcaatgtaaacttaactgacttgctttaagggagggatgtcactggattgatagatttgtgaagtggtatgtagggagggcaagggccaacgaataaacatgtaaattaaaagactggttgaatggcagaaaaaggaggtattgattaggttgaagtactattgtgttcaattcacgtaacttctacagacctgcactagcctgtcgaaccccatcaagctggagaaaaccttgcaatgatagtaccttacgtcagtagtgctttacagatttctaaatgtgttcagttacaatgtgtttctcacagtgtgctggtgaagctttatgacaggaagtatcattttgtcagacatttcttagtgtcagcacactataccgatcattttcagaaacctgggatgacaggtgtattacacataccaccattcatgaaatcttgggctcatcaaagtcctcaggatatactggaaagggccgttaggaatcccacagcattcagtggagttccagcctgtcagatggggatgaaatgaggcagcaccagcttgtcgcttcataagcacacagtaaattagccctatatctgcattcatgctctctcttcagaatcaccttgaaaacatacactttcttcttactgtcccttctctctgggttattttagaacgatatacacaagcaaaagagatctaccaggaagcactgaagcaagcaaagctgaaaaaagatgaaatttctgtacaacacatcagggaagagttggctgagctgtcaaagaaaagtagacctttgacaaattctgtcaagctctaaatccatttttgtgtagggagaataatgtctagtaatgtggaagaatagctatcattcctgtctctgtggcacccgatcaatggcttaaatctgtcgtttttgatattcaggtttcctcaatttagccttagtgaaggaggggttgtacacactgccatttttgtattttaaaggaaaaatgactttcattcccaactgattatgacctttcaggatgtcgtcaagtgatgctttcagttgtaacacgtgacttggtgctgtccctgctggtctaagtagaactgtagattcatatgggctggtgttcctgtgcgctgtgggtgtggtgattcagcctggcatttctaccataagtttttggtctgctgatttgctgccctgtcttctcttactttactttatcaatacctggcaaactgaccagaattaccttcctcatggcaaagggggattatggtgaattgttgttcttatagtctgtttcatgaagcacaagtggaatttaatacataaaagagaaaaatatcttagtttgctaccagcatccagcatgaagttgtaaagtggggattaggcacgtgacagtatagcacccatttgaatttaaataaaagtgaaccatatttatctggttatataaaactaaaaatgggggtgtttatataaaactaaaaactaagaatgatgtaaccttttgtctgtgttatctgaacactctacttcctttgcagccttagtcacacaactgagtcatctcaagtactctttaaggacacacagcccaggctgttctgagtcagaataggcccctacaggtatattttaaaactcttcgtaattctaatgtgtactgctggtatagctgaactactgacctggatcttagtcctagcctttttgcttttgcaatttcagtatcttcatctctaaactagggaaacactgggattctttcttagctgtgggggaaggtatttggttagatgactttgaatgaatagactgctgtgctgaaagagctttatcacactgtctcaaagtatgtaaagatacataggtggatgctcttactgcagcagtcatgaatacatttttagccatttacctaaggaaaaagacagtttttctaggtaccatgaaggaagattgaccctgttggtatgcctgtgggggtgggatgtgagtgggactgataaactgatacttttggttcgtatgtacatactggaagaatcttcataataaatgagactacacaacaata

SEQ ID NO: 14738 - DNA, 2591 bp, Homo sapiens
gccaggagcgcgtctggcctgcagtgcgcagaggacgcggcgggagcatgttccggctcctgagctggagcctgggccgaggcttcctgcgggccgcggggcggcggtgccggggctgctccgcgcgcctgctcccggggctggcaggaggtccggggcccgaggtgcaggtgccgccatcccgagtcgcgccgcacggccggggcccaggcctgctgccgctgctggcagcgctcgcctggttctcgaggcccgctgcggcagaggaggaggagcagcagggagccgacggggccgctgccgaggacggggcggacgaggccgaggcagagatcatccagctgctgaagcgagccaaggtgaggcggctccgggccctgcgcccggccgagcgcggtagcctttgtgagcggggtcttggcgttgctgcgcattactctctccgcctcgccgaagagtggatggaggctccgcgggtaaaattgccgagaatgagttgagcattatgaaagatgagccagaagaggctgagttaattttgcatgacgctcttcgtctcgcctatcagactgataacaagaaggccatcacttacacttatgatttgatggccaacttagcatttatacggggtcagcttgaaaatgctgaacaactttttaaagcaacaatgagttacctccttggagggggcatgaagcaggaggacaatgcaataattgaaatttccctaaagctggccagtatctatgctgcgcagaacagacaggaatttgctgttgctggctatgaattctgcatttcaactctagaggaaaaaattgaaagagaaaaggaattagcagaagacattatgtcagtggaagagaaagccaatacccacctcctcttgggcatgtgcttagacgcctgtgctcgctaccttctgttctccaagcagccgtcacaggcacaaaggatgtatgaaaaagctctgcagatttctgaagaaatacaaggagaaagacacccacagaccattgtgctgatgagtgacctggctactaccctggatgcacagggccgctttgatgaggcctatatttatatgcaaagggcatcagatctggcaagacagataaatcatcctgagctacacatggtactcagtaatctagctgcagttttgatgcacagagaacgatatacacaagcaaaagagatctaccaggaagcactgaagcaagcaaagctgaaaaaagatgaaatttctgtacaacacatcagggaagagttggctgagctgtcaaagaaaagtagacctttgacaaattctgtcaagctctaaatccatttttgtgtagggagaataatgtctagtaatgtggaagaatagctatcattcctgtctctgtggcacccgatcaatggcttaaatctgtcgtttttgatattcaggtttcctcaatttagccttagtgaaggaggggttgtacacactgccatttttgtattttaaaggaaaaatgactttcattcccaactgattatgacctttcaggatgtcgtcaagtgatgctttcagttgtaacacgtgacttggtgctgtccctgctggtctaagtagaactgtagattcatatgggctggtgttcctgtgcgctgtgggtgtggtgattcagcctggcatttctaccataagtttttggtctgctgatttgctgccctgtcttctcttactttactttatcaatacctggcaaactgaccagaattaccttcctcatggcaaagggggattatggtgaattgttgttcttatagtctgtttcatgaagcacaagtggaatttaatacataaaagagaaaaatatcttagtttgctaccagcatccagcatgaagttgtaaagtggggattaggcacgtgacagtatagcacccatttgaatttaaataaaagtgaaccatatttatctggttatataaaactaaaaatgggggtgtttatataaaactaaaaactaagaatgatgtaaccttttgtctgtgttatctgaacactctacttcctttgcagccttagtcacacaactgagtcatctcaagtactctttaaggacacacagcccaggctgttctgagtcagaataggcccctacaggtatattttaaaactcttcgtaattctaatgtgtactgctggtatagctgaactactgacctggatcttagtcctagcctttttgcttttgcaatttcagtatcttcatctctaaactagggaaacactgggattctttcttagctgtgggggaaggtatttggttagatgactttgaatgaatagactgctgtgctgaaagagctttatcacactgtctcaaagtatgtaaagatacataggtggatgctcttactgcagcagtcatgaatacatttttagccatttacctaaggaaaaagacagtttttctaggtaccatgaaggaagattgaccctgttggtatgcctgtgggggtgggatgtgagtgggactgataaactgatacttttggttcgtatgtacatactggaagaatcttcataataaatgagactacacaacaata

SEQ ID NO: 14739 - DNA, 5114 bp, Homo sapiens
ctgtagaaataactccaagaacacttttaatagtttattttcacattgaaaatcagatttgctccagcctcaaagagtatatttatgtaaaattaggtaagcgatatagaagcaagctgcactttttttctaaatgggaaggtattaaaaaagaaaagtctcattttagtaacatagtcttccttaaactctatgccacttgtaagatttctgaaaactgaagacatagaagggaacgggcttgatatgaacgacagctttgctggtaaataaacccaactgaacctaagattatctaaggtaacctctttttctagtcttttattgtgtgaacagttacctcctgctgagttgttggcagaatttccatataatcttgcttatgaccatttctacattatttgtatcatcttttagaagtcttacccaggttgatataggttaccgttctctagatctgtgtctccaattcttcttacatggcattaggtattttaagcttgttttttttcagacatcgtatagtcaattcttgaatgtgttgagaggtgctatgtcattgtaagctttattcttcttctctgaatgattagcttgtttaaattttaccttaaattcttttttttctttttttttcttttgagactgagtcttgctctgtcgcccaggctggagtgcagtggtgtgatctcggctcactgcaagctccacctcctgggttcacgccattcccctgcctcagcctcctgagtagctgggactacaggtacccgccaccacgcctggctaattttttttttttttttgtatttttagtagagacggggtttcaccatgttagccaggatggtctcaatctcctgaccttgtgatccacccgcctcggcctcccaaagtgctgtgattacaggtgtgagccaccgcgcccggcctttacgttgaattctttaaattcagcttgtgactttgcacttcaggattctgagtgttctctgtcttcttcctgcattgtttttcttataccatacaggtttttcattggccttgactttttgttgttaactcattcttctttgggtttattttcatttgtttctgctgaatattatttgtttcaaactaaaaataacattccacattttaattgatgtgcggactcttaatctacttaaaatgtgggctgaagttccatgattccagctagtctggaataggtcatttaactggatgttaattcacctacattgttccctaagtgacatgtgggtcccattctgctgacatatttgtgggtcctggtaacaaccatttgggtagatttgctgattcctcttttctccttagtggaagagaaagccaatacccacctcctcttgggcatgtgcttagacgcctgtgctcgctaccttctgttctccaagcagccgtcacaggcacaaaggatgtatgaaaaagctctgcagatttctgaagaaatacaaggagaaagacacccacaggtaagggaggaaaacacagaagggggaatataaaacaaaggcttcaaaattgaagggtgtgaaatgtcacactcattggtaacaggatcagcagatggtcctagatcctccttggtccccagtctactcattttcttatcaccagcaccctcaccccaactacttgtttcagaaaggatttgagactagttatcagttactaggtctgcccagaactttttgcatgatccatggtttgcacaacagagcaacctttctacagagcaggactggtcaggcttcaatggacacagcacagtatttcagagtggggtctctagatacccctattagaagcttatgaggaacggtttaatacacaaatatccttgcctcccttgccccacagttaaaatggcaagaggtgagggaagggcaagggaccacattaaaaacacttaaaccattggcatattatagaatttaagtataacgtgtaaagctctgtgttagaacattaaacacattgaattgaaatcatctctttgggtctcccctccatccgagtaagttcttagatgtaaggagtgcattgctttgtctatgaatgcttgctactgccaatataagacataacaattttaactgaatgtgtcccaaggctggggtacatgggtagggtgagtaatatgttttggaagaaaagggaggttgagctatgaattatctccatgaaagggatttataacttattatgaagagtcccttaatggagtgaggaataataaacaagcaagtacagaattcagatctccaagtactagagtcagggggcttaaagcatggcatcagtggggaagtaggtatggaagtctacctcttccatactgaaattccatttcagtagccaaattaaaaaaactcctactgggcatcttcctaaaatagatggtgtatttcttgtttttgatgagcctcagggttatcagcaggaacaacataatacagtggggctccagaggcaatcaaaccataggaggctggcttctcaaagttgctcagccttaaaggagataatatgtgtagcttcttgctgttgtttttcatttggtgcttctaactgggtaattagttggattaataagcactgtctgttacctaatttccagatttgtattatttcccaaaaggtcgaactaacattgtccactgtacaatgtgattatgattaacaaatgcccacaaatttgttaaagaatggtatccctcatcttttgtggaatgctaggaaagatgaaatcttatgtattcagagttggatgcactccacattaaagttctgtgaaggcatgtttttaaagaaaaaattgttttttcttttacatacagaccattgtgctgatgagtgacctggctactaccctggatgcacagggccgctttgatgaggcctatatttatatgcaaagggcatcagatctggcaagacagataaatcatcctgagctacacatggtactcagtaatctagctgcagttttgatgcacagaggtaggtagcaatgtaaacttaactgacttgctttaagggagggatgtcactggattgatagatttgtgaagtggtatgtagggagggcaagggccaacgaataaacatgtaaattaaaagactggttgaatggcagaaaaaggaggtattgattaggttgaagtactattgtgttcaattcacgtaacttctacagacctgcactagcctgtcgaaccccatcaagctggagaaaaccttgcaatgatagtaccttacgtcagtagtgctttacagatttctaaatgtgttcagttacaatgtgtttctcacagtgtgctggtgaagctttatgacaggaagtatcattttgtcagacatttcttagtgtcagcacactataccgatcattttcagaaacctgggatgacaggtgtattacacataccaccattcatgaaatcttgggctcatcaaagtcctcaggatatactggaaagggccgttaggaatcccacagcattcagtggagttccagcctgtcagatggggatgaaatgaggcagcaccagcttgtcgcttcataagcacacagtaaattagccctatatctgcattcatgctctctcttcagaatcaccttgaaaacatacactttcttcttactgtcccttctctctgggttattttagaacgatatacacaagcaaaagagatctaccaggaagcactgaagcaagcaaagctgaaaaaagatgaaatttctgtacaacacatcagggaagagttggctgagctgtcaaagaaaagtagacctttgacaaattctgtcaagctctaaatccatttttgtgtagggagaataatgtctagtaatgtggaagaatagctatcattcctgtctctgtggcacccgatcaatggcttaaatctgtcgtttttgatattcaggtttcctcaatttagccttagtgaaggaggggttgtacacactgccatttttgtattttaaaggaaaaatgactttcattcccaactgattatgacctttcaggatgtcgtcaagtgatgctttcagttgtaacacgtgacttggtgctgtccctgctggtctaagtagaactgtagattcatatgggctggtgttcctgtgcgctgtgggtgtggtgattcagcctggcatttctaccataagtttttggtctgctgatttgctgccctgtcttctcttactttactttatcaatacctggcaaactgaccagaattaccttcctcatggcaaagggggattatggtgaattgttgttcttatagtctgtttcatgaagcacaagtggaatttaatacataaaagagaaaaatatcttagtttgctaccagcatccagcatgaagttgtaaagtggggattaggcacgtgacagtatagcacccatttgaatttaaataaaagtgaaccatatttatctggttatataaaactaaaaatgggggtgtttatataaaactaaaaactaagaatgatgtaaccttttgtctgtgttatctgaacactctacttcctttgcagccttagtcacacaactgagtcatctcaagtactctttaaggacacacagcccaggctgttctgagtcagaataggcccctacaggtatattttaaaactcttcgtaattctaatgtgtactgctggtatagctgaactactgacctggatcttagtcctagcctttttgcttttgcaatttcagtatcttcatctctaaactagggaaacactgggattctttcttagctgtgggggaaggtatttggttagatgactttgaatgaatagactgctgtgctgaaagagctttatcacactgtctcaaagtatgtaaagatacataggtggatgctcttactgcagcagtcatgaatacatttttagccatttacctaaggaaaaagacagtttttctaggtaccatgaaggaagattgaccctgttggtatgcctgtgggggtgggatgtgagtgggactgataaactgatacttttggttcgtatgtacatactggaagaatcttcataataaatgagactacacaacaata

SEQ ID NO: 14740 - DNA, 3075 bp, Homo sapiens
ctgtagaaataactccaagaacacttttaatagtttattttcacattgaaaatcagatttgctccagcctcaaagagtatatttatgtaaaattaggtaagcgatatagaagcaagctgcactttttttctaaatgggaaggtattaaaaaagaaaagtctcattttagtaacatagtcttccttaaactctatgccacttgtaagatttctgaaaactgaagacatagaagggaacgggcttgatatgaacgacagctttgctggtaaataaacccaactgaacctaagattatctaaggtaacctctttttctagtcttttattgtgtgaacagttacctcctgctgagttgttggcagaatttccatataatcttgcttatgaccatttctacattatttgtatcatcttttagaagtcttacccaggttgatataggttaccgttctctagatctgtgtctccaattcttcttacatggcattaggtattttaagcttgttttttttcagacatcgtatagtcaattcttgaatgtgttgagaggtgctatgtcattgtaagctttattcttcttctctgaatgattagcttgtttaaattttaccttaaattcttttttttctttttttttcttttgagactgagtcttgctctgtcgcccaggctggagtgcagtggtgtgatctcggctcactgcaagctccacctcctgggttcacgccattcccctgcctcagcctcctgagtagctgggactacaggtacccgccaccacgcctggctaattttttttttttttttgtatttttagtagagacggggtttcaccatgttagccaggatggtctcaatctcctgaccttgtgatccacccgcctcggcctcccaaagtgctgtgattacaggtgtgagccaccgcgcccggcctttacgttgaattctttaaattcagcttgtgactttgcacttcaggattctgagtgttctctgtcttcttcctgcattgtttttcttataccatacaggtttttcattggccttgactttttgttgttaactcattcttctttgggtttattttcatttgtttctgctgaatattatttgtttcaaactaaaaataacattccacattttaattgatgtgcggactcttaatctacttaaaatgtgggctgaagttccatgattccagctagtctggaataggtcatttaactggatgttaattcacctacattgttccctaagtgacatgtgggtcccattctgctgacatatttgtgggtcctggtaacaaccatttgggtagatttgctgattcctcttttctccttagtggaagagaaagccaatacccacctcctcttgggcatgtgcttagacgcctgtgctcgctaccttctgttctccaagcagccgtcacaggcacaaaggatgtatgaaaaagctctgcagatttctgaagaaatacaaggagaaagacacccacagaccattgtgctgatgagtgacctggctactaccctggatgcacagggccgctttgatgaggcctatatttatatgcaaagggcatcagatctggcaagacagataaatcatcctgagctacacatggtactcagtaatctagctgcagttttgatgcacagagaacgatatacacaagcaaaagagatctaccaggaagcactgaagcaagcaaagctgaaaaaagatgaaatttctgtacaacacatcagggaagagttggctgagctgtcaaagaaaagtagacctttgacaaattctgtcaagctctaaatccatttttgtgtagggagaataatgtctagtaatgtggaagaatagctatcattcctgtctctgtggcacccgatcaatggcttaaatctgtcgtttttgatattcaggtttcctcaatttagccttagtgaaggaggggttgtacacactgccatttttgtattttaaaggaaaaatgactttcattcccaactgattatgacctttcaggatgtcgtcaagtgatgctttcagttgtaacacgtgacttggtgctgtccctgctggtctaagtagaactgtagattcatatgggctggtgttcctgtgcgctgtgggtgtggtgattcagcctggcatttctaccataagtttttggtctgctgatttgctgccctgtcttctcttactttactttatcaatacctggcaaactgaccagaattaccttcctcatggcaaagggggattatggtgaattgttgttcttatagtctgtttcatgaagcacaagtggaatttaatacataaaagagaaaaatatcttagtttgctaccagcatccagcatgaagttgtaaagtggggattaggcacgtgacagtatagcacccatttgaatttaaataaaagtgaaccatatttatctggttatataaaactaaaaatgggggtgtttatataaaactaaaaactaagaatgatgtaaccttttgtctgtgttatctgaacactctacttcctttgcagccttagtcacacaactgagtcatctcaagtactctttaaggacacacagcccaggctgttctgagtcagaataggcccctacaggtatattttaaaactcttcgtaattctaatgtgtactgctggtatagctgaactactgacctggatcttagtcctagcctttttgcttttgcaatttcagtatcttcatctctaaactagggaaacactgggattctttcttagctgtgggggaaggtatttggttagatgactttgaatgaatagactgctgtgctgaaagagctttatcacactgtctcaaagtatgtaaagatacataggtggatgctcttactgcagcagtcatgaatacatttttagccatttacctaaggaaaaagacagtttttctaggtaccatgaaggaagattgaccctgttggtatgcctgtgggggtgggatgtgagtgggactgataaactgatacttttggttcgtatgtacatactggaagaatcttcataataaatgagactacacaacaata

SEQ ID NO: 14741 - DNA, 27712 bp, Homo sapiens
agtgcgcagaggacgcggcgggagcatgttccggctcctgagctggagcctgggccgaggcttcctgcgggccgcggggcggcggtgccggggctgctccgcgcgcctgctcccggggctggcaggaggtccggggcccgaggtgcaggtgccgccatcccgagtcgcgccgcacggccggggcccaggcctgctgccgctgctggcaggtgaggggcgcgggccgggcggggccggccgggcggggacaggggcgcgggccgggcccgatgacctcagagccccttcccgcagcgctcgcctggttctcgaggcccgctgcggcagaggaggaggagcagcagggagccgacggggccgctgccgaggacggggcggacgaggccgaggcagagatcatccagctgctgaagcgagccaaggtgaggcggctccgggccctgcgcccggccgagcgcggtagcctttgtgagcggggtcttggcgttgctgcgcattactctctccgcctcgccgaagagtggatggaggctccgcgggtaaaattgccgagaatgaggtgggtcatccgagaggggattggaatccatccaggcttttccgactctaaggcctgcagtaaaacctctgcagtgtcaagtgcaaatggagatggcgccctaggcatcacgctttatgcaaacgaaatatcgggaacgttttgtagtggttttatcaattaaccagcctatctgaaatgacataatttcgcacgtatatagcggcctgaaaatggcaacttagtgttggttatgcggttcggttctcctcctgaattcttccttttctccacatccttttctatttttttttcctcctcttttcccaagttatctcatctcttccattgagctaaatacctactcgatgccaacaacgtccaaatttgtatttccattctgtagtgtgctactgacatgccatttgcactttaggaccatacctacctctcagatttaacatgcccaaaactaaacgatctttaatgcctcctcaacatacgctttcgccatctctttactaccatcagtttttcagcctaaaaacctcatagtcattcttaaaacttgtggtaccttaccattgccttccaatacacttacagtccagcaacaagtcctgttgccaacaaatgcaaaatatttctcaaatctttccccttttgtctatctcccttgctgtcaccctagtgcaaaccatcattgccaccaactatgctccagtagtctttcctggcctcctggcctcttgcaatctattctccatgcagaaaccaaagcgaccaaaaaaaaaaagagtaaattggattatgtcatctccttgtcagaaagctctgaatggctacccactgcatttatgataaaatacaaactccttgccttggcttgcaacaccccacatgatctaaaccagcatataccttgcccacccatttggcagtaatcctctggctcaccatcctcccttcacatctatttctttgcatttcttcctcaaaaccattctcttcagcttgtagggacttcactcattctctaccctctgtttgagtcattgttctccccaggtccttatttggttgactcattctcatccttactacctcagtttagctgtcacttccttggaaggcttccctaagtcctatttagaggagaccccttatcattcctttctgtcatctttatagctcttatcattagttgtaattaagcttacttgtcctatatggtcacctccagcctgcaagaaattagaaagaggatggaggacaagcagcttccttataaaatatgttgtaagatcacattccttctgcctgtgtctcttggccaaaacttcatcagatggccacacctagctgcaagggaggctgacctccctgtcatctctgtagacaatgctttgtacatagtaggaattcagtaaatgtctgatgaatgagttagcttccttctatcagttgggatgtacagttgcatacacttctgtctcttagcatatgcatctactatatgtttcattttctattattttgtcttcccttttcagttgagcattatgaaagatgagccagaagaggctgagttaattttgcatgacgctcttcgtctcgcctatcagactgataacaagaaggccatcacttacacttatgatttggtaactcttataaccagtctgaaccactgatgaggaaggttggatgggagggaagggtagttagttcttctgatttatattcctgactttcacgatgttctaaaactccttttctttttactgagttttcttttggcttcagtttcattttttgttttgttttgtttttttgagatggagcctcactctgttgcccaggctgcagtgcagtggcacaatcttggctcactgcagcctccgcctcatgagttcagacgattcttttgcctcaccctcccgagtagctggattacaggcatgcatcactatgcctggctaaattttgtattgtagtagagacgaggtttcaccatattggccaggctggtctcgaactcctgatctcaggtgatccacctgccttggcctcccaaagtgctgagatttcaggcatgagccaccacgcccggccacagcttcagtttttttacccttggggtgacataagacctctcaattccagaccaaaaaaaaccagtatcattagcatgtttttttaatgatgagtggacctagatttggtttgttaacaacaaagtatgtgcaagtatttaattctcacatgattgctgtcctgtgcttcttcttgcagattaattggtgatgtgcttttcattttcaactattttttaaattttgagggtgaaagcaaaagggaattttaaagttttgaaataagtaggaacacagtattctaaactgaaaaacaatttgtaatttgctttcagatggccaacttagcatttatacggggtcagcttgaaaatgtaagtaaattgctttgtaatatcttgaatttatgaaggagtagcttcaagggaactgtaatagtaagagtacaggctaagctgctataacaaagagaccctagaatatagtgactcaaacaagataaaagtgtatttctctttattgtgttagtccagagataggctaaagactgaaggcagacagacataggcacctttgctctctgatccagaagtccaggtttcttctaagataagccctcctctgcctaggtgagctgactcacctccagtctgcaggaagggggagaagatggactgtgagcagcttccttataaaacatgattagaagttcacgttctttctgcctgcatcccttggcctaaattttatcatatgaccatatctaacttaagggtgtccaatctgctaaaattgactgaattttttttttaagataaggtcttgctctgttgcccaggttggagtgcggtggcttaatcatggctgactgcaacctcgacctgccaggctcagttgatcctctcacctcagcctcctgagtagctgggattccaggcgtgtgccacaacacttggctaattttcttatttatttatttatttatttatttatttattgtagagacgggatttcaccatatttcccaggctaaatcgaggggactctgtaatcaaaaagatggagaagagaatgactattaggagacagtttgtagtctctgccacagtgggtttggataagaacttaatctctgaggttgttttctactcatcagagagtagtttaaggtacacagaggatgttgagggtcctgatattttgatctgttttcgcttcaaaagggtacttttctgtgtgtgagtgtgcgtgtgtgtgggtatatgggttttacaaggaatgttgcatcagactggcacttagaatccagggtcatatatatatatataaaatggggcccaattaaaagaaaaatcttttccttatgcttttaggctgaacaactttttaaagcaacaatgagttacctccttggagggggcatgaagcaggtaaggacattgcctagtattggcccctcactgaagcagttttcaaaacagtcttgtctcctgaaaactcctcctagccccaccacatgctttggtcaggaaaggtggagtttcccttctgagatctctatacaaattgccattctttcactaaatgcaacagcatgcttgccaaggaattcacagttggctcatcactctaaaagaataaagactgtggctttgaggccaccgtcagtctggaagttgatctgaaatatgccatgaaaaaatttacttgttatgagttcccttcattctctttctctcacaggaggacaatgcaataattgaaatttccctaaagctggccagtatctatgctgcgcagaacaggtaagtacagcagccagggagtaggactgtgggcaggaaactttgactctgggatgttacataatattcattgtctactggtcatctgggtctcccagaaattgggtgtcacactcaaagtgttccatccctcatctttgaaattgtcagtctttttccagtttgcccctactgtttccatcagcctgcctagtggggcacacaacatctctggctgccctgtgacaaaactaactaagttttctgttgctgcttgaagtgggaagggaagttagagttagaactttagtttaacttttcctagaagaggaaagagcagtgtgaaagctgctggggataatatattaatactctgaagaagccattttgctggtataaatagagttcaaagatgaagcatctaggttgtaagcagagaactcctctagagagttgtatttgggatgaatttagggagagacctaagactagcttcccttcaggttttagtggtgcagaagttggtgcgagaggtttggagtgacatggagcctgatgctgtagaaagggtgctcactgaggccaggccctggcactgttccctactgtcctactcaccagctcctttgttctcatcaggacctgcatagtctccttgcattttgattggacactagataggctagagcttcctggagcctttgacttcaagtcttttgaggagctttgagcttggcccatgccagggaacactgcagcttggtcaatctttcttggagttgtaacaaacatgcctagttcttgattgggtatgaatccctagggtaagaagaagcccagagcctaataaacattgttgagtaagacaaattcatagtcttctagaggtgaaagctagtaacaattagcctctgagttacatggtactctgtacttttcattttgttttattaagagaagcatgagactagaaaagacatggccagatctgaggcttcgaaaggctgatataggttatgaggggaattgtttgtagacctcttgctccgactgggagcgtcttctgggcagtgtccacttgccctgtgttatggctagagagggccctcttgccaagttttgagcgtagggaaggaaggggatgcttctgttcttctgagaacagagcagaacagtagggtcataagttctcccctggcaaagcactagagaacaggtgagctttttagtgccacttctgtaagaaactagagccaaaactgaagaaaagaaccaaagctgagctcctaaatggagaagggatttctgtcacatttcctctgcatctctgtaaaaagcagcagtcagtcggcctgcttgggttgactcaaccctctccagttgattgagggtccagggctacagagttgggttaaatgacttctattgccatagctaggagtcccatttctgcaaaagaaacttttatcagagacttatagcttgaaagaaatataaaatgactaaagctcctcagaagctgtatgaggtcaacagttggaatcctcactgtagggcggcctgaactgtttagggtagtattactttgaacaggggtaaggctttcacacatggagaagttgattcactggaggccatctgttagtgggagatgatgaatactgctggctatgtcagttattaaaattagggcagcattcctagctttttgtgtcctaagttatattaaatggatgacttaaaaaaactgctttgagaaatggcagatttgacactacttagactttaagcaaagttccctcttcccattttacacttcctttactgataatgtttaaactgagctggaaaaatgaagataaaaagaatttgtgaaaaggtaaatgggccgggcgcagtggctcacgcctgtaatcccaccactttgggaggccgaggtgggtggatcacttaaggtcaggagttccagaccagcctggccaacatggtgaaactctgtctttaccaaaaatacaaaaattagctgggcatagtggcgggcacctgtaatcccagctattcgagaggctaaggcaggagaatcgcttgaaccccggaggtggaggttgctctgagccgaggtcacgccattgcactccagcctgggcaacaagagcgaaactccatctcaacagaaggaagaaaaaaaaaagaagaaaaggtaaatggctgattattgattttgctttacagacaggaatttgctgttgctggctatgaattctgcatttcaactctagaggaaaaaattgaaagagaaaaggaattagcagaagacattatgtcaggtaggaaacccattatctgggcattgccttttctccacaaaaggctttactttacacttttgagaaatggaaagagatctaaattgggaagagggaaagttacctattttgcaaaataagtgtctgtctttaaggtatcagcagaagttttggaataagatgttttatttaaaatatttgactgctgttttggtggtggttttttttttaacccccttggtaacatggtcataatttatttgttaacttttagttacatataacttaaggaaaattggggagcagaaggagaaggtgtttctcgtatctcttagttcagctaccaatcaaaatgcttattacgttttagccctagatatacagcaaattaagaaagaagagaaaaaaagctcatgtttttacaatccatcctcactcattctggaggctaggaatagaactggatgagcaggaagctctctagctctccaccattttgggtttcttaatttgggttgaagtattgagaattttcagatttgacatttattcaatacctactctataccaagagctaccgagatggtagggatacagcagtcaactcttctgtacctagtggtcttctaactctctcttgaacatagagtagtcccccgttatccatggggaatatgttccaagacccccagcagatgcctgaaacgacttctaatacactgtgtttttttcttatatatatgtacctatgataaagtttaatttataagttaggcacagtaagagattaacaacaataacttttaatagaacaattataactatatactgttaacagtgtcacagacaggagattcattcttattgtagatcttatcaacctcagcatacagttttttgttttttgttttttgttttcttactaagttgagaactttcaccttttcattaaaaggaagcactttatgacttctctttgtcatattcaaattgccagtatcaccactctcacactttggggccattatgtaaaatatggattgcttgagcacaagtactgcaacattgtgggttgatctgataactgagactgctgctaagtgactgaggccagctgccgtatacaacttgggtacactggacaaagatgattcatgtcctgggcaggatggagtgtgacagtgtaagatttcttcatgccacccagaatggcatgcaatttaaaaacttacggattatttcttgaatttttcatttaatatttttcggactctggttgactgcagataactgaaaccccagaaaatgaaactgtggagtaggagggatcactgtacaccaatttttttgttttcatcactccactgaagctacctttatcaaagtcaccaaatccaatggttacttctcaatccttaacttactcatcagcagctttaacttaggggatcactgtctcctactgaaaatactttcacttggcttctgggatgcctcactggtctctctagtgaggtgaatagacttccctacctcttaatgttggcacgccttagggctgttttcagccctattctcttttctctctgccccaacacctaggagatatcttttagttccatagttttaaatattagatttataccttcagccccaacttgcccccaaatggcagacttataattatgattgcccacccgacatcttgacttgaagtctaatggtcatctcatacttaacatgtccaaaataggtctcagttttgccgctcacaacttgtttcgtcaccagtcagccccagatttgtaaatggcacactactcatttagttgctttggccaagaacctaagaattgtccatgatttcttcctcattcctcatatctaatccatcagcaagttatactggatcagccatcaaaatatatccatactgaccatgtctcatcccattaccctactgctttggtccaggccatcactgtttcaagacctcagtacctttgtatcacctttagaataaatttagaatccctgcatggacctgtaaggcgcttatgacctgggcccacccacctcttccatgccatctgctgctctccccttgctcgttccagtctcaccacactggtcttattctggcacattccaagcttagtgccacctcaaggcctctttgcttgatattccccctacctagactgttctctcttacctttctctggccaactcccgtacttcactcaggtctctgctcaaatagcacttcctcagagtgctcccttcactaaaactatcatctcttcccaccttactattgctctactcctctttcctttacttttcttcatcacacttaaaagtagaggtgtgtgtgttgtgtgcttgtgtttctccactaaaagtatgtttttgtttaaaaatttttagtctttgtcttccatatcaaagaaggatagagacttcatccattatactcagtgctaaatcctcggtgcctagaacagtgcctggcacataatagaggctcaataattactgaatgaaagaacaaaagacccaagaaagaccagcaaataaatccagtttcagtgcagtgtggaagtgctttgaggaaatccacaagaggtgtaaaaacaagtctagctgtcaagtaagtcacttctgaactatttacacctttgctgtctttcatttatagtgttgactatggtttcttaggagtgtaaagctatattttctgattcaaaaaataataccagtaaacactgaagaaagtttagaaaagcactaagtaaaaatcatctgtaatcatactattaagaaagagctactgttttatttattactacggcttttcgggttacattttaagaaataaatttgggatgatactgtatatcctactttgtaacctgagttttaacaatttagtaacatattatgaaaacactttttttttccaggcaaaggaattcttgttagatagagcaagctaatttctattataaatattatttttacattttactagttgcacagtatagaaaatgtgttacatgattcttcatcttattttttctagaaaaggaattcctacctattcagttttgcacaaagcaaatccattatcaaatttacgtgctttttattgacacaactatctctattctaggataacattacttaattacataaaattacattacttaattacataaaaccttgctctaggataattattttgttacctatgttgtagacatatatgtacttactgaggaaatgcccataaaaaattaagtgaaaactttggttacaaaacagtatagttagtatgtagactaaaaataggaatggaacaaaggctgaatgatagatatcaaaatacaggcagtgattctctttggttggtaggtttatagggaatttatattttatttgtgtttctctgagtattctataattttgtacaaatttatatttttctttttaatttccaatgttatctgttagtataaaaagtcaaataatattaatagtacaaagcttaatttaagagagcattttcttggctatctcacccaccccatctattttttttattttttaatttttaattttttttttttttttttttttttgagacagagtctcactcttgtcaccaggctggagtgcagtggtgcaatctcggctcactgcaacctccgcctcccgggtttaagcggttctcctgcctcagcctcccgagtagccgggactacaggcacgtgccaccatgcccagctaatttttgtgtttttagtagagacagggtttcaccatgttagccaggatggtctcaatctcttgacctcataatctgcctgcctcagcctcccaaagtgctgggattacaggtgtgagccaccgcacttggccctattttcaacttttgtttttgagacagagtcccgctctgtcgcccaggctggagtgcagtggcgtgatctcggctcactgcaacctctgcctccccggttcaagcgattctcctgcctcagcctcccgagtagctgggactacaggcacccgccaccacacctggctatttttgtatttttagtagagactgggttttaccatgttagccaggatggtctcgatctcctgacctcatgatccgcctgcctttgcctcccaaagtgctgggattacaggcatgagccactgtgcccggcccctattttcaactcttaaccagtttcctctggtatttaccttcacatttctcaataatataaaattgctatttcctagttcattattttcagaatatgttgatttatggaaaagtgaagatttagtgcagtttctggttgtgtctacattatgagtgtatgaatagtgttagctgctgagccaagtaacatgattacacagttacatttccttttgtgtacgttttgcttcctctgaagttaactaggtttttttgtggctccgtttgttatgtatatgccagattcttcacttttacatattacttgctttcttcaattcataagctttcccagtattctagagttcatgttggctcacttttcattggcatggctggccataggcattcagtcttcatcttcttttttttgtttttgtttttgttgagacggagtctcactctgtcacccaggctggagtgcagtggctcaattttggctcacagcaagctccacctcctgggttcaagcaattctcatgcctctgcttcctgagtagctgggattacaggcgtgagctaccacacccggctaattttgtatttttagtagagacgggatttcaccatgttggccggcctggtctcctgacttaggtgatccacccgccccagcctccccaagtgttgggattacaggcgtgagccaccgcgcccggccgcgttatatctttttcatcctgtaagtttcattttagtggtatttggggaaggagtggagaggaatgcctgtgttcagttcagaatagtaaatctgttattgggcatcaagatagtgtccaaacctgtttttttaaagtggattcttagcactgagatttccaagtcaagagtagcacattttaaggttgttgatgactattgccaaattgccattgaaaggactgtgttaatttacatttcctggtttggctatttatgtactttgtgactttggccaaattacataatccctgtgtgctttttcttcagtgtgggattaagagtaacactcataggacctttaggaaggtggaatgagttaatacataaaacgtacttagaataatacattgtagctgctcaaaaagggtttgttagtggtttttattattgtgataagcctatgtcctcctccccaaaactcattaacttttataatctttgttagcttgatgatatggccttgatgcattatctagcatttctttgataaacagtgaggtttatctttttttttttctcaccatgtcttagggtgctaagaggtttattttttattggagctttattgtaaaaatattaatcctttgtctcttgggttttcctcctgatttgtgtttatagagtggggtttttttttctaataaaaagggaatgtgaaattaacatttgtataaagaatttatgagaattggcgagggacagtggctcacgcctgtaatcccagcactttgggaggccaaggcgggtggatcacttgaggtcagtcgttaaagaccagccctggaaacgtggcaaaaccccatgtttacaaaaattatctgggcatggtgttgcgcacttgtagtcccagctactcgggaggctgaggtgagaatctcttgagcctgggaggtggaggttgcagtgagctgagatcgcaccacctgtggtccagcctgggtgacagagcaagaccctgtcttggggctggggggtggaagaggattgtgagaatagacaagtgatccagcattgccagtacctttggagctcttcctacctgggatactattctccttaatcttgtcactatcattcaatggcatgatctcggctcactgcaacctccgcctcctgggttcaagtgattctcctgtctcagcctcccgagtagctgggattacaggcatatgccaccacgcctggctaattttgtatttttagtagagacggggtttctccatgttggtcaggctggtctcgaactgccgacctcaggtgatctgcccgcctcaacctcccaaagtgctgggattacaggcatgagccaccacgctaggcctatttgcttttctttcattttactctgtgtcccttaagaagatgtcatttagtttttgcatattgcttttaaaaatttaaataggctgggtggagtgactcaagcctgtaaccccaacactttgggaggccaaggtgggaggatcgcttgagcctaggagttttgagaccagactgggcaacatggtgagatcctgtctcttcaaaaaataaaaaaattacctgggcacggtggcacatgcctgtggtcccagctacttaggagactgaggcaggaggataacttgagcccaagaggtcgaggctgcagtgagctatcatagtgccactgtccttcagcacaggcaatagagaccctgtctcaaaaaaaattaaaattatacaaatgaatcataatatgtattcattttagggcatttttatgacttgcatgagtaatcttttcagaattagatcagaattcatttctaatttcctttgcttttattcatctttaataaatactgagtagctgttctgtgccaggtattctaggatttgaatagcagcaagtaaggcaaaagtccttgctcttctggagcttaatgcttagagagatatttttcaagctttgaaattgtatgcattctcactcatctttccttataattttctatttttttccttttatttctaaacagttttaactttttagtatatctggtattttggtgtgaagctggtgactgttttcttgcagatagtaatcaatctatatgtactaattagtacatacttgggtttcttttggggttttccattctgatgtatttacctgatgagttttataacagtatacattctttgaattatatatttgagttatatggtaggacagttgacacatgcttcctttgtaaaattccttcccacatttcactgttttcacatgaattttagaattattttgtcaagttcgtaaagtgccttcagactgaattatcagatatgcattatatttataaattagtttggggagattgccatctgaataagttagcatatctttgactgcaaagagcagaaatttcagctaaattaggtttaacagtaaggacatttatgtcaagtaactggcagttcagcaatagggagcaggctgttgagttagttgacagtgtgattcactgaaatcataaaggaacaggctctttccatccttcctcactcatgtattggctttttccccatgctcccctggtggttgaaacgtgaaactataacaattcccaggaatctcatccagaaatgacagtgtccagaggaaaaggagacttctttgatgtttctcataggatcaaggtaatctttcctagaagtctccaagtagatttgtccttacttctcattggttagaattgggttacatgccatttctaacccagtccttggcaagaaaaatggattatcatgattggctaaaatacatcagtctcctttcctgaggatgtgagtcatgtgagaaaagaacggatactgggacaaagcagctgctctgctagcaaaggaagatctttgtaatagtgagccgtctcactgaggaacattctatagctcctgcttatagttttcttcatatagatgacagctatttattaaatttgattctaactgactccttgactgaactctttgcttttcagttgatattcacactaattccagatttataatcatacattccggaaatcatgatacaggttgagcatcccccagaaccgaagctttctgagtgccaacatgatgcataaagaaagtacgcattggagcatttggatttgggtttttggttttgggatgctggcagtatccaaaggaaatattccaaactcaaaaaatctgaaatctgaaacacttttggtcctaaacatttcagataaggaatacttaacctgtaattgtttccttccagagagttatactactgtctcccttccccaccctttataaaattagttcattggctgtaccttcagaacatcaagcaatagtagtaataggaaacttagtcttatatccaatttggtaccaagatatatgaatagatttattactattatatatctagagcggaccaggcttgcttgtaggttaattgcttagtacctgtgtagtgctggataatatttaatgctgatatgtaacttgcgtttcttatgagatccacagtaaatttcttattgtattgtttgtactattatgtttgtattatttgttatcgcaggattgttattaatgtgataaaatgaattgggatgctttctgtattttctattctgaaataagtgtgggatattgcattggaatggtctgttccttgaaagttgcagagtctgtgatgccagatggaccagaactcctgagttaattctccggcagctttttttttccttcttgattactcatgtatttcttccattttcttaatttcaatataggacagtgctaaaaacataaacattaataaatatctattgaataaatgaacgtatgggtgaacaaattttataactattaatttcctagaagaaactttaaggaattatatttttaaagcatattttacactactcttacgtatctgagatcctcttccttttctagatcctaattttatggatttccttttaaattagtaaaaagatgtttcccattgattccttcctcctcctttccttgaaagtttttattttcatatattaaataaaacatttctagaaagttatttttgatgacataatatttggttccatgagtgcttaaagtctggagcctgagttcagattctggttctgccacttactagcagtggacaagttatttaacttctctgttctcagcttccttatcaataaaatgaaaataataatagaacttacctcatagagttacaagaattaaatactccaggactatgaccagtactcattaggcactattatataagagtttgtggaatgtgatatatttactaatcttatttattatatgatttggcacctatattttactattatcaatttatgaaggaccttcctggccattttatttatagtttctccttggtttttgttaattttgtttattcattcaaagagccaacttctggtttcattaattttctttattgtctttctattttccatttcacttatttctactttgtctttattacctctctcctgtttgctttgggtttattttgttcccttttttctggtcccttaggtgggagatgaggttattgatttaaggtttttcttctaacataattgccatttataactataagctttagctgcatctcattaattttggtaagttatattttcatgtatctcaagtattttccaattttgggggggatttcttctttgaccctttggatatttaggagtatattgattaatttccacatacagtgaatttctcaaattttcttctgttgaatccagtttcattccattgtgttcagagaacaactgtgcttgattttatttattgagatttgttgtatggcctcacatatggcttatcctggagaatgttgtatgtgcatttgagaagtatgtgtattctgttgaatggagttttctatgaatgtctgttaggtctagttggtttatagtgttattcaagtcttctgggtccttactaattttgtctagttgttctaatttttttttttttttttttttttgggatggagtcttgctttgtcgcccaggctggagtgcagtggcgtgatctcggctcactgcaacctccacctcccgggttcaagtgattcttgcacttcagcctcccgagtagctgggagtacaggtgtgcaccactgcatctggctaatttttgtatttttagttgagatcgggtttcaccatgttgtccaggctggtctcgaactcctgacctcaggtgatccgcctgcctcagcctcccagagtgctgggattacaggcatgagctactgtgcccagccagtttttggtatttttagtagagacgaggtttcaccatgttggccaagctgttcttgaactcctgacctcaggtgatccacctgcctgagcctcccaaagtgctgggattacaggcatgagccaccatgcccggccgataaattttttaaaatcttctttctttatacatgtttctgtgctctgtttagacagtctcatagatatatttatttgttacgaattgtcccttcatcaggaaaatgattcctttttccctatttaaggtatttgttacgaattctagttttatattatctactatatcttacccttaacttttctgagtcattttcagtgtatcttttatagaaggctatggttggaatttttttaaaacctgagtatcattgtcttctgatacagaatctgaaaaccttttaaaaattagtgaggcgaaaaaaattagccaggcatggtgacgggtgcctatagtcccagctactcgggaggctgaggcaggagaatggcacgaacccagaagccagagcttgcagtgagccgagatcgcgccactgcactccagcctgggcgacagagtgagactccggctcaaaaaaaaaaaaaaaaaaaaaagtattcaggctgggtgcagtggctcacgcctgtaatcccagcactttgggaggctgaggcaggtggatcgcctgaggtcaggagttcaagaccagcctggccaacatagtgaaaccccgtctctactaaaaatacaaaaaatgagctaggtgtggtggcgggtgcctgtaacctcagctactcgggaggctgaagcaggagaatcgcatgaacctgggaggcggaggttgcagtgagccgagatcacgccattgcactccagcctggttaagaagagcgaaactccatctcaaacaacaaaacaaaacaaattagtattgaaagggataattggtctaattattgcattttaaaaagtgctttccatttttgttaattcctttgttttcagttcctcttacaggaacttttccctctctgatctgtatttgtattttgtagggaaggtatatgtatatatgattttcagttgtataaggagtaacctaaacatttcttaaagacagttgactcagaggaaaaaaaatttttttcagtttcttctctaaaatgagatgagtacattttaacattatccttctttcccttttcctcacttgttttttctctgtgatctggaattttagacttagtggaatttattgcagaggagaattctaaagcctgcatatttgccttgttttttaaatagtctattttctcctgctcagatgctttgctggactcagaagttaaatgagcataaggttagggagttgtctgtttatgaagcttgcttagtccctggtgaaccttcatttttagcatccagttctctggagcttctgtagtctattctggctcaatgcttctgtcccacatgctctggcctcttaccctggaatgtcatttacctgtatgttgacctctcttctctatccttcacattatcccctcttccatcagttttctcatgtatattttgggagtttcttcagttgatattccacattaccaatttattattaagaaaagtcagttctgtgcttttcttttgatttgttttttgttttttgagatagggtctcactgtgtcgcccaggctggagtgcagtggtgcagtcatggctcactgcagcctcaacctcccaggctcaactgatcctcctacctcagcctcccaagtagctgagactgcatgctcatgtcaccatgcctggctaatttccggattttttcatagaggcggagtttcaccatcttgcccaggctggtcttgaacttctgagctaaagcaatctacctgccttgacctcccaaaatgctggcattacaggcatgaggcatcacgcctggcttccctctgatgtaattttttaaaattagatttcaaacaaaagtaaagttttgaggacttaccaaatatctgtgtactttcagccttggccagatttcaatattttaccatatttgctttagaattttttttggatatttaaatccctgtatacccttccctccctgcctaggggtagctactatcctgagtttggttttgtttgcctacttattgcacttgtatatatcaataaacaatatattgctgggtacagtggctcacacctgtaatcccagcactttgagaagccgggacaggtggatcacctgaggttaggagttcaagaccagcctggccaacatggcgaaaccttgtctctactaaaaatacaaaaattagcccaacatggtggcgggcgcctgtaatccccactactcgggaggctgaggcaggagaatcgcttcaacctgagaggcagagattgcagtgagccgagatcgtgccactgcactccagcctgggtgacagagtgaagactccgtctccaaaacaaaaaaacaatatacaatagggctaatatgtttttaaacttaatatgaatggtatcatactgtacaattggttttgtagtttgcttttgtcactcaatattatgttgatgagatttattgggctgctatttaaagcagttttcttagcacagaggccctgtttgcttgccaaactgcatgtctgctgggttgcgtctgtctttaaagggtgacttcctctaattaatccactggggtgaggggtaagttgaacctgttttttctgttcacaagtgtggatacaagctaaaggtggccctgtgtggttccctcactacaaccatggtatagtagtccattgtagaaatataccacagttctattgatggacctgttgggttattctatatgttttgctgttaaaagtcatacttcactgaacattcttggacttgcatctttgtgcacacctggaatattacataaaagtggagttgccagggtgcatataccaaattgcttaacaggctgggtgtagtggctcacacctgtaatcccagcattttgggaggctgaggcaggcagatcatttgaggtcaggagttggagaccagcctggccaatatggtgaaaccccatctctacttaaaaaaaaaaaaaaaaaagccaggcatgctggtgggtacctgtaatcccaactacttgggaggctgaggcatgcgaatcgcttaaacccaggaaggcagaggttgtaatgagctgagatcaagccactgcaagactttgtctcaaaaacaacaacaaaaaccaaattgctgatcaaagtggttttaccagtttacattttgactagcagtatattagtgttcatgatgttctctgtatatctttgttatcagatttttttgataatctgctgggtttgaaaaggaatttcattgtggcttcactatgtgtttctgattactgtatttatcggttattcagattacctgctctgaaaattatttcttcatatcttttgcttatatttttgaggggttgtctttttcttaacgattcgtaagagttccttacgtattcgatcattttgtatttttgtgggttacgtatctctttgtagcttgtcttttcacattagggcatttgatgtagattaaaaatttgtatattaacagaatcttgatatttatcttcatagtttgtgcttcttatgtcttgatttgtaatgacatctctatattgggttttcatagattcatggggtgctaatgtttaaatctgtaattataactatttttagtttcattataatttttccctatttaattcagtactttatttcccccactaccccccaccccccaagagacaaggtcttcctttgttggccaggctgaagtgagtgcagtgacacgatcacagctcactgcaaccttaaactcctgatatcaagtgatcctcccacctcagcctccagaagaattaggagtacaggcacgtgccaccatgtctggcttatatatatttttggggggtggtgggggagagtagagatgaggtttcgctatgttgtccaggctggtctcgacctcttgggctgaagtggtcctcctgcctcagcctcccaaagtacaggattgcaggtgtgagccaccacgcctagcccttttataattccttctatttgttcattcattcaacaattcagtcagaaatactgagtgcccattacacactagatatgctgctaggtgctgagatacagatataaataaaagaaagttggctgggcgcagtggctcacgcctgtaatcccagcactttgggaggccaaggcgggcggatcatgaggtcaggagttcaagaccagcctggcaaatattgtgaaaccccgtctctaataaaaatacaaaaaaaatttagctgggcgtggtggcgcacctgtagtcccagctactcgggaggctgaggcagaagaatcacttgaactcaggaggcggaggttgcagtgagctgagattttgcaactgcactgcagcctgggcgacagagtgagacttcgtctcaaaaaagaaaaaacaaaaaaacaaagtcaccgcctcatggagctacatttctggtgggggaaagacgcatagtaagcactacccagtaagttggtgtgtccaaagtgctatgtagatatttatgaaggaatatgtataccaggaatatgttggggcagtatggtgtcttatagagggggtagggaaggccttgttagtatgaaacctggtgaatgggagagaataggccaagtggctatttgtgagggaaaaaaattacagacaaagggcaattacaggtacaagactctgaggtggtgtatgctgcttgacttactggaagtaaggagttagaattactggagttgtctgattttctaaaattttgggggatgaggcctgcttttttactgtctgctgattctcatttatgatgaattgtcatgtttactaatcttggattatacattcatcttcagcaaggttttagctataagtgagattccagaatagttttgtgtcttccaggcactcagctcctggccgaagtggatgctacaaatttagacatcaaatttacagggtagtcatttttctcctctttagattccagacttggccattcaaggctccttgttgtctccctgtgcctgtggtcggggggttaaggggagtgtaggctggagtggtgcaatttttttcacatacatgcttttcctggggttgtggtcctaatggtaatcatcctggtttatgcattggcttcagatctcattttgtttagtacacatcaacagctttaattcctggattacagagacaactcaagctacaacaaaaaccgggcttctgctgtgtcaactcacagactctccactttgggttttagcttactcctaatttgtggctcttgggagctcagctgtgcagggaaaggatgtgtgttatagtttatctaaggtttccaggtgtttgaagcagatgggtttcatctatagtgttacgttagattctgctttattccctccactaaaaccattaacactcatcagaaagtgctaatcagttgattaacaagagatttagtttagcagaaatttcaggatattcttggaatttgggcaacaaatatctctagtttcaaagacccttgtagactttcctatattgctattgatggtgagggggtaggggagtgttagaggcctatgctcaagttttcctaaattagagatgctcttttgctattgttacaaatgcatataattgctccagtactttatcaaattccctttagtctatatttatgtaaacctagtttgatatactgaaccattcttttattcctggaataaatgctgtttggtcatcttaatacatctgattattccatttggtaatattttgagtaaaaaattctatagtgaatcctgtttgcttcatggactgagtatagtagcgtatctttttctgtgactagaagttatttatgaaagagaatcatttatgtttgaagaagtaaatatgcctcagtttcaaatggtcctttaagggctctgtataaacgattccaatatatttctcagttgttattaaagtacttgatttttttcttgtctaacttttagcaatttttatattaatatttcaaagaaccatgtttaagtaaattactagcaaaggaactctttgggggaactttatgaaattttctcttggcagttgctaaaagttttcttacgttttctaaaagttcagtaatagtacatttatctttagaaaagtttgcttttcagaaagtgtttccatttttcttgtggtcagaatgtgctgtgaattttaaatgtatttttaagatattatagctaaattgtacctcactgttttctctaaaaagttttactgcttttgcttccactccactattcagtgataacaagggtaacaagtttccactagaattgcttgtcactttattcttgtacttttgttttactactgaacatctttttaaatcgttgccacaaaatatctcgcttttatcattttcacattgctctagtatatcaactttggaaacaagacatcattctatttatagcattctgtttttagtagtggtatttccatttacaaaatacagtaattcttgatcgctgaagacgtcaaatcctagaaaacatagcatgcctacgcgtgatgttaacatcattctcgaatagttgttggttgaagattcatttgatgaatccgatttttcagaaatagacgagtctgatgatacagacgattctggtgttagttctctgtagaaataactccaagaacacttttaatagtttattttcacattgaaaatcagatttgctccagcctcaaagagtatatttatgtaaaattaggtaagcgatatagaagcaagctgcactttttttctaaatgggaaggtattaaaaaagaaaagtctcattttagtaacatagtcttccttaaactctatgccacttgtaagatttctgaaaactgaagacatagaagggaacgggcttgatatgaacgacagctttgctggtaaataaacccaactgaacctaagattatctaaggtaacctctttttctagtcttttattgtgtgaacagttacctcctgctgagttgttggcagaatttccatataatcttgcttatgaccatttctacattatttgtatcatcttttagaagtcttacccaggttgatataggttaccgttctctagatctgtgtctccaattcttcttacatggcattaggtattttaagcttgttttttttcagacatcgtatagtcaattcttgaatgtgttgagaggtgctatgtcattgtaagctttattcttcttctctgaatgattagcttgtttaaattttaccttaaattcttttttttctttttttttcttttgagactgagtcttgctctgtcgcccaggctggagtgcagtggtgtgatctcggctcactgcaagctccacctcctgggttcacgccattcccctgcctcagcctcctgagtagctgggactacaggtacccgccaccacgcctggctaattttttttttttttttgtatttttagtagagacggggtttcaccatgttagccaggatggtctcaatctcctgaccttgtgatccacccgcctcggcctcccaaagtgctgtgattacaggtgtgagccaccgcgcccggcctttacgttgaattctttaaattcagcttgtgactttgcacttcaggattctgagtgttctctgtcttcttcctgcattgtttttcttataccatacaggtttttcattggccttgactttttgttgttaactcattcttctttgggtttattttcatttgtttctgctgaatattatttgtttcaaactaaaaataacattccacattttaattgatgtgcggactcttaatctacttaaaatgtgggctgaagttccatgattccagctagtctggaataggtcatttaactggatgttaattcacctacattgttccctaagtgacatgtgggtcccattctgctgacatatttgtgggtcctggtaacaaccatttgggtagatttgctgattcctcttttctccttagtggaagagaaagccaatacccacctcctcttgggcatgtgcttagacgcctgtgctcgctaccttctgttctccaagcagccgtcacaggcacaaaggatgtatgaaaaagctctgcagatttctgaagaaatacaaggagaaagacacccacaggtaagggaggaaaacacagaagggggaatataaaacaaaggcttcaaaattgaagggtgtgaaatgtcacactcattggtaacaggatcagcagatggtcctagatcctccttggtccccagtctactcattttcttatcaccagcaccctcaccccaactacttgtttcagaaaggatttgagactagttatcagttactaggtctgcccagaactttttgcatgatccatggtttgcacaacagagcaacctttctacagagcaggactggtcaggcttcaatggacacagcacagtatttcagagtggggtctctagatacccctattagaagcttatgaggaacggtttaatacacaaatatccttgcctcccttgccccacagttaaaatggcaagaggtgagggaagggcaagggaccacattaaaaacacttaaaccattggcatattatagaatttaagtataacgtgtaaagctctgtgttagaacattaaacacattgaattgaaatcatctctttgggtctcccctccatccgagtaagttcttagatgtaaggagtgcattgctttgtctatgaatgcttgctactgccaatataagacataacaattttaactgaatgtgtcccaaggctggggtacatgggtagggtgagtaatatgttttggaagaaaagggaggttgagctatgaattatctccatgaaagggatttataacttattatgaagagtcccttaatggagtgaggaataataaacaagcaagtacagaattcagatctccaagtactagagtcagggggcttaaagcatggcatcagtggggaagtaggtatggaagtctacctcttccatactgaaattccatttcagtagccaaattaaaaaaactcctactgggcatcttcctaaaatagatggtgtatttcttgtttttgatgagcctcagggttatcagcaggaacaacataatacagtggggctccagaggcaatcaaaccataggaggctggcttctcaaagttgctcagccttaaaggagataatatgtgtagcttcttgctgttgtttttcatttggtgcttctaactgggtaattagttggattaataagcactgtctgttacctaatttccagatttgtattatttcccaaaaggtcgaactaacattgtccactgtacaatgtgattatgattaacaaatgcccacaaatttgttaaagaatggtatccctcatcttttgtggaatgctaggaaagatgaaatcttatgtattcagagttggatgcactccacattaaagttctgtgaaggcatgtttttaaagaaaaaattgttttttcttttacatacagaccattgtgctgatgagtgacctggctactaccctggatgcacagggccgctttgatgaggcctatatttatatgcaaagggcatcagatctggcaagacagataaatcatcctgagctacacatggtactcagtaatctagctgcagttttgatgcacagaggtaggtagcaatgtaaacttaactgacttgctttaagggagggatgtcactggattgatagatttgtgaagtggtatgtagggagggcaagggccaacgaataaacatgtaaattaaaagactggttgaatggcagaaaaaggaggtattgattaggttgaagtactattgtgttcaattcacgtaacttctacagacctgcactagcctgtcgaaccccatcaagctggagaaaaccttgcaatgatagtaccttacgtcagtagtgctttacagatttctaaatgtgttcagttacaatgtgtttctcacagtgtgctggtgaagctttatgacaggaagtatcattttgtcagacatttcttagtgtcagcacactataccgatcattttcagaaacctgggatgacaggtgtattacacataccaccattcatgaaatcttgggctcatcaaagtcctcaggatatactggaaagggccgttaggaatcccacagcattcagtggagttccagcctgtcagatggggatgaaatgaggcagcaccagcttgtcgcttcataagcacacagtaaattagccctatatctgcattcatgctctctcttcagaatcaccttgaaaacatacactttcttcttactgtcccttctctctgggttattttagaacgatatacacaagcaaaagagatctaccaggaagcactgaagcaagcaaagctgaaaaaagatgaaatttctgtacaacacatcagggaagagttggctgagctgtcaaagaaaagtagacctttgacaaattctgtcaagctctaaatccatttttgtg

SEQ ID NO: 14742 - DNA, 1360 bp, Homo sapiens
agtgcgcagaggacgcggcgggagcatgttccggctcctgagctggagcctgggccgaggcttcctgcgggccgcggggcggcggtgccggggctgctccgcgcgcctgctcccggggctggcaggaggtccggggcccgaggtgcaggtgccgccatcccgagtcgcgccgcacggccggggcccaggcctgctgccgctgctggcaggtgaggggcgcgggccgggcggggccggccgggcggggacaggggcgcgggccgggcccgatgacctcagagccccttcccgcagcgctcgcctggttctcgaggcccgctgcggcagaggaggaggagcagcagggagccgacggggccgctgccgaggacggggcggacgaggccgaggcagagatcatccagctgctgaagcgagccaagttgagcattatgaaagatgagccagaagaggctgagttaattttgcatgacgctcttcgtctcgcctatcagactgataacaagaaggccatcacttacacttatgatttgatggccaacttagcatttatacggggtcagcttgaaaatgctgaacaactttttaaagcaacaatgagttacctccttggagggggcatgaagcaggaggacaatgcaataattgaaatttccctaaagctggccagtatctatgctgcgcagaacagacaggaatttgctgttgctggctatgaattctgcatttcaactctagaggaaaaaattgaaagagaaaaggaattagcagaagacattatgtcagtagagacggggtttcaccatgttagccaggatggtctcaatctcctgaccttgtgatccacccgcctcggcctcccaaagtgctgtgattacagtggaagagaaagccaatacccacctcctcttgggcatgtgcttagacgcctgtgctcgctaccttctgttctccaagcagccgtcacaggcacaaaggatgtatgaaaaagctctgcagatttctgaagaaatacaaggagaaagacacccacagaccattgtgctgatgagtgacctggctactaccctggatgcacagggccgctttgatgaggcctatatttatatgcaaagggcatcagatctggcaagacagataaatcatcctgagctacacatggtactcagtaatctagctgcagttttgatgcacagagaacgatatacacaagcaaaagagatctaccaggaagcactgaagcaagcaaagctgaaaaaagatgaaatttctgtacaacacatcagggaagagttggctgagctgtcaaagaaaagtagacctttgacaaattctgtcaagctctaaatccatttttgtg

SEQ ID NO: 14743 - DNA, 1929 bp, Homo sapiens
aaggagaaagacacccacaggtaagggaggaaaacacagaagggggaatataaaacaaaggcttcaaaattgaagggtgtgaaatgtcacactcattggtaacaggatcagcagatggtcctagatcctccttggtccccagtctactcattttcttatcaccagcaccctcaccccaactacttgtttcagaaaggatttgagactagttatcagttactaggtctgcccagaactttttgcatgatccatggtttgcacaacagagcaacctttctacagagcaggactggtcaggcttcaatggacacagcacagtatttcagagtggggtctctagatacccctattagaagcttatgaggaacggtttaatacacaaatatccttgcctcccttgccccacagttaaaatggcaagaggtgagggaagggcaagggaccacattaaaaacacttaaaccattggcatattatagaatttaagtataacgtgtaaagctctgtgttagaacattaaacacattgaattgaaatcatctctttgggtctcccctccatccgagtaagttcttagatgtaaggagtgcattgctttgtctatgaatgcttgctactgccaatataagacataacaattttaactgaatgtgtcccaaggctggggtacatgggtagggtgagtaatatgttttggaagaaaagggaggttgagctatgaattatctccatgaaagggatttataacttattatgaagagtcccttaatggagtgaggaataataaacaagcaagtacagaattcagatctccaagtactagagtcagggggcttaaagcatggcatcagtggggaagtaggtatggaagtctacctcttccatactgaaattccatttcagtagccaaattaaaaaaactcctactgggcatcttcctaaaatagatggtgtatttcttgtttttgatgagcctcagggttatcagcaggaacaacataatacagtggggctccagaggcaatcaaaccataggaggctggcttctcaaagttgctcagccttaaaggagataatatgtgtagcttcttgctgttgtttttcatttggtgcttctaactgggtaattagttggattaataagcactgtctgttacctaatttccagatttgtattatttcccaaaaggtcgaactaacattgtccactgtacaatgtgattatgattaacaaatgcccacaaatttgttaaagaatggtatccctcatcttttgtggaatgctaggaaagatgaaatcttatgtattcagagttggatgcactccacattaaagttctgtgaaggcatgtttttaaagaaaaaattgttttttcttttacatacagaccattgtgctgatgagtgacctggctactaccctggatgcacagggccgctttgatgaggcctatatttatatgcaaagggcatcagatctggcaagacagataaatcatcctgagctacacatggtactcagtaatctagctgcagttttgatgcacagaggtaggtagcaatgtaaacttaactgacttgctttaagggagggatgtcactggattgatagatttgtgaagtggtatgtagggagggcaagggccaacgaataaacatgtaaattaaaagactggttgaatggcagaaaaaggaggtattgattaggttgaagtactattgtgttcaattcacgtaacttctacagacctgcactagcctgtcgaaccccatcaagctggagaaaaccttgcaatgatagtaccttacgtcagtagtgctttacagatttctaaatgtgttcagttacaatgtgtttctcacagtgtgctggtgaagctttatgacaggaagtatcattttgtcagacatttcttagtgtcagcacac

SEQ ID NO: 14744 - DNA, 561 bp, Homo sapiens
aaggagaaagacacccacagaccattgtgctgatgagtgacctggctactaccctggatgcacagggccgctttgatgaggcctatatttatatgcaaagggcatcagatctggcaagacagataaatcatcctgagctacacatggtactcagtaatctagctgcagttttgatgcacagaggtaggtagcaatgtaaacttaactgacttgctttaagggagggatgtcactggattgatagatttgtgaagtggtatgtagggagggcaagggccaacgaataaacatgtaaattaaaagactggttgaatggcagaaaaaggaggtattgattaggttgaagtactattgtgttcaattcacgtaacttctacagacctgcactagcctgtcgaaccccatcaagctggagaaaaccttgcaatgatagtaccttacgtcagtagtgctttacagatttctaaatgtgttcagttacaatgtgtttctcacagtgtgctggtgaagctttatgacaggaagtatcattttgtcagacatttcttagtgtcagcacac

SEQ ID NO: 14745 - DNA, 637 bp, Homo sapiens
agtgcgcagaggacgcggcgggagcatgttccggctcctgagctggagcctgggccgaggcttcctgcgggccgcggggcggcggtgccggggctgctccgcgcgcctgctcccggggctggcaggaggtccggggcccgaggtgcaggtgccgccatcccgagtcgcgccgcacggccggggcccaggcctgctgccgctgctggcaggtgaggggcgcgggccgggcggggccggccgggcggggacaggggcgcgggccgggcccgatgacctcagagccccttcccgcagcgctcgcctggttctcgaggcccgctgcggcagaggaggaggagcagcagggagccgacggggccgctgccgaggacggggcggacgaggccgaggcagagatcatccagctgctgaagcgagccaaggtgaggcggctccgggccctgcgcccggccgagcgcggtagcctttgtgagcggggtcttggcgttgctgcgcattactctctccgcctcgccgaagagtggatggaggctccgcgggtaaaattgccgagaatgaggtgggtcatccgagaggggattggaatccatccaggcttttccgactctaaggcctgcagtaaaacctctgcagtgtc

SEQ ID NO: 14746 - DNA, 552 bp, Homo sapiens
agtgcgcagaggacgcggcgggagcatgttccggctcctgagctggagcctgggccgaggcttcctgcgggccgcggggcggcggtgccggggctgctccgcgcgcctgctcccggggctggcaggaggtccggggcccgaggtgcaggtgccgccatcccgagtcgcgccgcacggccggggcccaggcctgctgccgctgctggcagcgctcgcctggttctcgaggcccgctgcggcagaggaggaggagcagcagggagccgacggggccgctgccgaggacggggcggacgaggccgaggcagagatcatccagctgctgaagcgagccaaggtgaggcggctccgggccctgcgcccggccgagcgcggtagcctttgtgagcggggtcttggcgttgctgcgcattactctctccgcctcgccgaagagtggatggaggctccgcgggtaaaattgccgagaatgaggtgggtcatccgagaggggattggaatccatccaggcttttccgactctaaggcctgcagtaaaacctctgcagtgtc

SEQ ID NO: 14747 - DNA, 4261 bp, Homo sapiens
agtggaccgctgtgcgcgaaccctgaaccctacggtcccgacccgcgggcgaggccgggtacctgggctgggatccggagcaagcgggcgagggcagcgccctaagcaggtacgggcggggctcaagtcgcgaggcggggaagcgggaggcagacacggacgagggcgacacagacacgggaccgaggggcggacaccggagagacacgggaaaggggtcgggacaggagcacgtggctcagacaccgacgccgggaggccgcagaccccggacgtgtcaggcatccccgcaggcccggagcgatggcagccttgatgaccccgggaaccggggccccacccgcgcctggtgacttctccggggaagggagccagggacttcccgacccttcgccagagcccaagcagctcccggagctgatccgcatgaagcgagacggaggccgcctgagcgaagcggacatcaggggcttcgtggccgctgtggtgaatgggagcgcgcagggcgcacagatcggtgcgtggggagggttgggcgttcctgaccccgactgggaggtcagcccgagagactttgggtccctgggggtgcgacggtgccccactaccagcaccggccccagggtgccccaccgctgtgggctgccaccctcacgcgtacccccacataccaggggccatgctgatggccatccgacttcggggcatggatctggaggagacctcggtgctgacccaggccctggctcagtcgggacagcagctggagtggccagaggcctggcgccagcagcttgtggacaagcattccacagggggtgtgggtgacaaggtcagcctggtcctcgcacctgccctggcggcatgtggctgcaaggttagaaaccacctcctttccagacgggagcctataccgcacatgcagcaaccagtccatccacaggcagctcccaacctcaagcctggcccaaagcctccaagaccctaccaaggcttctccccaccctgctccccagcacagttctccccaccccgttccccagcacagcgcttggggcccctctggctccagaccaggccccttggagcaggaaaaagatccactgatggaattcagacccctttccccttgggtccccagacagctcccccaagggaggagctgaggactttcctccctctgccccaagccttgtttccccaaggacaggtaccaacctcctcccctactgacacttctcaaccaagaaaacttcctttccattccctcaccagctgggcacccctatagctgcttaaatactttccaaatccagctgcactcctagccagggaaggtgaagggatgcacagaggtgggggaggggtactgtgcagggtactcagcatccctgaccaccaggtgccaatgatcagcggacgtggtctggggcacacaggaggcaccttggataagctggagtctattcctggattcaatgtcatccagagcccagagcaggtacggggcgccacggatcagtcattaatccaggttgatgatggagaccctggccagaatcactaaaagatcactggtggatcattagggtcactaatgagaacactggtcaaggttactcatgagtcactgggcctgggccgaaatcatcagtggaactttgattaggatcataaaatgggaagttggtcaaaatcacagatggctggcggggcacggtggctcacacctgtagtcctagcacttggggaggccgaagagggcagatcccttgaacccaggagttcaaaaccagcctggataacacggcaaaaccccatctctacaaaatagttcgctgcgtgtggtggtgcacgcatgtggttccagctactcaggaggctgaggcaggaggatcacttgagcctgggaggtctaggctgcagtgagccgggacgatgccactgcactccagcctgggcaacagagtgagaccctgtcccagcactctgggaggcagaggagcccagttggagatcagcctgggtaatatagtgaaacttgatctctacaaaaaaaagaagaaaaaaaaaagccgcgtgtggtggtgcgcacctgtagtcccagctactgggaagctgaggtgggaggatcacttaagcccaggaggcagaggtcacaatgagccgaaattgtgccaactgcactccagcctgggcaacagaggaagactcttcacagaaaaaaaaaaaaaaaaaaaaaaagctgctaagtcatttaccataagtcactgagaacaggggatgtctgaccagatgcaagtgctgctggaccaggcgggctgctgtatcgtgggtcagagtgagcagctggttcctgcggacggaatcctatatgcagccagagatgtgacagccaccgtggacagcctgccactcatcacaggtgacctgactccatggcctgcttctgcatgttcacaggctcctgacctccaaactcaagtcaagggcctctcgttaggagttacccgtcacctgaccgtgtgcccccctacccccatcacaagatgcctgaccaccaccatgtggggtggcctgatactcaacccaccaggtgctgccacccccataataagggacttgaccctcaatgctcagggcccctgaccccaaagtcggcatccccgaactctcccaagaagctccaggttctccattgtctccaacctcctctgcctcccccaaagcctccattctcagtaagaaactcgtggaggggctgtccgctctggtggtggacgttaagttcggaggggccgccgtcttccccaaccaggagcaggcccgggagctggcaaagacgctggtgagcggtgtggcctttccctgggcaagcgtcttgatgcgggcccagcctacccttcacccctcccgtccccactgcctccctccactcagcagtcctgcctaaccccagtcccaccctcttctgcccgaagtccctccctccttcacggcttcctaacctgctgtgactttagaggtcaaggctggcccggcctggacctggggaagccctctgtggcgttcctgccccagaccaagtacaagttcctcctggccccatggcgaggtgtcgcacttcactcgtgtctcttccccaccccaatccttccctgacttcatgctggggggctggcaacccagggtgcagcaggggctggagttcgaccaagaaccggctgcagaaggccccgccatggggggtccacgctgagcctcctctccgcaggttggcgtgggagccagcctagggcttcgggtcgcggcagcgctgaccgccatggacaagcccctgggtcgctgcgtgggccacgccctggaggtggaggaggcgctgctctgcatggacggcgcaggcccgccagacttaagggacctggtcaccacgctcggtgagggggacggggtgtaggggagcggaggcggcggggggtgcttcccgctggggccgccccgacccggccgcgcctaagacccgtccccgcccgcagggggcgccctgctctggctcagcggacacgcggggactcaggcccagggcgctgcccgggtggccgcggcgctggacgacggctcggcccttggccgcttcgagcggatgctggcggcgcagggcgtggatcccggtctggcccgagccctgtgctcgggaagtcccgcagaacgccggcagctgctgcctcgcgcccgggagcaggaggagctgctggcgcccgcagatggtgagcgtcgggggagtccccgtccttccgcctccgccatccccttcccttcccgaggccccgccccttcccgagcccgcgcctctcagcccctctccccgcaggcaccgtggagctggtccgggcgctgccgctggcgctggtgctgcacgagctcggggccgggcgcagccgcgctggggagccgctccgcctgggggtgggcgcagagctgctggtcgacgtgggtcagaggctgcgccgtggtgagcgccgcccccgccctgctggccccgcacccccgcccagctccggccgcgcggcctctaacagcccctcgctctgcagggaccccctggctccgcgtgcaccgggacggccccgcgctcagcggcccgcagagccgcgccctgcaggaggcgctcgtactctccgaccgcgcgccattcgccgccccctcgcccttcgcagagctcgttctgccgccgcagcaataaagctcctttgccgcgaaa

SEQ ID NO: 14748 - DNA, 1586 bp, Homo sapiens
agtggaccgctgtgcgcgaaccctgaaccctacggtcccgacccgcgggcgaggccgggtacctgggctgggatccggagcaagcgggcgagggcagcgccctaagcaggcccggagcgatggcagccttgatgaccccgggaaccggggccccacccgcgcctggtgacttctccggggaagggagccagggacttcccgacccttcgccagagcccaagcagctcccggagctgatccgcatgaagcgagacggaggccgcctgagcgaagcggacatcaggggcttcgtggccgctgtggtgaatgggagcgcgcagggcgcacagatcggggccatgctgatggccatccgacttcggggcatggatctggaggagacctcggtgctgacccaggccctggctcagtcgggacagcagctggagtggccagaggcctggcgccagcagcttgtggacaagcattccacagggggtgtgggtgacaaggtcagcctggtcctcgcacctgccctggcggcatgtggctgcaaggtgccaatgatcagcggacgtggtctggggcacacaggaggcaccttggataagctggagtctattcctggattcaatgtcatccagagcccagagcagatgcaagtgctgctggaccaggcgggctgctgtatcgtgggtcagagtgagcagctggttcctgcggacggaatcctatatgcagccagagatgtgacagccaccgtggacagcctgccactcatcacagcctccattctcagtaagaaactcgtggaggggctgtccgctctggtggtggacgttaagttcggaggggccgccgtcttccccaaccaggagcaggcccgggagctggcaaagacgctggttggcgtgggagccagcctagggcttcgggtcgcggcagcgctgaccgccatggacaagcccctgggtcgctgcgtgggccacgccctggaggtggaggaggcgctgctctgcatggacggcgcaggcccgccagacttaagggacctggtcaccacgctcgggggcgccctgctctggctcagcggacacgcggggactcaggcccagggcgctgcccgggtggccgcggcgctggacgacggctcggcccttggccgcttcgagcggatgctggcggcgcagggcgtggatcccggtctggcccgagccctgtgctcgggaagtcccgcagaacgccggcagctgctgcctcgcgcccgggagcaggaggagctgctggcgcccgcagatggcaccgtggagctggtccgggcgctgccgctggcgctggtgctgcacgagctcggggccgggcgcagccgcgctggggagccgctccgcctgggggtgggcgcagagctgctggtcgacgtgggtcagaggctgcgccgtgggaccccctggctccgcgtgcaccgggacggccccgcgctcagcggcccgcagagccgcgccctgcaggaggcgctcgtactctccgaccgcgcgccattcgccgccccctcgcccttcgcagagctcgttctgccgccgcagcaataaagctcctttgccgcgaaa

SEQ ID NO: 14749 - DNA, 4277 bp, Homo sapiens
gccgccgccccgccgccggcagtggaccgctgtgcgcgaaccctgaaccctacggtcccgacccgcgggcgaggccgggtacctgggctgggatccggagcaagcgggcgagggcagcgccctaagcaggtacgggcggggctcaagtcgcgaggcggggaagcgggaggcagacacggacgagggcgacacagacacgggaccgaggggcggacaccggagagacacgggaaaggggtcgggacaggagcacgtggctcagacaccgacgccgggaggccgcagaccccggacgtgtcaggcatccccgcaggcccggagcgatggcagccttgatgaccccgggaaccggggccccacccgcgcctggtgacttctccggggaagggagccagggacttcccgacccttcgccagagcccaagcagctcccggagctgatccgcatgaagcgagacggaggccgcctgagcgaagcggacatcaggggcttcgtggccgctgtggtgaatgggagcgcgcagggcgcacagatcggtgcgtggggagggttgggcgttcctgaccccgactgggaggtcagcccgagagactttgggtccctgggggtgcgacggtgccccactaccagcaccggccccagggtgccccaccgctgtgggctgccaccctcacgcgtacccccacataccaggggccatgctgatggccatccgacttcggggcatggatctggaggagacctcggtgctgacccaggccctggctcagtcgggacagcagctggagtggccagaggcctggcgccagcagcttgtggacaagcattccacagggggtgtgggtgacaaggtcagcctggtcctcgcacctgccctggcggcatgtggctgcaaggttagaaaccacctcctttccagacgggagcctataccgcacatgcagcaaccagtccatccacaggcagctcccaacctcaagcctggcccaaagcctccaagaccctaccaaggcttctccccaccctgctccccagcacagttctccccaccccgttccccagcacagcgcttggggcccctctggctccagaccaggccccttggagcaggaaaaagatccactgatggaattcagacccctttccccttgggtccccagacagctcccccaagggaggagctgaggactttcctccctctgccccaagccttgtttccccaaggacaggtaccaacctcctcccctactgacacttctcaaccaagaaaacttcctttccattccctcaccagctgggcacccctatagctgcttaaatactttccaaatccagctgcactcctagccagggaaggtgaagggatgcacagaggtgggggaggggtactgtgcagggtactcagcatccctgaccaccaggtgccaatgatcagcggacgtggtctggggcacacaggaggcaccttggataagctggagtctattcctggattcaatgtcatccagagcccagagcaggtacggggcgccacggatcagtcattaatccaggttgatgatggagaccctggccagaatcactaaaagatcactggtggatcattagggtcactaatgagaacactggtcaaggttactcatgagtcactgggcctgggccgaaatcatcagtggaactttgattaggatcataaaatgggaagttggtcaaaatcacagatggctggcggggcacggtggctcacacctgtagtcctagcacttggggaggccgaagagggcagatcccttgaacccaggagttcaaaaccagcctggataacacggcaaaaccccatctctacaaaatagttcgctgcgtgtggtggtgcacgcatgtggttccagctactcaggaggctgaggcaggaggatcacttgagcctgggaggtctaggctgcagtgagccgggacgatgccactgcactccagcctgggcaacagagtgagaccctgtcccagcactctgggaggcagaggagcccagttggagatcagcctgggtaatatagtgaaacttgatctctacaaaaaaaagaagaaaaaaaaaagccgcgtgtggtggtgcgcacctgtagtcccagctactgggaagctgaggtgggaggatcacttaagcccaggaggcagaggtcacaatgagccgaaattgtgccaactgcactccagcctgggcaacagaggaagactcttcacagaaaaaaaaaaaaaaaaaaaaaaagctgctaagtcatttaccataagtcactgagaacaggggatgtctgaccagatgcaagtgctgctggaccaggcgggctgctgtatcgtgggtcagagtgagcagctggttcctgcggacggaatcctatatgcagccagagatgtgacagccaccgtggacagcctgccactcatcacaggtgacctgactccatggcctgcttctgcatgttcacaggctcctgacctccaaactcaagtcaagggcctctcgttaggagttacccgtcacctgaccgtgtgcccccctacccccatcacaagatgcctgaccaccaccatgtggggtggcctgatactcaacccaccaggtgctgccacccccataataagggacttgaccctcaatgctcagggcccctgaccccaaagtcggcatccccgaactctcccaagaagctccaggttctccattgtctccaacctcctctgcctcccccaaagcctccattctcagtaagaaactcgtggaggggctgtccgctctggtggtggacgttaagttcggaggggccgccgtcttccccaaccaggagcaggcccgggagctggcaaagacgctggtgagcggtgtggcctttccctgggcaagcgtcttgatgcgggcccagcctacccttcacccctcccgtccccactgcctccctccactcagcagtcctgcctaaccccagtcccaccctcttctgcccgaagtccctccctccttcacggcttcctaacctgctgtgactttagaggtcaaggctggcccggcctggacctggggaagccctctgtggcgttcctgccccagaccaagtacaagttcctcctggccccatggcgaggtgtcgcacttcactcgtgtctcttccccaccccaatccttccctgacttcatgctggggggctggcaacccagggtgcagcaggggctggagttcgaccaagaaccggctgcagaaggccccgccatggggggtccacgctgagcctcctctccgcaggttggcgtgggagccagcctagggcttcgggtcgcggcagcgctgaccgccatggacaagcccctgggtcgctgcgtgggccacgccctggaggtggaggaggcgctgctctgcatggacggcgcaggcccgccagacttaagggacctggtcaccacgctcggtgagggggacggggtgtaggggagcggaggcggcggggggtgcttcccgctggggccgccccgacccggccgcgcctaagacccgtccccgcccgcagggggcgccctgctctggctcagcggacacgcggggactcaggcccagggcgctgcccgggtggccgcggcgctggacgacggctcggcccttggccgcttcgagcggatgctggcggcgcagggcgtggatcccggtctggcccgagccctgtgctcgggaagtcccgcagaacgccggcagctgctgcctcgcgcccgggagcaggaggagctgctggcgcccgcagatggtgagcgtcgggggagtccccgtccttccgcctccgccatccccttcccttcccgaggccccgccccttcccgagcccgcgcctctcagcccctctccccgcaggcaccgtggagctggtccgggcgctgccgctggcgctggtgctgcacgagctcggggccgggcgcagccgcgctggggagccgctccgcctgggggtgggcgcagagctgctggtcgacgtgggtcagaggctgcgccgtggtgagcgccgcccccgccctgctggccccgcacccccgcccagctccggccgcgcggcctctaacagcccctcgctctgcagggaccccctggctccgcgtgcaccgggacggccccgcgctcagcggcccgcagagccgcgccctgcaggaggcgctcgtactctccgaccgcgcgccattcgccgccccctcgcccttcgcagagctcgttctgccgccgcagcaataaagctcctttgccgc

SEQ ID NO: 14750 - DNA, 1614 bp, Homo sapiens
gccgccgccccgccgccggcagtggaccgctgtgcgcgaaccctgaaccctacggtcccgacccgcgggcgaggccgggtacctgggctgggatccggagcaagcgggcgagggcagcgccctaagcaggcatccccgcaggcccggagcgatggcagccttgatgaccccgggaaccggggccccacccgcgcctggtgacttctccggggaagggagccagggacttcccgacccttcgccagagcccaagcagctcccggagctgatccgcatgaagcgagacggaggccgcctgagcgaagcggacatcaggggcttcgtggccgctgtggtgaatgggagcgcgcagggcgcacagatcggggccatgctgatggccatccgacttcggggcatggatctggaggagacctcggtgctgacccaggccctggctcagtcgggacagcagctggagtggccagaggcctggcgccagcagcttgtggacaagcattccacagggggtgtgggtgacaaggtcagcctggtcctcgcacctgccctggcggcatgtggctgcaaggtgccaatgatcagcggacgtggtctggggcacacaggaggcaccttggataagctggagtctattcctggattcaatgtcatccagagcccagagcagatgcaagtgctgctggaccaggcgggctgctgtatcgtgggtcagagtgagcagctggttcctgcggacggaatcctatatgcagccagagatgtgacagccaccgtggacagcctgccactcatcacagcctccattctcagtaagaaactcgtggaggggctgtccgctctggtggtggacgttaagttcggaggggccgccgtcttccccaaccaggagcaggcccgggagctggcaaagacgctggttggcgtgggagccagcctagggcttcgggtcgcggcagcgctgaccgccatggacaagcccctgggtcgctgcgtgggccacgccctggaggtggaggaggcgctgctctgcatggacggcgcaggcccgccagacttaagggacctggtcaccacgctcgggggcgccctgctctggctcagcggacacgcggggactcaggcccagggcgctgcccgggtggccgcggcgctggacgacggctcggcccttggccgcttcgagcggatgctggcggcgcagggcgtggatcccggtctggcccgagccctgtgctcgggaagtcccgcagaacgccggcagctgctgcctcgcgcccgggagcaggaggagctgctggcgcccgcagatggcaccgtggagctggtccgggcgctgccgctggcgctggtgctgcacgagctcggggccgggcgcagccgcgctggggagccgctccgcctgggggtgggcgcagagctgctggtcgacgtgggtcagaggctgcgccgtgggaccccctggctccgcgtgcaccgggacggccccgcgctcagcggcccgcagagccgcgccctgcaggaggcgctcgtactctccgaccgcgcgccattcgccgccccctcgcccttcgcagagctcgttctgccgccgcagcaataaagctcctttgccgc

SEQ ID NO: 14751 - DNA, 4261 bp, Homo sapiens; identical to SEQ ID NO: 14747

SEQ ID NO: 14752 - DNA, 1621 bp, Homo sapiens
agtggaccgctgtgcgcgaaccctgaaccctacggtcccgacccgcgggcgaggccgggtacctgggctgggatccggagcaagcgggcgagggcagcgccctaagcaggccgcagaccccggacgtgtcaggcatccccgcaggcccggagcgatggcagccttgatgaccccgggaaccggggccccacccgcgcctggtgacttctccggggaagggagccagggacttcccgacccttcgccagagcccaagcagctcccggagctgatccgcatgaagcgagacggaggccgcctgagcgaagcggacatcaggggcttcgtggccgctgtggtgaatgggagcgcgcagggcgcacagatcggggccatgctgatggccatccgacttcggggcatggatctggaggagacctcggtgctgacccaggccctggctcagtcgggacagcagctggagtggccagaggcctggcgccagcagcttgtggacaagcattccacagggggtgtgggtgacaaggtcagcctggtcctcgcacctgccctggcggcatgtggctgcaaggtgccaatgatcagcggacgtggtctggggcacacaggaggcaccttggataagctggagtctattcctggattcaatgtcatccagagcccagagcagatgcaagtgctgctggaccaggcgggctgctgtatcgtgggtcagagtgagcagctggttcctgcggacggaatcctatatgcagccagagatgtgacagccaccgtggacagcctgccactcatcacagcctccattctcagtaagaaactcgtggaggggctgtccgctctggtggtggacgttaagttcggaggggccgccgtcttccccaaccaggagcaggcccgggagctggcaaagacgctggttggcgtgggagccagcctagggcttcgggtcgcggcagcgctgaccgccatggacaagcccctgggtcgctgcgtgggccacgccctggaggtggaggaggcgctgctctgcatggacggcgcaggcccgccagacttaagggacctggtcaccacgctcgggggcgccctgctctggctcagcggacacgcggggactcaggcccagggcgctgcccgggtggccgcggcgctggacgacggctcggcccttggccgcttcgagcggatgctggcggcgcagggcgtggatcccggtctggcccgagccctgtgctcgggaagtcccgcagaacgccggcagctgctgcctcgcgcccgggagcaggaggagctgctggcgcccgcagatggcaccgtggagctggtccgggcgctgccgctggcgctggtgctgcacgagctcggggccgggcgcagccgcgctggggagccgctccgcctgggggtgggcgcagagctgctggtcgacgtgggtcagaggctgcgccgtgggaccccctggctccgcgtgcaccgggacggccccgcgctcagcggcccgcagagccgcgccctgcaggaggcgctcgtactctccgaccgcgcgccattcgccgccccctcgcccttcgcagagctcgttctgccgccgcagcaataaagctcctttgccgcgaaa

SEQ ID NO: 14753 - DNA, 4261 bp, Homo sapiens; identical to SEQ ID NO: 14747

SEQ ID NO: 14754 - DNA, 1601 bp, Homo sapiens
agtggaccgctgtgcgcgaaccctgaaccctacggtcccgacccgcgggcgaggccgggtacctgggctgggatccggagcaagcgggcgagggcagcgccctaagcaggcccggagcgatggcagccttgatgaccccgggaaccggggccccacccgcgcctggtgacttctccggggaagggagccagggacttcccgacccttcgccagagcccaagcagctcccggagctgatccgcatgaagcgagacggaggccgcctgagcgaagcggacatcaggggcttcgtggccgctgtggtgaatgggagcgcgcagggcgcacagatcggggccatgctgatggccatccgacttcggggcatggatctggaggagacctcggtgctgacccaggccctggctcagtcgggacagcagctggagtggccagaggcctggcgccagcagcttgtggacaagcattccacagggggtgtgggtgacaaggtcagcctggtcctcgcacctgccctggcggcatgtggctgcaaggtgccaatgatcagcggacgtggtctggggcacacaggaggcaccttggataagctggagtctattcctggattcaatgtcatccagagcccagagcagatgcaagtgctgctggaccaggcgggctgctgtatcgtgggtcagagtgagcagctggttcctgcggacggaatcctatatgcagccagagatgtgacagccaccgtggacagcctgccactcatcacagcctccattctcagtaagaaactcgtggaggggctgtccgctctggtggtggacgttaagttcggaggggccgccgtcttccccaaccaggagcaggcccgggagctggcaaagacgctggttggcgtgggagccagcctagggcttcgggtcgcggcagcgctgaccgccatggacaagcccctgggtcgctgcgtgggccacgccctggaggtggaggaggcgctgctctgcatggacggcgcaggcccgccagacttaagggacctggtcaccacgctcgggggcgccctgctctggctcagcggacacgcggggactcaggcccagggcgctgcccgggtggccgcggcgctggacgacggctcggcccttggccgcttcgagcggatgctggcggcgcagggcgtggatcccggtctggcccgagccctgtgctcgggaagtcccgcagaacgccggcagctgctgcctcgcgcccgggagcaggaggagctgctggcgcccgcagatgcccctctccccgcaggcaccgtggagctggtccgggcgctgccgctggcgctggtgctgcacgagctcggggccgggcgcagccgcgctggggagccgctccgcctgggggtgggcgcagagctgctggtcgacgtgggtcagaggctgcgccgtgggaccccctggctccgcgtgcaccgggacggccccgcgctcagcggcccgcagagccgcgccctgcaggaggcgctcgtactctccgaccgcgcgccattcgccgccccctcgcccttcgcagagctcgttctgccgccgcagcaataaagctcctttgccgcgaaa

SEQ ID NO: 14755 - DNA, 4206 bp, Homo sapiens
ctgaaccctacggtcccgacccgcgggcgaggccgggtacctgggctgggatccggagcaagcgggcgagggcagcgccctaagcaggtacgggcggggctcaagtcgcgaggcggggaagcgggaggcagacacggacgagggcgacacagacacgggaccgaggggcggacaccggagagacacgggaaaggggtcgggacaggagcacgtggctcagacaccgacgccgggaggccgcagaccccggacgtgtcaggcatccccgcaggcccggagcgatggcagccttgatgaccccgggaaccggggccccacccgcgcctggtgacttctccggggaagggagccagggacttcccgacccttcgccagagcccaagcagctcccggagctgatccgcatgaagcgagacggaggccgcctgagcgaagcggacatcaggggcttcgtggccgctgtggtgaatgggagcgcgcagggcgcacagatcggtgcgtggggagggttgggcgttcctgaccccgactgggaggtcagcccgagagactttgggtccctgggggtgcgacggtgccccactaccagcaccggccccagggtgccccaccgctgtgggctgccaccctcacgcgtacccccacataccaggggccatgctgatggccatccgacttcggggcatggatctggaggagacctcggtgctgacccaggccctggctcagtcgggacagcagctggagtggccagaggcctggcgccagcagcttgtggacaagcattccacagggggtgtgggtgacaaggtcagcctggtcctcgcacctgccctggcggcatgtggctgcaaggttagaaaccacctcctttccagacgggagcctataccgcacatgcagcaaccagtccatccacaggcagctcccaacctcaagcctggcccaaagcctccaagaccctaccaaggcttctccccaccctgctccccagcacagttctccccaccccgttccccagcacagcgcttggggcccctctggctccagaccaggccccttggagcaggaaaaagatccactgatggaattcagacccctttccccttgggtccccagacagctcccccaagggaggagctgaggactttcctccctctgccccaagccttgtttccccaaggacaggtaccaacctcctcccctactgacacttctcaaccaagaaaacttcctttccattccctcaccagctgggcacccctatagctgcttaaatactttccaaatccagctgcactcctagccagggaaggtgaagggatgcacagaggtgggggaggggtactgtgcagggtactcagcatccctgaccaccaggtgccaatgatcagcggacgtggtctggggcacacaggaggcaccttggataagctggagtctattcctggattcaatgtcatccagagcccagagcaggtacggggcgccacggatcagtcattaatccaggttgatgatggagaccctggccagaatcactaaaagatcactggtggatcattagggtcactaatgagaacactggtcaaggttactcatgagtcactgggcctgggccgaaatcatcagtggaactttgattaggatcataaaatgggaagttggtcaaaatcacagatggctggcggggcacggtggctcacacctgtagtcctagcacttggggaggccgaagagggcagatcccttgaacccaggagttcaaaaccagcctggataacacggcaaaaccccatctctacaaaatagttcgctgcgtgtggtggtgcacgcatgtggttccagctactcaggaggctgaggcaggaggatcacttgagcctgggaggtctaggctgcagtgagccgggacgatgccactgcactccagcctgggcaacagagtgagaccctgtcccagcactctgggaggcagaggagcccagttggagatcagcctgggtaatatagtgaaacttgatctctacaaaaaaaagaagaaaaaaaaaagccgcgtgtggtggtgcgcacctgtagtcccagctactgggaagctgaggtgggaggatcacttaagcccaggaggcagaggtcacaatgagccgaaattgtgccaactgcactccagcctgggcaacagaggaagactcttcacagaaaaaaaaaaaaaaaaaaaaaaagctgctaagtcatttaccataagtcactgagaacaggggatgtctgaccagatgcaagtgctgctggaccaggcgggctgctgtatcgtgggtcagagtgagcagctggttcctgcggacggaatcctatatgcagccagagatgtgacagccaccgtggacagcctgccactcatcacaggtgacctgactccatggcctgcttctgcatgttcacaggctcctgacctccaaactcaagtcaagggcctctcgttaggagttacccgtcacctgaccgtgtgcccccctacccccatcacaagatgcctgaccaccaccatgtggggtggcctgatactcaacccaccaggtgctgccacccccataataagggacttgaccctcaatgctcagggcccctgaccccaaagtcggcatccccgaactctcccaagaagctccaggttctccattgtctccaacctcctctgcctcccccaaagcctccattctcagtaagaaactcgtggaggggctgtccgctctggtggtggacgttaagttcggaggggccgccgtcttccccaaccaggagcaggcccgggagctggcaaagacgctggtgagcggtgtggcctttccctgggcaagcgtcttgatgcgggcccagcctacccttcacccctcccgtccccactgcctccctccactcagcagtcctgcctaaccccagtcccaccctcttctgcccgaagtccctccctccttcacggcttcctaacctgctgtgactttagaggtcaaggctggcccggcctggacctggggaagccctctgtggcgttcctgccccagaccaagtacaagttcctcctggccccatggcgaggtgtcgcacttcactcgtgtctcttccccaccccaatccttccctgacttcatgctggggggctggcaacccagggtgcagcaggggctggagttcgaccaagaaccggctgcagaaggccccgccatggggggtccacgctgagcctcctctccgcaggttggcgtgggagccagcctagggcttcgggtcgcggcagcgctgaccgccatggacaagcccctgggtcgctgcgtgggccacgccctggaggtggaggaggcgctgctctgcatggacggcgcaggcccgccagacttaagggacctggtcaccacgctcggtgagggggacggggtgtaggggagcggaggcggcggggggtgcttcccgctggggccgccccgacccggccgcgcctaagacccgtccccgcccgcagggggcgccctgctctggctcagcggacacgcggggactcaggcccagggcgctgcccgggtggccgcggcgctggacgacggctcggcccttggccgcttcgagcggatgctggcggcgcagggcgtggatcccggtctggcccgagccctgtgctcgggaagtcccgcagaacgccggcagctgctgcctcgcgcccgggagcaggaggagctgctggcgcccgcagatggtgagcgtcgggggagtccccgtccttccgcctccgccatccccttcccttcccgaggccccgccccttcccgagcccgcgcctctcagcccctctccccgcaggcaccgtggagctggtccgggcgctgccgctggcgctggtgctgcacgagctcggggccgggcgcagccgcgctggggagccgctccgcctgggggtgggcgcagagctgctggtcgacgtgggtcagaggctgcgccgtggtgagcgccgcccccgccctgctggccccgcacccccgcccagctccggccgcgcggcctctaacagcccctcgctctgcagggaccccctggctccgcgtgcaccgggacggccccgcgctcagcggcccgcagagccgcgccctgcaggaggcgctcgtactctccgaccgcgcgccattcgccgccccctcgcccttcgcagagctcgttctg

SEQ ID NO: 14756 - DNA, 1432 bp, Homo sapiens
ctgaaccctacggtcccgacccgcgggcgaggccgggtacctgggctgggatccggagcaagcgggcgagggcagcgccctaagcaggcccggagcgatggcagccttgatgaccccgggaaccggggccccacccgcgcctggtgacttctccggggaagggagccagggacttcccgacccttcgccagagcccaagcagctcccggagctgatccgcatgaagcgagacggaggccgcctgagcgaagcggacatcaggggcttcgtggccgctgtggtgaatgggagcgcgcagggcgcacagatcggggccatgctgatggccatccgacttcggggcatggatctggaggagacctcggtgctgacccaggccctggctcagtcgggacagcagctggagtggccagaggcctggcgccagcagcttgtggacaagcattccacagggggtgtgggtgacaaggtcagcctggtcctcgcacctgccctggcggcatgtggctgcaagatgcaagtgctgctggaccaggcgggctgctgtatcgtgggtcagagtgagcagctggttcctgcggacggaatcctatatgcagccagagatgtgacagccaccgtggacagcctgccactcatcacagcctccattctcagtaagaaactcgtggaggggctgtccgctctggtggtggacgttaagttcggaggggccgccgtcttccccaaccaggagcaggcccgggagctggcaaagacgctggttggcgtgggagccagcctagggcttcgggtcgcggcagcgctgaccgccatggacaagcccctgggtcgctgcgtgggccacgccctggaggtggaggaggcgctgctctgcatggacggcgcaggcccgccagacttaagggacctggtcaccacgctcgggggcgccctgctctggctcagcggacacgcggggactcaggcccagggcgctgcccgggtggccgcggcgctggacgacggctcggcccttggccgcttcgagcggatgctggcggcgcagggcgtggatcccggtctggcccgagccctgtgctcgggaagtcccgcagaacgccggcagctgctgcctcgcgcccgggagcaggaggagctgctggcgcccgcagatggcaccgtggagctggtccgggcgctgccgctggcgctggtgctgcacgagctcggggccgggcgcagccgcgctggggagccgctccgcctgggggtgggcgcagagctgctggtcgacgtgggtcagaggctgcgccgtgggaccccctggctccgcgtgcaccgggacggccccgcgctcagcggcccgcagagccgcgccctgcaggaggcgctcgtactctccgaccgcgcgccattcgccgccccctcgcccttcgcagagctcgttctg

SEQ ID NO: 14757 - DNA, 4262 bp, Homo sapiens
gccggcagtggaccgctgtgcgcgaaccctgaaccctacggtcccgacccgcgggcgaggccgggtacctgggctgggatccggagcaagcgggcgagggcagcgccctaagcaggtacgggcggggctcaagtcgcgaggcggggaagcgggaggcagacacggacgagggcgacacagacacgggaccgaggggcggacaccggagagacacgggaaaggggtcgggacaggagcacgtggctcagacaccgacgccgggaggccgcagaccccggacgtgtcaggcatccccgcaggcccggagcgatggcagccttgatgaccccgggaaccggggccccacccgcgcctggtgacttctccggggaagggagccagggacttcccgacccttcgccagagcccaagcagctcccggagctgatccgcatgaagcgagacggaggccgcctgagcgaagcggacatcaggggcttcgtggccgctgtggtgaatgggagcgcgcagggcgcacagatcggtgcgtggggagggttgggcgttcctgaccccgactgggaggtcagcccgagagactttgggtccctgggggtgcgacggtgccccactaccagcaccggccccagggtgccccaccgctgtgggctgccaccctcacgcgtacccccacataccaggggccatgctgatggccatccgacttcggggcatggatctggaggagacctcggtgctgacccaggccctggctcagtcgggacagcagctggagtggccagaggcctggcgccagcagcttgtggacaagcattccacagggggtgtgggtgacaaggtcagcctggtcctcgcacctgccctggcggcatgtggctgcaaggttagaaaccacctcctttccagacgggagcctataccgcacatgcagcaaccagtccatccacaggcagctcccaacctcaagcctggcccaaagcctccaagaccctaccaaggcttctccccaccctgctccccagcacagttctccccaccccgttccccagcacagcgcttggggcccctctggctccagaccaggccccttggagcaggaaaaagatccactgatggaattcagacccctttccccttgggtccccagacagctcccccaagggaggagctgaggactttcctccctctgccccaagccttgtttccccaaggacaggtaccaacctcctcccctactgacacttctcaaccaagaaaacttcctttccattccctcaccagctgggcacccctatagctgcttaaatactttccaaatccagctgcactcctagccagggaaggtgaagggatgcacagaggtgggggaggggtactgtgcagggtactcagcatccctgaccaccaggtgccaatgatcagcggacgtggtctggggcacacaggaggcaccttggataagctggagtctattcctggattcaatgtcatccagagcccagagcaggtacggggcgccacggatcagtcattaatccaggttgatgatggagaccctggccagaatcactaaaagatcactggtggatcattagggtcactaatgagaacactggtcaaggttactcatgagtcactgggcctgggccgaaatcatcagtggaactttgattaggatcataaaatgggaagttggtcaaaatcacagatggctggcggggcacggtggctcacacctgtagtcctagcacttggggaggccgaagagggcagatcccttgaacccaggagttcaaaaccagcctggataacacggcaaaaccccatctctacaaaatagttcgctgcgtgtggtggtgcacgcatgtggttccagctactcaggaggctgaggcaggaggatcacttgagcctgggaggtctaggctgcagtgagccgggacgatgccactgcactccagcctgggcaacagagtgagaccctgtcccagcactctgggaggcagaggagcccagttggagatcagcctgggtaatatagtgaaacttgatctctacaaaaaaaagaagaaaaaaaaaagccgcgtgtggtggtgcgcacctgtagtcccagctactgggaagctgaggtgggaggatcacttaagcccaggaggcagaggtcacaatgagccgaaattgtgccaactgcactccagcctgggcaacagaggaagactcttcacagaaaaaaaaaaaaaaaaaaaaaaagctgctaagtcatttaccataagtcactgagaacaggggatgtctgaccagatgcaagtgctgctggaccaggcgggctgctgtatcgtgggtcagagtgagcagctggttcctgcggacggaatcctatatgcagccagagatgtgacagccaccgtggacagcctgccactcatcacaggtgacctgactccatggcctgcttctgcatgttcacaggctcctgacctccaaactcaagtcaagggcctctcgttaggagttacccgtcacctgaccgtgtgcccccctacccccatcacaagatgcctgaccaccaccatgtggggtggcctgatactcaacccaccaggtgctgccacccccataataagggacttgaccctcaatgctcagggcccctgaccccaaagtcggcatccccgaactctcccaagaagctccaggttctccattgtctccaacctcctctgcctcccccaaagcctccattctcagtaagaaactcgtggaggggctgtccgctctggtggtggacgttaagttcggaggggccgccgtcttccccaaccaggagcaggcccgggagctggcaaagacgctggtgagcggtgtggcctttccctgggcaagcgtcttgatgcgggcccagcctacccttcacccctcccgtccccactgcctccctccactcagcagtcctgcctaaccccagtcccaccctcttctgcccgaagtccctccctccttcacggcttcctaacctgctgtgactttagaggtcaaggctggcccggcctggacctggggaagccctctgtggcgttcctgccccagaccaagtacaagttcctcctggccccatggcgaggtgtcgcacttcactcgtgtctcttccccaccccaatccttccctgacttcatgctggggggctggcaacccagggtgcagcaggggctggagttcgaccaagaaccggctgcagaaggccccgccatggggggtccacgctgagcctcctctccgcaggttggcgtgggagccagcctagggcttcgggtcgcggcagcgctgaccgccatggacaagcccctgggtcgctgcgtgggccacgccctggaggtggaggaggcgctgctctgcatggacggcgcaggcccgccagacttaagggacctggtcaccacgctcggtgagggggacggggtgtaggggagcggaggcggcggggggtgcttcccgctggggccgccccgacccggccgcgcctaagacccgtccccgcccgcagggggcgccctgctctggctcagcggacacgcggggactcaggcccagggcgctgcccgggtggccgcggcgctggacgacggctcggcccttggccgcttcgagcggatgctggcggcgcagggcgtggatcccggtctggcccgagccctgtgctcgggaagtcccgcagaacgccggcagctgctgcctcgcgcccgggagcaggaggagctgctggcgcccgcagatggtgagcgtcgggggagtccccgtccttccgcctccgccatccccttcccttcccgaggccccgccccttcccgagcccgcgcctctcagcccctctccccgcaggcaccgtggagctggtccgggcgctgccgctggcgctggtgctgcacgagctcggggccgggcgcagccgcgctggggagccgctccgcctgggggtgggcgcagagctgctggtcgacgtgggtcagaggctgcgccgtggtgagcgccgcccccgccctgctggccccgcacccccgcccagctccggccgcgcggcctctaacagcccctcgctctgcagggaccccctggctccgcgtgcaccgggacggccccgcgctcagcggcccgcagagccgcgccctgcaggaggcgctcgtactctccgaccgcgcgccattcgccgccccctcgcccttcgcagagctcgttctgccgccgcagcaataaagctcctttgccg

SEQ ID NO: 14758 - DNA, 1572 bp, Homo sapiens
gccggcagtggaccgctgtgcgcgaaccctgaaccctacggtcccgacccgcgggcgaggccgggtacctgggctgggatccggagcaagcgggcgagggcagcgccctaagcaggcccggagcgatggcagccttgatgaccccgggaaccggggccccacccgcgcctggtgacttctccggggaagggagccagggacttcccgacccttcgccagagcccaagcagctcccggagctgatccgcatgaagcgagacggaggccgcctgagcgaagcggacatcaggggcttcgtggccgctgtggtgaatgggagcgcgcagggcgcacagatcggggccatgctgatggccatccgacttcggggcatggatctggaggagacctcggtgctgacccaggccctggctcagtcgggacagcagctggagtggccagaggcctggcgccagcagcttgtggacaagcattccacagggggtgtgggtgacaaggtcagcctggtcctcgcacctgccctggcggcatgtggctgcaaggtgccaatgatcagcggacgtggtctggggcacacaggaggcaccttggataagctggagtctattcctggattcaatgtcatccagagcccagagcagatgcaagtgctgctggaccaggcgggctgctgtatcgtgggtcagagtgagcagctggttcctgcggacggaatcctatatgcagccagagatgtgacagccaccgtggacagcctgccactcatcacaggttggcgtgggagccagcctagggcttcgggtcgcggcagcgctgaccgccatggacaagcccctgggtcgctgcgtgggccacgccctggaggtggaggaggcgctgctctgcatggacggcgcaggcccgccagacttaagggacctggtcaccacgctcgggggcgccctgctctggctcagcggacacgcggggactcaggcccagggcgctgcccgggtggccgcggcgctggacgacggctcggcccttggccgcttcgagcggatgctggcggcgcagggcgtggatcccggtctggcccgagccctgtgctcgggaagtcccgcagaacgccggcagctgctgcctcgcgcccgggagcaggaggagctgctggcgcccgcagatggtgagcgtcgggggagtccccgtccttccgcctccgccatccccttcccttcccgaggccccgccccttcccgagcccgcgcctctcagcccctctccccgcaggcaccgtggagctggtccgggcgctgccgctggcgctggtgctgcacgagctcggggccgggcgcagccgcgctggggagccgctccgcctgggggtgggcgcagagctgctggtcgacgtgggtcagaggctgcgccgtgggaccccctggctccgcgtgcaccgggacggccccgcgctcagcggcccgcagagccgcgccctgcaggaggcgctcgtactctccgaccgcgcgccattcgccgccccctcgcccttcgcagagctcgttctgccgccgcagcaataaagctcctttgccg

SEQ ID NO: 14759 - DNA, 2221 bp, Homo sapiens
agtggaccgctgtgcgcgaaccctgaaccctacggtcccgacccgcgggcgaggccgggtacctgggctgggatccggagcaagcgggcgagggcagcgccctaagcaggtacgggcggggctcaagtcgcgaggcggggaagcgggaggcagacacggacgagggcgacacagacacgggaccgaggggcggacaccggagagacacgggaaaggggtcgggacaggagcacgtggctcagacaccgacgccgggaggccgcagaccccggacgtgtcaggcatccccgcaggcccggagcgatggcagccttgatgaccccgggaaccggggccccacccgcgcctggtgacttctccggggaagggagccagggacttcccgacccttcgccagagcccaagcagctcccggagctgatccgcatgaagcgagacggaggccgcctgagcgaagcggacatcaggggcttcgtggccgctgtggtgaatgggagcgcgcagggcgcacagatcggtgcgtggggagggttgggcgttcctgaccccgactgggaggtcagcccgagagactttgggtccctgggggtgcgacggtgccccactaccagcaccggccccagggtgccccaccgctgtgggctgccaccctcacgcgtacccccacataccaggggccatgctgatggccatccgacttcggggcatggatctggaggagacctcggtgctgacccaggccctggctcagtcgggacagcagctggagtggccagaggcctggcgccagcagcttgtggacaagcattccacagggggtgtgggtgacaaggtcagcctggtcctcgcacctgccctggcggcatgtggctgcaaggttagaaaccacctcctttccagacgggagcctataccgcacatgcagcaaccagtccatccacaggcagctcccaacctcaagcctggcccaaagcctccaagaccctaccaaggcttctccccaccctgctccccagcacagttctccccaccccgttccccagcacagcgcttggggcccctctggctccagaccaggccccttggagcaggaaaaagatccactgatggaattcagacccctttccccttgggtccccagacagctcccccaagggaggagctgaggactttcctccctctgccccaagccttgtttccccaaggacaggtaccaacctcctcccctactgacacttctcaaccaagaaaacttcctttccattccctcaccagctgggcacccctatagctgcttaaatactttccaaatccagctgcactcctagccagggaaggtgaagggatgcacagaggtgggggaggggtactgtgcagggtactcagcatccctgaccaccaggtgccaatgatcagcggacgtggtctggggcacacaggaggcaccttggataagctggagtctattcctggattcaatgtcatccagagcccagagcaggtacggggcgccacggatcagtcattaatccaggttgatgatggagaccctggccagaatcactaaaagatcactggtggatcattagggtcactaatgagaacactggtcaaggttactcatgagtcactgggcctgggccgaaatcatcagtggaactttgattaggatcataaaatgggaagttggtcaaaatcacagatggctggcggggcacggtggctcacacctgtagtcctagcacttggggaggccgaagagggcagatcccttgaacccaggagttcaaaaccagcctggataacacggcaaaaccccatctctacaaaatagttcgctgcgtgtggtggtgcacgcatgtggttccagctactcaggaggctgaggcaggaggatcacttgagcctgggaggtctaggctgcagtgagccgggacgatgccactgcactccagcctgggcaacagagtgagaccctgtcccagcactctgggaggcagaggagcccagttggagatcagcctgggtaatatagtgaaacttgatctctacaaaaaaaagaagaaaaaaaaaagccgcgtgtggtggtgcgcacctgtagtcccagctactgggaagctgaggtgggaggatcacttaagcccaggaggcagaggtcacaatgagccgaaattgtgccaactgcactccagcctgggcaacagaggaagactcttcacag

SEQ ID NO: 14760 - DNA, 2049 bp, Homo sapiens
agtggaccgctgtgcgcgaaccctgaaccctacggtcccgacccgcgggcgaggccgggtacctgggctgggatccggagcaagcgggcgagggcagcgccctaagcaggcatccccgcaggcccggagcgatggcagccttgatgaccccgggaaccggggccccacccgcgcctggtgacttctccggggaagggagccagggacttcccgacccttcgccagagcccaagcagctcccggagctgatccgcatgaagcgagacggaggccgcctgagcgaagcggacatcaggggcttcgtggccgctgtggtgaatgggagcgcgcagggcgcacagatcggtgcgtggggagggttgggcgttcctgaccccgactgggaggtcagcccgagagactttgggtccctgggggtgcgacggtgccccactaccagcaccggccccagggtgccccaccgctgtgggctgccaccctcacgcgtacccccacataccaggggccatgctgatggccatccgacttcggggcatggatctggaggagacctcggtgctgacccaggccctggctcagtcgggacagcagctggagtggccagaggcctggcgccagcagcttgtggacaagcattccacagggggtgtgggtgacaaggtcagcctggtcctcgcacctgccctggcggcatgtggctgcaaggttagaaaccacctcctttccagacgggagcctataccgcacatgcagcaaccagtccatccacaggcagctcccaacctcaagcctggcccaaagcctccaagaccctaccaaggcttctccccaccctgctccccagcacagttctccccaccccgttccccagcacagcgcttggggcccctctggctccagaccaggccccttggagcaggaaaaagatccactgatggaattcagacccctttccccttgggtccccagacagctcccccaagggaggagctgaggactttcctccctctgccccaagccttgtttccccaaggacaggtaccaacctcctcccctactgacacttctcaaccaagaaaacttcctttccattccctcaccagctgggcacccctatagctgcttaaatactttccaaatccagctgcactcctagccagggaaggtgaagggatgcacagaggtgggggaggggtactgtgcagggtactcagcatccctgaccaccaggtgccaatgatcagcggacgtggtctggggcacacaggaggcaccttggataagctggagtctattcctggattcaatgtcatccagagcccagagcaggtacggggcgccacggatcagtcattaatccaggttgatgatggagaccctggccagaatcactaaaagatcactggtggatcattagggtcactaatgagaacactggtcaaggttactcatgagtcactgggcctgggccgaaatcatcagtggaactttgattaggatcataaaatgggaagttggtcaaaatcacagatggctggcggggcacggtggctcacacctgtagtcctagcacttggggaggccgaagagggcagatcccttgaacccaggagttcaaaaccagcctggataacacggcaaaaccccatctctacaaaatagttcgctgcgtgtggtggtgcacgcatgtggttccagctactcaggaggctgaggcaggaggatcacttgagcctgggaggtctaggctgcagtgagccgggacgatgccactgcactccagcctgggcaacagagtgagaccctgtcccagcactctgggaggcagaggagcccagttggagatcagcctgggtaatatagtgaaacttgatctctacaaaaaaaagaagaaaaaaaaaagccgcgtgtggtggtgcgcacctgtagtcccagctactgggaagctgaggtgggaggatcacttaagcccaggaggcagaggtcacaatgagccgaaattgtgccaactgcactccagcctgggcaacagaggaagactcttcacag

SEQ ID NO: 14761 - DNA, 4242 bp, Homo sapiens
cgaaccctgaaccctacggtcccgacccgcgggcgaggccgggtacctgggctgggatccggagcaagcgggcgagggcagcgccctaagcaggtacgggcggggctcaagtcgcgaggcggggaagcgggaggcagacacggacgagggcgacacagacacgggaccgaggggcggacaccggagagacacgggaaaggggtcgggacaggagcacgtggctcagacaccgacgccgggaggccgcagaccccggacgtgtcaggcatccccgcaggcccggagcgatggcagccttgatgaccccgggaaccggggccccacccgcgcctggtgacttctccggggaagggagccagggacttcccgacccttcgccagagcccaagcagctcccggagctgatccgcatgaagcgagacggaggccgcctgagcgaagcggacatcaggggcttcgtggccgctgtggtgaatgggagcgcgcagggcgcacagatcggtgcgtggggagggttgggcgttcctgaccccgactgggaggtcagcccgagagactttgggtccctgggggtgcgacggtgccccactaccagcaccggccccagggtgccccaccgctgtgggctgccaccctcacgcgtacccccacataccaggggccatgctgatggccatccgacttcggggcatggatctggaggagacctcggtgctgacccaggccctggctcagtcgggacagcagctggagtggccagaggcctggcgccagcagcttgtggacaagcattccacagggggtgtgggtgacaaggtcagcctggtcctcgcacctgccctggcggcatgtggctgcaaggttagaaaccacctcctttccagacgggagcctataccgcacatgcagcaaccagtccatccacaggcagctcccaacctcaagcctggcccaaagcctccaagaccctaccaaggcttctccccaccctgctccccagcacagttctccccaccccgttccccagcacagcgcttggggcccctctggctccagaccaggccccttggagcaggaaaaagatccactgatggaattcagacccctttccccttgggtccccagacagctcccccaagggaggagctgaggactttcctccctctgccccaagccttgtttccccaaggacaggtaccaacctcctcccctactgacacttctcaaccaagaaaacttcctttccattccctcaccagctgggcacccctatagctgcttaaatactttccaaatccagctgcactcctagccagggaaggtgaagggatgcacagaggtgggggaggggtactgtgcagggtactcagcatccctgaccaccaggtgccaatgatcagcggacgtggtctggggcacacaggaggcaccttggataagctggagtctattcctggattcaatgtcatccagagcccagagcaggtacggggcgccacggatcagtcattaatccaggttgatgatggagaccctggccagaatcactaaaagatcactggtggatcattagggtcactaatgagaacactggtcaaggttactcatgagtcactgggcctgggccgaaatcatcagtggaactttgattaggatcataaaatgggaagttggtcaaaatcacagatggctggcggggcacggtggctcacacctgtagtcctagcacttggggaggccgaagagggcagatcccttgaacccaggagttcaaaaccagcctggataacacggcaaaaccccatctctacaaaatagttcgctgcgtgtggtggtgcacgcatgtggttccagctactcaggaggctgaggcaggaggatcacttgagcctgggaggtctaggctgcagtgagccgggacgatgccactgcactccagcctgggcaacagagtgagaccctgtcccagcactctgggaggcagaggagcccagttggagatcagcctgggtaatatagtgaaacttgatctctacaaaaaaaagaagaaaaaaaaaagccgcgtgtggtggtgcgcacctgtagtcccagctactgggaagctgaggtgggaggatcacttaagcccaggaggcagaggtcacaatgagccgaaattgtgccaactgcactccagcctgggcaacagaggaagactcttcacagaaaaaaaaaaaaaaaaaaaaaaagctgctaagtcatttaccataagtcactgagaacaggggatgtctgaccagatgcaagtgctgctggaccaggcgggctgctgtatcgtgggtcagagtgagcagctggttcctgcggacggaatcctatatgcagccagagatgtgacagccaccgtggacagcctgccactcatcacaggtgacctgactccatggcctgcttctgcatgttcacaggctcctgacctccaaactcaagtcaagggcctctcgttaggagttacccgtcacctgaccgtgtgcccccctacccccatcacaagatgcctgaccaccaccatgtggggtggcctgatactcaacccaccaggtgctgccacccccataataagggacttgaccctcaatgctcagggcccctgaccccaaagtcggcatccccgaactctcccaagaagctccaggttctccattgtctccaacctcctctgcctcccccaaagcctccattctcagtaagaaactcgtggaggggctgtccgctctggtggtggacgttaagttcggaggggccgccgtcttccccaaccaggagcaggcccgggagctggcaaagacgctggtgagcggtgtggcctttccctgggcaagcgtcttgatgcgggcccagcctacccttcacccctcccgtccccactgcctccctccactcagcagtcctgcctaaccccagtcccaccctcttctgcccgaagtccctccctccttcacggcttcctaacctgctgtgactttagaggtcaaggctggcccggcctggacctggggaagccctctgtggcgttcctgccccagaccaagtacaagttcctcctggccccatggcgaggtgtcgcacttcactcgtgtctcttccccaccccaatccttccctgacttcatgctggggggctggcaacccagggtgcagcaggggctggagttcgaccaagaaccggctgcagaaggccccgccatggggggtccacgctgagcctcctctccgcaggttggcgtgggagccagcctagggcttcgggtcgcggcagcgctgaccgccatggacaagcccctgggtcgctgcgtgggccacgccctggaggtggaggaggcgctgctctgcatggacggcgcaggcccgccagacttaagggacctggtcaccacgctcggtgagggggacggggtgtaggggagcggaggcggcggggggtgcttcccgctggggccgccccgacccggccgcgcctaagacccgtccccgcccgcagggggcgccctgctctggctcagcggacacgcggggactcaggcccagggcgctgcccgggtggccgcggcgctggacgacggctcggcccttggccgcttcgagcggatgctggcggcgcagggcgtggatcccggtctggcccgagccctgtgctcgggaagtcccgcagaacgccggcagctgctgcctcgcgcccgggagcaggaggagctgctggcgcccgcagatggtgagcgtcgggggagtccccgtccttccgcctccgccatccccttcccttcccgaggccccgccccttcccgagcccgcgcctctcagcccctctccccgcaggcaccgtggagctggtccgggcgctgccgctggcgctggtgctgcacgagctcggggccgggcgcagccgcgctggggagccgctccgcctgggggtgggcgcagagctgctggtcgacgtgggtcagaggctgcgccgtggtgagcgccgcccccgccctgctggccccgcacccccgcccagctccggccgcgcggcctctaacagcccctcgctctgcagggaccccctggctccgcgtgcaccgggacggccccgcgctcagcggcccgcagagccgcgccctgcaggaggcgctcgtactctccgaccgcgcgccattcgccgccccctcgcccttcgcagagctcgttctgccgccgcagcaataaagctcctttgccgcg

SEQ ID NO: 14762 - DNA, 1751 bp, Homo sapiens
cgaaccctgaaccctacggtcccgacccgcgggcgaggccgggtacctgggctgggatccggagcaagcgggcgagggcagcgccctaagcaggtacgggcggggctcaagtcgcgaggcggggaagcgggaggcagacacggacgagggcgacacagacacgggaccgaggggcggacaccggagagacacgggaaaggggtcgggacaggagcacgtggctcagacaccgacgccgggaggccgcagaccccggacgtgtcaggcatccccgcaggcccggagcgatggcagccttgatgaccccgggaaccggggccccacccgcgcctggtgacttctccggggaagggagccagggacttcccgacccttcgccagagcccaagcagctcccggagctgatccgcatgaagcgagacggaggccgcctgagcgaagcggacatcaggggcttcgtggccgctgtggtgaatgggagcgcgcagggcgcacagatcggggccatgctgatggccatccgacttcggggcatggatctggaggagacctcggtgctgacccaggccctggctcagtcgggacagcagctggagtggccagaggcctggcgccagcagcttgtggacaagcattccacagggggtgtgggtgacaaggtcagcctggtcctcgcacctgccctggcggcatgtggctgcaaggtgccaatgatcagcggacgtggtctggggcacacaggaggcaccttggataagctggagtctattcctggattcaatgtcatccagagcccagagcagatgcaagtgctgctggaccaggcgggctgctgtatcgtgggtcagagtgagcagctggttcctgcggacggaatcctatatgcagccagagatgtgacagccaccgtggacagcctgccactcatcacagcctccattctcagtaagaaactcgtggaggggctgtccgctctggtggtggacgttaagttcggaggggccgccgtcttccccaaccaggagcaggcccgggagctggcaaagacgctggttggcgtgggagccagcctagggcttcgggtcgcggcagcgctgaccgccatggacaagcccctgggtcgctgcgtgggccacgccctggaggtggaggaggcgctgctctgcatggacggcgcaggcccgccagacttaagggacctggtcaccacgctcgggggcgccctgctctggctcagcggacacgcggggactcaggcccagggcgctgcccgggtggccgcggcgctggacgacggctcggcccttggccgcttcgagcggatgctggcggcgcagggcgtggatcccggtctggcccgagccctgtgctcgggaagtcccgcagaacgccggcagctgctgcctcgcgcccgggagcaggaggagctgctggcgcccgcagatggcaccgtggagctggtccgggcgctgccgctggcgctggtgctgcacgagctcggggccgggcgcagccgcgctggggagccgctccgcctgggggtgggcgcagagctgctggtcgacgtgggtcagaggctgcgccgtgggaccccctggctccgcgtgcaccgggacggccccgcgctcagcggcccgcagagccgcgccctgcaggaggcgctcgtactctccgaccgcgcgccattcgccgccccctcgcccttcgcagagctcgttctgccgccgcagcaataaagctcctttgccgcg

SEQ ID NO: 14763 - DNA, 3709 bp, Homo sapiens
gccggcagtggaccgctgtgcgcgaaccctgaaccctacggtcccgacccgcgggcgaggccgggtacctgggctgggatccggagcaagcgggcgagggcagcgccctaagcaggtacgggcggggctcaagtcgcgaggcggggaagcgggaggcagacacggacgagggcgacacagacacgggaccgaggggcggacaccggagagacacgggaaaggggtcgggacaggagcacgtggctcagacaccgacgccgggaggccgcagaccccggacgtgtcaggcatccccgcaggcccggagcgatggcagccttgatgaccccgggaaccggggccccacccgcgcctggtgacttctccggggaagggagccagggacttcccgacccttcgccagagcccaagcagctcccggagctgatccgcatgaagcgagacggaggccgcctgagcgaagcggacatcaggggcttcgtggccgctgtggtgaatgggagcgcgcagggcgcacagatcggtgcgtggggagggttgggcgttcctgaccccgactgggaggtcagcccgagagactttgggtccctgggggtgcgacggtgccccactaccagcaccggccccagggtgccccaccgctgtgggctgccaccctcacgcgtacccccacataccaggggccatgctgatggccatccgacttcggggcatggatctggaggagacctcggtgctgacccaggccctggctcagtcgggacagcagctggagtggccagaggcctggcgccagcagcttgtggacaagcattccacagggggtgtgggtgacaaggtcagcctggtcctcgcacctgccctggcggcatgtggctgcaaggttagaaaccacctcctttccagacgggagcctataccgcacatgcagcaaccagtccatccacaggcagctcccaacctcaagcctggcccaaagcctccaagaccctaccaaggcttctccccaccctgctccccagcacagttctccccaccccgttccccagcacagcgcttggggcccctctggctccagaccaggccccttggagcaggaaaaagatccactgatggaattcagacccctttccccttgggtccccagacagctcccccaagggaggagctgaggactttcctccctctgccccaagccttgtttccccaaggacaggtaccaacctcctcccctactgacacttctcaaccaagaaaacttcctttccattccctcaccagctgggcacccctatagctgcttaaatactttccaaatccagctgcactcctagccagggaaggtgaagggatgcacagaggtgggggaggggtactgtgcagggtactcagcatccctgaccaccaggtgccaatgatcagcggacgtggtctggggcacacaggaggcaccttggataagctggagtctattcctggattcaatgtcatccagagcccagagcaggtacggggcgccacggatcagtcattaatccaggttgatgatggagaccctggccagaatcactaaaagatcactggtggatcattagggtcactaatgagaacactggtcaaggttactcatgagtcactgggcctgggccgaaatcatcagtggaactttgattaggatcataaaatgggaagttggtcaaaatcacagatggctggcggggcacggtggctcacacctgtagtcctagcacttggggaggccgaagagggcagatcccttgaacccaggagttcaaaaccagcctggataacacggcaaaaccccatctctacaaaatagttcgctgcgtgtggtggtgcacgcatgtggttccagctactcaggaggctgaggcaggaggatcacttgagcctgggaggtctaggctgcagtgagccgggacgatgccactgcactccagcctgggcaacagagtgagaccctgtcccagcactctgggaggcagaggagcccagttggagatcagcctgggtaatatagtgaaacttgatctctacaaaaaaaagaagaaaaaaaaaagccgcgtgtggtggtgcgcacctgtagtcccagctactgggaagctgaggtgggaggatcacttaagcccaggaggcagaggtcacaatgagccgaaattgtgccaactgcactccagcctgggcaacagaggaagactcttcacagaaaaaaaaaaaaaaaaaaaaaaagctgctaagtcatttaccataagtcactgagaacaggggatgtctgaccagatgcaagtgctgctggaccaggcgggctgctgtatcgtgggtcagagtgagcagctggttcctgcggacggaatcctatatgcagccagagatgtgacagccaccgtggacagcctgccactcatcacaggtgacctgactccatggcctgcttctgcatgttcacaggctcctgacctccaaactcaagtcaagggcctctcgttaggagttacccgtcacctgaccgtgtgcccccctacccccatcacaagatgcctgaccaccaccatgtggggtggcctgatactcaacccaccaggtgctgccacccccataataagggacttgaccctcaatgctcagggcccctgaccccaaagtcggcatccccgaactctcccaagaagctccaggttctccattgtctccaacctcctctgcctcccccaaagcctccattctcagtaagaaactcgtggaggggctgtccgctctggtggtggacgttaagttcggaggggccgccgtcttccccaaccaggagcaggcccgggagctggcaaagacgctggtgagcggtgtggcctttccctgggcaagcgtcttgatgcgggcccagcctacccttcacccctcccgtccccactgcctccctccactcagcagtcctgcctaaccccagtcccaccctcttctgcccgaagtccctccctccttcacggcttcctaacctgctgtgactttagaggtcaaggctggcccggcctggacctggggaagccctctgtggcgttcctgccccagaccaagtacaagttcctcctggccccatggcgaggtgtcgcacttcactcgtgtctcttccccaccccaatccttccctgacttcatgctggggggctggcaacccagggtgcagcaggggctggagttcgaccaagaaccggctgcagaaggccccgccatggggggtccacgctgagcctcctctccgcaggttggcgtgggagccagcctagggcttcgggtcgcggcagcgctgaccgccatggacaagcccctgggtcgctgcgtgggccacgccctggaggtggaggaggcgctgctctgcatggacggcgcaggcccgccagacttaagggacctggtcaccacgctcggtgagggggacggggtgtaggggagcggaggcggcggggggtgcttcccgctggggccgccccgacccggccgcgcctaagacccgtccccgcccgcagggggcgccctgctctggctcagcggacacgcggggactcaggcccagggcgctgcccgggtggccgcggcgctggacgacggctcggcccttggccgcttcgagcggatgctggcggcgcagggcgtggatcccggtctggcccgagccctgtgctcgggaagtccc

SEQ ID NO: 14764 - DNA, 1101 bp, Homo sapiens
gccggcagtggaccgctgtgcgcgaaccctgaaccctacggtcccgacccgcgggcgaggccgggtacctgggctgggatccggagcaagcgggcgagggcagcgccctaagcaggcccggagcgatggcagccttgatgaccccgggaaccggggccccacccgcgcctggtgacttctccggggaagggagccagggacttcccgacccttcgccagagcccaagcagctcccggagctgatccgcatgaagcgagacggaggccgcctgagcgaagcggacatcaggggcttcgtggccgctgtggtgaatgggagcgcgcagggcgcacagatcggggccatgctgatggccatccgacttcggggcatggatctggaggagacctcggtgctgacccaggccctggctcagtcgggacagcagctggagtggccagaggcctggcgccagcagcttgtggacaagcattccacagggggtgtgggtgacaaggtcagcctggtcctcgcacctgccctggcggcatgtggctgcaaggtgccaatgatcagcggacgtggtctggggcacacaggaggcaccttggataagctggagtctattcctggattcaatgtcatccagagcccagagcagatgcaagtgctgctggaccaggcgggctgctgtatcgtgggtcagagtgagcagctggttcctgcggacggaatcctatatgcagccagagatgtgacagccaccgtggacagcctgccactcatcacaggttggcgtgggagccagcctagggcttcgggtcgcggcagcgctgaccgccatggacaagcccctgggtcgctgcgtgggccacgccctggaggtggaggaggcgctgctctgcatggacggcgcaggcccgccagacttaagggacctggtcaccacgctcgggggcgccctgctctggctcagcggacacgcggggactcaggcccagggcgctgcccgggtggccgcggcgctggacgacggctcggcccttggccgcttcgagcggatgctggcggcgcagggcgtggatcccggtctggcccgagccctgtgctcgggaagtccc

SEQ ID NO: 14765 - DNA, 893 bp, Homo sapiens
ggcgacacagacacgggaccgaggggcggacaccggagagacacgggaaaggggtcgggacaggagcacgtggctcagacaccgacgccgggaggccgcagaccccggacgtgtcaggcatccccgcaggcccggagcgatggcagccttgatgaccccgggaaccggggccccacccgcgcctggtgacttctccggggaagggagccagggacttcccgacccttcgccagagcccaagcagctcccggagctgatccgcatgaagcgagacggaggccgcctgagcgaagcggacatcaggggcttcgtggccgctgtggtgaatgggagcgcgcagggcgcacagatcggtgcgtggggagggttgggcgttcctgaccccgactgggaggtcagcccgagagactttgggtccctgggggtgcgacggtgccccactaccagcaccggccccagggtgccccaccgctgtgggctgccaccctcacgcgtacccccacataccaggggccatgctgatggccatccgacttcggggcatggatctggaggagacctcggtgctgacccaggccctggctcagtcgggacagcagctggagtggccagaggcctggcgccagcagcttgtggacaagcattccacagggggtgtgggtgacaaggtcagcctggtcctcgcacctgccctggcggcatgtggctgcaaggttagaaaccacctcctttccagacgggagcctataccgcacatgcagcaaccagtccatccacaggcagctcccaacctcaagcctggcccaaagcctccaagaccctaccaaggcttctccccaccctgctccccagcacagttctccccaccccgttccccagcacagcgcttgggg

SEQ ID NO: 14766 - DNA, 736 bp, Homo sapiens
ggcgacacagacacgggaccgaggggcggacaccggagagacacgggaaaggggtcgggacaggagcacgtggctcagacaccgacgccgggaggccgcagaccccggacgtgtcaggcatccccgcaggcccggagcgatggcagccttgatgaccccgggaaccggggccccacccgcgcctggtgacttctccggggaagggagccagggacttcccgacccttcgccagagcccaagcagctcccggagctgatccgcatgaagcgagacggaggccgcctgagcgaagcggacatcaggggcttcgtggccgctgtggtgaatgggagcgcgcagggcgcacagatcggggccatgctgatggccatccgacttcggggcatggatctggaggagacctcggtgctgacccaggccctggctcagtcgggacagcagctggagtggccagaggcctggcgccagcagcttgtggacaagcattccacagggggtgtgggtgacaaggtcagcctggtcctcgcacctgccctggcggcatgtggctgcaaggttagaaaccacctcctttccagacgggagcctataccgcacatgcagcaaccagtccatccacaggcagctcccaacctcaagcctggcccaaagcctccaagaccctaccaaggcttctccccaccctgctccccagcacagttctccccaccccgttccccagcacagcgcttgggg

SEQ ID NO: 14767 - DNA, 872 bp, Homo sapiens
agtggaccgctgtgcgcgaaccctgaaccctacggtcccgacccgcgggcgaggccgggtacctgggctgggatccggagcaagcgggcgagggcagcgccctaagcaggtacgggcggggctcaagtcgcgaggcggggaagcgggaggcagacacggacgagggcgacacagacacgggaccgaggggcggacaccggagagacacgggaaaggggtcgggacaggagcacgtggctcagacaccgacgccgggaggccgcagaccccggacgtgtcaggcatccccgcaggcccggagcgatggcagccttgatgaccccgggaaccggggccccacccgcgcctggtgacttctccggggaagggagccagggacttcccgacccttcgccagagcccaagcagctcccggagctgatccgcatgaagcgagacggaggccgcctgagcgaagcggacatcaggggcttcgtggccgctgtggtgaatgggagcgcgcagggcgcacagatcggtgcgtggggagggttgggcgttcctgaccccgactgggaggtcagcccgagagactttgggtccctgggggtgcgacggtgccccactaccagcaccggccccagggtgccccaccgctgtgggctgccaccctcacgcgtacccccacataccaggggccatgctgatggccatccgacttcggggcatggatctggaggagacctcggtgctgacccaggccctggctcagtcgggacagcagctggagtggccagaggcctggcgccagcagcttgtggacaagcattccacagggggtgtgggtgacaaggtcagcctggtcctcgcacctgccctggcggcatgtggct

SEQ ID NO: 14768 - DNA, 559 bp, Homo sapiens
agtggaccgctgtgcgcgaaccctgaaccctacggtcccgacccgcgggcgaggccgggtacctgggctgggatccggagcaagcgggcgagggcagcgccctaagcagaccccggacgtgtcaggcatccccgcaggcccggagcgatggcagccttgatgaccccgggaaccggggccccacccgcgcctggtgacttctccggggaagggagccagggacttcccgacccttcgccagagcccaagcagctcccggagctgatccgcatgaagcgagacggaggccgcctgagcgaagcggacatcaggggcttcgtggccgctgtggtgaatgggagcgcgcagggcgcacagatcggggccatgctgatggccatccgacttcggggcatggatctggaggagacctcggtgctgacccaggccctggctcagtcgggacagcagctggagtggccagaggcctggcgccagcagcttgtggacaagcattccacagggggtgtgggtgacaaggtcagcctggtcctcgcacctgccctggcggcatgtggct

SEQ ID NO: 14769 - DNA, 3631 bp, Homo sapiens
gtggaccgctgtgcgcgaaccctgaaccctacggtcccgacccgcgggcgaggccgggtacctgggctgggatccggagcaagcgggcgagggcagcgccctaagcaggtacgggcggggctcaagtcgcgaggcggggaagcgggaggcagacacggacgagggcgacacagacacgggaccgaggggcggacaccggagagacacgggaaaggggtcgggacaggagcacgtggctcagacaccgacgccgggaggccgcagaccccggacgtgtcaggcatccccgcaggcccggagcgatggcagccttgatgaccccgggaaccggggccccacccgcgcctggtgacttctccggggaagggagccagggacttcccgacccttcgccagagcccaagcagctcccggagctgatccgcatgaagcgagacggaggccgcctgagcgaagcggacatcaggggcttcgtggccgctgtggtgaatgggagcgcgcagggcgcacagatcggtgcgtggggagggttgggcgttcctgaccccgactgggaggtcagcccgagagactttgggtccctgggggtgcgacggtgccccactaccagcaccggccccagggtgccccaccgctgtgggctgccaccctcacgcgtacccccacataccaggggccatgctgatggccatccgacttcggggcatggatctggaggagacctcggtgctgacccaggccctggctcagtcgggacagcagctggagtggccagaggcctggcgccagcagcttgtggacaagcattccacagggggtgtgggtgacaaggtcagcctggtcctcgcacctgccctggcggcatgtggctgcaaggttagaaaccacctcctttccagacgggagcctataccgcacatgcagcaaccagtccatccacaggcagctcccaacctcaagcctggcccaaagcctccaagaccctaccaaggcttctccccaccctgctccccagcacagttctccccaccccgttccccagcacagcgcttggggcccctctggctccagaccaggccccttggagcaggaaaaagatccactgatggaattcagacccctttccccttgggtccccagacagctcccccaagggaggagctgaggactttcctccctctgccccaagccttgtttccccaaggacaggtaccaacctcctcccctactgacacttctcaaccaagaaaacttcctttccattccctcaccagctgggcacccctatagctgcttaaatactttccaaatccagctgcactcctagccagggaaggtgaagggatgcacagaggtgggggaggggtactgtgcagggtactcagcatccctgaccaccaggtgccaatgatcagcggacgtggtctggggcacacaggaggcaccttggataagctggagtctattcctggattcaatgtcatccagagcccagagcaggtacggggcgccacggatcagtcattaatccaggttgatgatggagaccctggccagaatcactaaaagatcactggtggatcattagggtcactaatgagaacactggtcaaggttactcatgagtcactgggcctgggccgaaatcatcagtggaactttgattaggatcataaaatgggaagttggtcaaaatcacagatggctggcggggcacggtggctcacacctgtagtcctagcacttggggaggccgaagagggcagatcccttgaacccaggagttcaaaaccagcctggataacacggcaaaaccccatctctacaaaatagttcgctgcgtgtggtggtgcacgcatgtggttccagctactcaggaggctgaggcaggaggatcacttgagcctgggaggtctaggctgcagtgagccgggacgatgccactgcactccagcctgggcaacagagtgagaccctgtcccagcactctgggaggcagaggagcccagttggagatcagcctgggtaatatagtgaaacttgatctctacaaaaaaaagaagaaaaaaaaaagccgcgtgtggtggtgcgcacctgtagtcccagctactgggaagctgaggtgggaggatcacttaagcccaggaggcagaggtcacaatgagccgaaattgtgccaactgcactccagcctgggcaacagaggaagactcttcacagaaaaaaaaaaaaaaaaaaaaaaagctgctaagtcatttaccataagtcactgagaacaggggatgtctgaccagatgcaagtgctgctggaccaggcgggctgctgtatcgtgggtcagagtgagcagctggttcctgcggacggaatcctatatgcagccagagatgtgacagccaccgtggacagcctgccactcatcacaggtgacctgactccatggcctgcttctgcatgttcacaggctcctgacctccaaactcaagtcaagggcctctcgttaggagttacccgtcacctgaccgtgtgcccccctacccccatcacaagatgcctgaccaccaccatgtggggtggcctgatactcaacccaccaggtgctgccacccccataataagggacttgaccctcaatgctcagggcccctgaccccaaagtcggcatccccgaactctcccaagaagctccaggttctccattgtctccaacctcctctgcctcccccaaagcctccattctcagtaagaaactcgtggaggggctgtccgctctggtggtggacgttaagttcggaggggccgccgtcttccccaaccaggagcaggcccgggagctggcaaagacgctggtgagcggtgtggcctttccctgggcaagcgtcttgatgcgggcccagcctacccttcacccctcccgtccccactgcctccctccactcagcagtcctgcctaaccccagtcccaccctcttctgcccgaagtccctccctccttcacggcttcctaacctgctgtgactttagaggtcaaggctggcccggcctggacctggggaagccctctgtggcgttcctgccccagaccaagtacaagttcctcctggccccatggcgaggtgtcgcacttcactcgtgtctcttccccaccccaatccttccctgacttcatgctggggggctggcaacccagggtgcagcaggggctggagttcgaccaagaaccggctgcagaaggccccgccatggggggtccacgctgagcctcctctccgcaggttggcgtgggagccagcctagggcttcgggtcgcggcagcgctgaccgccatggacaagcccctgggtcgctgcgtgggccacgccctggaggtggaggaggcgctgctctgcatggacggcgcaggcccgccagacttaagggacctggtcaccacgctcggtgagggggacggggtgtaggggagcggaggcggcggggggtgcttcccgctggggccgccccgacccggccgcgcctaagacccgtccccgcccgcagggggcgccctgctctggctcagcggacacgcggggactcaggcccagggcgctgcccgggtggccgcggcgctggacgacggctcggcccttggcc

SEQ ID NO: 14770 - DNA, 616 bp, Homo sapiens
gtggaccgctgtgcgcgaaccctgaaccctacggtcccgacccgcgggcgaggccgggtacctgggctgggatccggagcaagcgggcgagggcagcgccctaagcagatgcaagtgctgctggaccaggcgggctgctgtatcgtgggtcagagtgagcagctggttcctgcggacggaatcctatatgcagccagagatgtgacagccaccgtggacagcctgccactcatcacagcctccattctcagtaagaaactcgtggaggggctgtccgctctggtggtggacgttaagttcggaggggccgccgtcttccccaaccaggagcaggcccgggagctggcaaagacgctggttggcgtgggagccagcctagggcttcgggtcgcggcagcgctgaccgccatggacaagcccctgggtcgctgcgtgggccacgccctggaggtggaggaggcgctgctctgcatggacggcgcaggcccgccagacttaagggacctggtcaccacgctcgggggcgccctgctctggctcagcggacacgcggggactcaggcccagggcgctgcccgggtggccgcggcgctggacgacggctcggcccttggcc

SEQ ID NO: 14771 - DNA, 586 bp, Homo sapiens
ggcccgagccctgtgctcgggaagtcccgcagaacgccggcagctgctgcctcgcgcccgggagcaggaggagctgctggcgcccgcagatggtgagcgtcgggggagtccccgtccttccgcctccgccatccccttcccttcccgaggccccgccccttcccgagcccgcgcctctcagcccctctccccgcaggcaccgtggagctggtccgggcgctgccgctggcgctggtgctgcacgagctcggggccgggcgcagccgcgctggggagccgctccgcctgggggtgggcgcagagctgctggtcgacgtgggtcagaggctgcgccgtggtgagcgccgcccccgccctgctggccccgcacccccgcccagctccggccgcgcggcctctaacagcccctcgctctgcagggaccccctggctccgcgtgcaccgggacggccccgcgctcagcggcccgcagagccgcgccctgcaggaggcgctcgtactctccgaccgcgcgccattcgccgccccctcgcccttcgcagagctcgttctgccgccgcagcaataaagctcctttgccgcgaaa

SEQ ID NO: 14772 - DNA, 259 bp, Homo sapiens
ggcccgagccctgtgctcgggaagtcccgcagaacgccggcagctgctgcctcgcgcccgggagcaggaggagctgctggcgcccgcagatgggaccccctggctccgcgtgcaccgggacggccccgcgctcagcggcccgcagagccgcgccctgcaggaggcgctcgtactctccgaccgcgcgccattcgccgccccctcgcccttcgcagagctcgttctgccgccgcagcaataaagctcctttgccgcgaaa

SEQ ID NO: 14773 - DNA, 2816 bp, Homo sapiens
agtggaccgctgtgcgcgaaccctgaaccctacggtcccgacccgcgggcgaggccgggtacctgggctgggatccggagcaagcgggcgagggcagcgccctaagcaggtacgggcggggctcaagtcgcgaggcggggaagcgggaggcagacacggacgagggcgacacagacacgggaccgaggggcggacaccggagagacacgggaaaggggtcgggacaggagcacgtggctcagacaccgacgccgggaggccgcagaccccggacgtgtcaggcatccccgcaggcccggagcgatggcagccttgatgaccccgggaaccggggccccacccgcgcctggtgacttctccggggaagggagccagggacttcccgacccttcgccagagcccaagcagctcccggagctgatccgcatgaagcgagacggaggccgcctgagcgaagcggacatcaggggcttcgtggccgctgtggtgaatgggagcgcgcagggcgcacagatcggtgcgtggggagggttgggcgttcctgaccccgactgggaggtcagcccgagagactttgggtccctgggggtgcgacggtgccccactaccagcaccggccccagggtgccccaccgctgtgggctgccaccctcacgcgtacccccacataccaggggccatgctgatggccatccgacttcggggcatggatctggaggagacctcggtgctgacccaggccctggctcagtcgggacagcagctggagtggccagaggcctggcgccagcagcttgtggacaagcattccacagggggtgtgggtgacaaggtcagcctggtcctcgcacctgccctggcggcatgtggctgcaaggttagaaaccacctcctttccagacgggagcctataccgcacatgcagcaaccagtccatccacaggcagctcccaacctcaagcctggcccaaagcctccaagaccctaccaaggcttctccccaccctgctccccagcacagttctccccaccccgttccccagcacagcgcttggggcccctctggctccagaccaggccccttggagcaggaaaaagatccactgatggaattcagacccctttccccttgggtccccagacagctcccccaagggaggagctgaggactttcctccctctgccccaagccttgtttccccaaggacaggtaccaacctcctcccctactgacacttctcaaccaagaaaacttcctttccattccctcaccagctgggcacccctatagctgcttaaatactttccaaatccagctgcactcctagccagggaaggtgaagggatgcacagaggtgggggaggggtactgtgcagggtactcagcatccctgaccaccaggtgccaatgatcagcggacgtggtctggggcacacaggaggcaccttggataagctggagtctattcctggattcaatgtcatccagagcccagagcaggtacggggcgccacggatcagtcattaatccaggttgatgatggagaccctggccagaatcactaaaagatcactggtggatcattagggtcactaatgagaacactggtcaaggttactcatgagtcactgggcctgggccgaaatcatcagtggaactttgattaggatcataaaatgggaagttggtcaaaatcacagatggctggcggggcacggtggctcacacctgtagtcctagcacttggggaggccgaagagggcagatcccttgaacccaggagttcaaaaccagcctggataacacggcaaaaccccatctctacaaaatagttcgctgcgtgtggtggtgcacgcatgtggttccagctactcaggaggctgaggcaggaggatcacttgagcctgggaggtctaggctgcagtgagccgggacgatgccactgcactccagcctgggcaacagagtgagaccctgtcccagcactctgggaggcagaggagcccagttggagatcagcctgggtaatatagtgaaacttgatctctacaaaaaaaagaagaaaaaaaaaagccgcgtgtggtggtgcgcacctgtagtcccagctactgggaagctgaggtgggaggatcacttaagcccaggaggcagaggtcacaatgagccgaaattgtgccaactgcactccagcctgggcaacagaggaagactcttcacagaaaaaaaaaaaaaaaaaaaaaaagctgctaagtcatttaccataagtcactgagaacaggggatgtctgaccagatgcaagtgctgctggaccaggcgggctgctgtatcgtgggtcagagtgagcagctggttcctgcggacggaatcctatatgcagccagagatgtgacagccaccgtggacagcctgccactcatcacaggtgacctgactccatggcctgcttctgcatgttcacaggctcctgacctccaaactcaagtcaagggcctctcgttaggagttacccgtcacctgaccgtgtgcccccctacccccatcacaagatgcctgaccaccaccatgtggggtggcctgatactcaacccaccaggtgctgccacccccataataagggacttgaccctcaatgctcagggcccctgaccccaaagtcggcatccccgaactctcccaagaagctccaggttctccattgtctccaacctcctctgcctcccccaaagcctccattctcagtaagaaactcgtggaggggctgtccgctctggtggtggacgttaagttcggaggggccgccgtcttccccaacc

SEQ ID NO: 14774 - DNA, 1156 bp, Homo sapiens
agtggaccgctgtgcgcgaaccctgaaccctacggtcccgacccgcgggcgaggccgggtacctgggctgggatccggagcaagcgggcgagggcagcgccctaagcaggcccggagcgatggcagccttgatgaccccgggaaccggggccccacccgcgcctggtgacttctccggggaagggagccagggacttcccgacccttcgccagagcccaagcagctcccggagctgatccgcatgaagcgagacggaggccgcctgagcgaagcggacatcaggggcttcgtggccgctgtggtgaatgggagcgcgcagggcgcacagatcggggccatgctgatggccatccgacttcggggcatggatctggaggagacctcggtgctgacccaggccctggctcagtcgggacagcagctggagtggccagaggcctggcgccagcagcttgtggacaagcattccacagggggtgtgggtgacaaggtcagcctggtcctcgcacctgccctggcggcatgtggctgcaaggtgccaatgatcagcggacgtggtctggggcacacaggaggcaccttggataagctggagtctattcctggattcaatgtcatccagagcccagagcagatgcaagtgctgctggaccaggcgggctgctgtatcgtgggtcagagtgagcagctggttcctgcggacggaatcctatatgcagccagagatgtgacagccaccgtggacagcctgccactcatcacaggtgacctgactccatggcctgcttctgcatgttcacaggctcctgacctccaaactcaagtcaagggcctctcgttaggagttacccgtcacctgaccgtgtgcccccctacccccatcacaagatgcctgaccaccaccatgtggggtggcctgatactcaacccaccaggtgctgccacccccataataagggacttgaccctcaatgctcagggcccctgaccccaaagtcggcatccccgaactctcccaagaagctccaggttctccattgtctccaacctcctctgcctcccccaaagcctccattctcagtaagaaactcgtggaggggctgtccgctctggtggtggacgttaagttcggaggggccgccgtcttccccaacc

SEQ ID NO: 14775 - DNA, 1328 bp, Homo sapiens
agtggaccgctgtgcgcgaaccctgaaccctacggtcccgacccgcgggcgaggccgggtacctgggctgggatccggagcaagcgggcgagggcagcgccctaagcaggtacgggcggggctcaagtcgcgaggcggggaagcgggaggcagacacggacgagggcgacacagacacgggaccgaggggcggacaccggagagacacgggaaaggggtcgggacaggagcacgtggctcagacaccgacgccgggaggccgcagaccccggacgtgtcaggcatccccgcaggcccggagcgatggcagccttgatgaccccgggaaccggggccccacccgcgcctggtgacttctccggggaagggagccagggacttcccgacccttcgccagagcccaagcagctcccggagctgatccgcatgaagcgagacggaggccgcctgagcgaagcggacatcaggggcttcgtggccgctgtggtgaatgggagcgcgcagggcgcacagatcggtgcgtggggagggttgggcgttcctgaccccgactgggaggtcagcccgagagactttgggtccctgggggtgcgacggtgccccactaccagcaccggccccagggtgccccaccgctgtgggctgccaccctcacgcgtacccccacataccaggggccatgctgatggccatccgacttcggggcatggatctggaggagacctcggtgctgacccaggccctggctcagtcgggacagcagctggagtggccagaggcctggcgccagcagcttgtggacaagcattccacagggggtgtgggtgacaaggtcagcctggtcctcgcacctgccctggcggcatgtggctgcaaggttagaaaccacctcctttccagacgggagcctataccgcacatgcagcaaccagtccatccacaggcagctcccaacctcaagcctggcccaaagcctccaagaccctaccaaggcttctccccaccctgctccccagcacagttctccccaccccgttccccagcacagcgcttggggcccctctggctccagaccaggccccttggagcaggaaaaagatccactgatggaattcagacccctttccccttgggtccccagacagctcccccaagggaggagctgaggactttcctccctctgccccaagccttgtttccccaaggacaggtaccaacctcctcccctactgacacttctcaaccaagaaaacttcctttccattccctcaccagctgggcacccctatagctgcttaaatactttccaaatccagctgcactcctag

SEQ ID NO: 14776 - DNA, 1144 bp, Homo sapiens
agtggaccgctgtgcgcgaaccctgaaccctacggtcccgacccgcgggcgaggccgggtacctgggctgggatccggagcaagcgggcgagggcagcgccctaagcaggcccggagcgatggcagccttgatgaccccgggaaccggggccccacccgcgcctggtgacttctccggggaagggagccagggacttcccgacccttcgccagagcccaagcagctcccggagctgatccgcatgaagcgagacggaggccgcctgagcgaagcggacatcaggggcttcgtggccgctgtggtgaatgggagcgcgcagggcgcacagatcggtgcgtggggagggttgggcgttcctgaccccgactgggaggtcagcccgagagactttgggtccctgggggtgcgacggtgccccactaccagcaccggccccagggtgccccaccgctgtgggctgccaccctcacgcgtacccccacataccaggggccatgctgatggccatccgacttcggggcatggatctggaggagacctcggtgctgacccaggccctggctcagtcgggacagcagctggagtggccagaggcctggcgccagcagcttgtggacaagcattccacagggggtgtgggtgacaaggtcagcctggtcctcgcacctgccctggcggcatgtggctgcaaggttagaaaccacctcctttccagacgggagcctataccgcacatgcagcaaccagtccatccacaggcagctcccaacctcaagcctggcccaaagcctccaagaccctaccaaggcttctccccaccctgctccccagcacagttctccccaccccgttccccagcacagcgcttggggcccctctggctccagaccaggccccttggagcaggaaaaagatccactgatggaattcagacccctttccccttgggtccccagacagctcccccaagggaggagctgaggactttcctccctctgccccaagccttgtttccccaaggacaggtaccaacctcctcccctactgacacttctcaaccaagaaaacttcctttccattccctcaccagctgggcacccctatagctgcttaaatactttccaaatccagctgcactcctag

SEQ ID NO: 14777 - DNA, 2611 bp, Homo sapiens
ctggaggagacctcggtgctgacccaggccctggctcagtcgggacagcagctggagtggccagaggcctggcgccagcagcttgtggacaagcattccacagggggtgtgggtgacaaggtcagcctggtcctcgcacctgccctggcggcatgtggctgcaaggttagaaaccacctcctttccagacgggagcctataccgcacatgcagcaaccagtccatccacaggcagctcccaacctcaagcctggcccaaagcctccaagaccctaccaaggcttctccccaccctgctccccagcacagttctccccaccccgttccccagcacagcgcttggggcccctctggctccagaccaggccccttggagcaggaaaaagatccactgatggaattcagacccctttccccttgggtccccagacagctcccccaagggaggagctgaggactttcctccctctgccccaagccttgtttccccaaggacaggtaccaacctcctcccctactgacacttctcaaccaagaaaacttcctttccattccctcaccagctgggcacccctatagctgcttaaatactttccaaatccagctgcactcctagccagggaaggtgaagggatgcacagaggtgggggaggggtactgtgcagggtactcagcatccctgaccaccaggtgccaatgatcagcggacgtggtctggggcacacaggaggcaccttggataagctggagtctattcctggattcaatgtcatccagagcccagagcaggtacggggcgccacggatcagtcattaatccaggttgatgatggagaccctggccagaatcactaaaagatcactggtggatcattagggtcactaatgagaacactggtcaaggttactcatgagtcactgggcctgggccgaaatcatcagtggaactttgattaggatcataaaatgggaagttggtcaaaatcacagatggctggcggggcacggtggctcacacctgtagtcctagcacttggggaggccgaagagggcagatcccttgaacccaggagttcaaaaccagcctggataacacggcaaaaccccatctctacaaaatagttcgctgcgtgtggtggtgcacgcatgtggttccagctactcaggaggctgaggcaggaggatcacttgagcctgggaggtctaggctgcagtgagccgggacgatgccactgcactccagcctgggcaacagagtgagaccctgtcccagcactctgggaggcagaggagcccagttggagatcagcctgggtaatatagtgaaacttgatctctacaaaaaaaagaagaaaaaaaaaagccgcgtgtggtggtgcgcacctgtagtcccagctactgggaagctgaggtgggaggatcacttaagcccaggaggcagaggtcacaatgagccgaaattgtgccaactgcactccagcctgggcaacagaggaagactcttcacagaaaaaaaaaaaaaaaaaaaaaaagctgctaagtcatttaccataagtcactgagaacaggggatgtctgaccagatgcaagtgctgctggaccaggcgggctgctgtatcgtgggtcagagtgagcagctggttcctgcggacggaatcctatatgcagccagagatgtgacagccaccgtggacagcctgccactcatcacaggtgacctgactccatggcctgcttctgcatgttcacaggctcctgacctccaaactcaagtcaagggcctctcgttaggagttacccgtcacctgaccgtgtgcccccctacccccatcacaagatgcctgaccaccaccatgtggggtggcctgatactcaacccaccaggtgctgccacccccataataagggacttgaccctcaatgctcagggcccctgaccccaaagtcggcatccccgaactctcccaagaagctccaggttctccattgtctccaacctcctctgcctcccccaaagcctccattctcagtaagaaactcgtggaggggctgtccgctctggtggtggacgttaagttcggaggggccgccgtcttccccaaccaggagcaggcccgggagctggcaaagacgctggtgagcggtgtggcctttccctgggcaagcgtcttgatgcgggcccagcctacccttcacccctcccgtccccactgcctccctccactcagcagtcctgcctaaccccagtcccaccctcttctgcccgaagtccctccctccttcacggcttcctaacctgctgtgactttagaggtcaaggctggcccggcctggacctggggaagccctctgtggcgttcctgccccagaccaagtacaagttcctcctggccccatggcgaggtgtcgcacttcactcgtgtctcttccccaccccaatccttccctgacttcatgctggggggctggcaacccagggtgcagcaggggctggagttcgaccaagaaccggctgcagaaggccccgccatggggggtccacgctgagcctcctctccgcaggttggcgtgggagccagcctagggcttcgggtcgcggcagcgctgaccg

SEQ ID NO: 14778 - DNA, 525 bp, Homo sapiens
ctggaggagacctcggtgctgacccaggccctggctcagtcgggacagcagctggagtggccagaggcctggcgccagcagcttgtggacaagcattccacagggggtgtgggtgacaaggtcagcctggtcctcgcacctgccctggcggcatgtggctgcaaggaggcaccttggataagctggagtctattcctggattcaatgtcatccagagcccagagcagatgcaagtgctgctggaccaggcgggctgctgtatcgtgggtcagagtgagcagctggttcctgcggacggaatcctatatgcagccagagatgtgacagccaccgtggacagcctgccactcatcacagcctccattctcagtaagaaactcgtggaggggctgtccgctctggtggtggacgttaagttcggaggggccgccgtcttccccaaccaggagcaggcccgggagctggcaaagacgctggttggcgtgggagccagcctagggcttcgggtcgcggcagcgctgaccg

SEQ ID NO: 14779 - DNA, 1836 bp, Homo sapiens
gctgtatcgtgggtcagagtgagcagctggttcctgcggacggaatcctatatgcagccagagatgtgacagccaccgtggacagcctgccactcatcacaggtgacctgactccatggcctgcttctgcatgttcacaggctcctgacctccaaactcaagtcaagggcctctcgttaggagttacccgtcacctgaccgtgtgcccccctacccccatcacaagatgcctgaccaccaccatgtggggtggcctgatactcaacccaccaggtgctgccacccccataataagggacttgaccctcaatgctcagggcccctgaccccaaagtcggcatccccgaactctcccaagaagctccaggttctccattgtctccaacctcctctgcctcccccaaagcctccattctcagtaagaaactcgtggaggggctgtccgctctggtggtggacgttaagttcggaggggccgccgtcttccccaaccaggagcaggcccgggagctggcaaagacgctggtgagcggtgtggcctttccctgggcaagcgtcttgatgcgggcccagcctacccttcacccctcccgtccccactgcctccctccactcagcagtcctgcctaaccccagtcccaccctcttctgcccgaagtccctccctccttcacggcttcctaacctgctgtgactttagaggtcaaggctggcccggcctggacctggggaagccctctgtggcgttcctgccccagaccaagtacaagttcctcctggccccatggcgaggtgtcgcacttcactcgtgtctcttccccaccccaatccttccctgacttcatgctggggggctggcaacccagggtgcagcaggggctggagttcgaccaagaaccggctgcagaaggccccgccatggggggtccacgctgagcctcctctccgcaggttggcgtgggagccagcctagggcttcgggtcgcggcagcgctgaccgccatggacaagcccctgggtcgctgcgtgggccacgccctggaggtggaggaggcgctgctctgcatggacggcgcaggcccgccagacttaagggacctggtcaccacgctcggtgagggggacggggtgtaggggagcggaggcggcggggggtgcttcccgctggggccgccccgacccggccgcgcctaagacccgtccccgcccgcagggggcgccctgctctggctcagcggacacgcggggactcaggcccagggcgctgcccgggtggccgcggcgctggacgacggctcggcccttggccgcttcgagcggatgctggcggcgcagggcgtggatcccggtctggcccgagccctgtgctcgggaagtcccgcagaacgccggcagctgctgcctcgcgcccgggagcaggaggagctgctggcgcccgcagatggtgagcgtcgggggagtccccgtccttccgcctccgccatccccttcccttcccgaggccccgccccttcccgagcccgcgcctctcagcccctctccccgcaggcaccgtggagctggtccgggcgctgccgctggcgctggtgctgcacgagctcggggccgggcgcagccgcgctggggagccgctccgcctgggggtgggcgcagagctgctggtcgacgtgggtcagaggctgcgccgtggtgagcgccgcccccgccctgctggccccgcacccccgcccagctccggccgcgcggcctctaacagcccctcgctctgcagggaccccctggctccgcgtgcaccgggacggccccgcgctcagcggcccgcagagccgcgccctg

SEQ ID NO: 14780 - DNA, 866 bp, Homo sapiens
gctgtatcgtgggtcagagtgagcagctggttcctgcggacggaatcctatatgcagccagagatgtgacagccaccgtggacagcctgccactcatcacagctccaggttctccattgtctccaacctcctctgcctcccccaaagcctccattctcagtaagaaactcgtggaggggctgtccgctctggtggtggacgttaagttcggaggggccgccgtcttccccaaccaggagcaggcccgggagctggcaaagacgctggttggcgtgggagccagcctagggcttcgggtcgcggcagcgctgaccgccatggacaagcccctgggtcgctgcgtgggccacgccctggaggtggaggaggcgctgctctgcatggacggcgcaggcccgccagacttaagggacctggtcaccacgctcgggggcgccctgctctggctcagcggacacgcggggactcaggcccagggcgctgcccgggtggccgcggcgctggacgacggctcggcccttggccgcttcgagcggatgctggcggcgcagggcgtggatcccggtctggcccgagccctgtgctcgggaagtcccgcagaacgccggcagctgctgcctcgcgcccgggagcaggaggagctgctggcgcccgcagatggcaccgtggagctggtccgggcgctgccgctggcgctggtgctgcacgagctcggggccgggcgcagccgcgctggggagccgctccgcctgggggtgggcgcagagctgctggtcgacgtgggtcagaggctgcgccgtgggaccccctggctccgcgtgcaccgggacggccccgcgctcagcggcccgcagagccgcgccctg

SEQ ID NO: 14781 - DNA, 18822 bp, Homo sapiens
caaacaggcagcgcgcgacaatggcggtcgctcgtgcagctttggggccattggtgacgggtctgtacgacgtgcaggctttcaagtttggggacttcgtgctgaagagcgggctttcctcccccatctacatcgatctgcggggcatcgtgtctcgaccgcgtcttctgagtcaggtgctggcctaggaagggaaaggacagggcttggtggcgggaaggaggacaaggaaatggaagagggtgacaggagttgggccgtgagtgagagcaaaagagccaagcaggcagaccgaccctactcttggtttggggagtaagcatgagaagcacagaggccaggggttgggctcctcgagagtcgtctgttctttcacccacacgcttagacacgtgttttgcaaaagtcgggaaacccagtttggaacgctttctggcactgaagcacacttgaatgaattctgtatatttaactctttaagaaaattagacttgcggccgggcgtggtgcctcatgagagtaataccagcactttgggatgcctaagtgggcagatcacctgagccccaggagttcgagaccagcctgggcaacatgacgagaccccgtctctacaaaaaattagctgggtgtggtggcgcacgcctgggacgctgaggtgggaggatcacctgagcctgggaggtcaaggctgcaatgagctgtcattgcgccactgcactccagcctgggcgacaagtgagaccctgccctcaaaaaacaaacaaatagaccgggaaaacgtgggtaggcagagaattcagtagctgggaaattactggtgagaaaaggaaaatagaacaaccagaactctgtgatgtatacaaaatttatcagagcccagagagacttcaaccatactcccctatgcagccccgggacaattatttaaaggaattttgtccctgactagctgcctctcccattatcttaatgtacctggaatgtgtgatacaaagaacaatgtatagctaatcaatcgcttgtgttattattttatttatttattttttagatgggatctctcttacgtcacccaggctggagtgcagctctgtgatcatagctcactgcagcctggaactcctgggcttaagagatcttcttgcctcgggtgagcacaggggctcatgcctgtagtcccaactttgggaggctttctttgggaggctgaggcgggtggatcacttaaggtctggagttcgagaccagcctggccaacatggtgaaaccctgtctctactgaaaatgcaaaaattagctgggcatggtggtgcacacctgtaatcccagctactcaggaggctgaggcagaagaatcaggaggttgcagttagccgaaattgagccactgcactccagcctgggcaacagagggagactgtctcagaaaaaaaaaaaaaaaagagatcctcttacctcaacctctgagtagctggaactacaggcatgtgccatcatgcccaccaaattaaaaattttttttttttgtagagaggaggtctcaccatactgcccaggctcgtctcaaactcctggcctcaaaagatcctcttgccttggcggcttcccaagtagctgggactacaaatgcctggtgccacccccgggctacctcctgttatttcaatgcaaattcttggtgaatataggaactgccccttcttttgctttaaaaatccacttgtaactactgtaatcgaagcctatagtcagggcaactactcatattaattttgcctcagcctcttcctgttaggtccacacttggaagggctgtttggaaaggggagttgaattttgcactgtgcggccagaagcaataattaagactagaaggtggacatattgggaaagcaggtttttagtcaatataaggaaaatttttgtacaaattagaggtttctaatacagtgcttctcaactttgagtatatatgaattacctgggaattttgttaaaatgcagaatccatttctgtagctctgagactagacctgaggttgtgcatttctaacaaagtgccagctgaaactgcagaccacactgagtagagggccgtaaatatgctttccaatacagtttgctactagccacgtgttactattgagcattatgaatttttaagtttaaatagtcatatatggccagtggctatcatattggactgcaaagatagagaacatttccatcattgcagaaagttctatcaagaagacatataagtttcctcagcccacttaagggtttatgttcactagggaccactttgtgtggttattgtaaaaagtattgaagataggttggactattaaggttgcggtactttggaccattaacttctcaccatccagaatcttgctatggtgtatcttagcaatgtggagaattactaaggattttctagggaaaaattgatttattttaataagccagctgataaatgacagaaaaagttttttgataactagatcatggtgtgtgtgtgtgtgtgtgtgtgtgtgtgtattttggtgattaactggggaggagttcaaaacatggagagacttgggtataacaaaacttcttttcacatcttatgcgaatagaatttctcagtatttacaccccaaaaagcaatataatttatgctaaactctaacttcccttaataagtgataataagtgatatttgactatagtactatatacacattagtgtacataaagtaattggagaggaaaggtagcattaactcactaaaaatgcattttccaaatctgtttttatctctctgtcaaaatttgcaaatcatgtttgaattaatcatatgcttgttataatttaatgatatacagaagaattctcttctttaaaaagtacaatttccattttcttttcctcaagagaatagtttctcttcagtccttaaggattcagctccttacatgggctttggtgagggtcatgaggcagcacccacaggtttaaatcagattggggtatttggtccttgtgggattcacaagatggattactgactgccttgctgtgaatggcacaactcacaccttaatgtagcttcgcatacagcttgggaagaacataggaggcaaagttgctcactgcagtaatgtccctgactgctgcggcctctactatgttttgcacgacgagcttcttaatggtcttttccttgggcatgcatcggacatagtatgtgccactactggccacagccctttttggcacgatcattgttcctttcttttctttgtcatcttggaagtaaggacctgagagagctacagaagaattcttgacatctagagacttatggtcatgggaaatttttttttaattaccattttaaatttcagtttacatacatatagacaagtatgacagagggatcagtaaaagcttttcaagtataatcatatattactttagaataaaattctgtggacacagtggagtgaaaatatgagttggaaaaagatgtaaaaaattttaaacttttcatagtccagcaatttcacgttttgtttttttaaatggagatggtggatatccagtcactagcatttgtattccaagtttattccttaaaaagagtgataaaacagttctaagataatatgttaatatttttagtactagaaattacattctctgcaacttaaaatagtcatagtttttttttgtttgtttttttactctttagaagtactggtgtaaacctatgatctagttcacaaagcaactcagtgactgtttgcttttttaaaaaaaaaatgaggtggtcttgggtgggaatatgtatcctaacattaaaatatgatgatttatgtggaaaaggagattataaaatagcaattcacacaatagtctgtatttatgaaacttcctaattgaaggcttctttcaggatatataactaaaagatgataggtttagatactcagcctaatgggttactgaggaaaccaggaagtcgggatcgtccttagtctttggggtcaacatcatgagcttccccagcacatctcaggttgccttcagaacagattctgagtctggttgaatagattcattcttgtgtttttagatttatatttgtgtactgggtttatggagagggtaataaaaaggcatttgtttttttttctccaatcaagtttgagacttacccccactagtttattactgtcttttctgttacgttgttacatgtttatacactatttaaaatagttacaataggctgggcgcagtggctcacgcctgtaatcccagcactttgggaggccgaggcaggtggatcacaaggccaagagtttgaggccagcctgaccaacatagtgaaaccccatctctactaaaaatacaaaaaaattagctgggtgtagtggtgcgcgcctgtaatctcagctccttgggaggctggggcaggagaatcacttgaacctgggaggcagaggttgcagtgagccgagatcgcaccactgcattccagcctgggcaacagggcgagactccatctcaaaaaataaaaaatataaaataaaataaaatagttacaataaaacattgtttatgtgttcattttcttacaggttgcagatattttattccaaactgcccaaaatgcaggcatcagttttgacaccgtgtgtggagtgccttatacagctttgccattggctacagttatctgttcaaccaatcaaattccaatgcttattagaaggaaagaaacaaaggattatggtaaaataaaagtaacataaagcatgaagttaattaatctgtaacatcatactcttagaatttttccgcttctgtgcactaatgttttaccagtcatcttgagttctttaagttgttactgcttgtagaatttataattgttactataagtcaccttcctttttttagacttggggtgaaatgctttgtattgattaggaaatgaaaagtgctttttttggtactgtatctatgaaactccaacattttttttttttaccagcccttccctcatcagcaaaatgttgtaacagcacatactttcccagtatgtttgtatttaaacttcatgaaaagtaatccatggataaaattactctcataaagcagtgtaaacacctcagagagatatttttgtgggttcatggcaatagattatcaggtgacttgctttaaaacccgaaaatttgtccaggcaccatggctcacgcctgtaatcccagcacttttggaggccgaggtaggcggatcacttgaggtcaggagttcaagaccagcctgaccaacgtggtaaaactccgtctctactaaaaatacaaaaattagctgggcgtggtggtatgcacctgtagtcccagctactggagaggctgaggcaggagatgcgcttgaacccaggaggtggaggttgcaatgagctgagattgcgccactgcactccagcctgggcgacaaagtgagaccctatttcaaacaaaaaaaaccctgaaaattggccaggcacagtggctcacacttgtaatcccagcactttgggagggcaaggtgggaggatagcttgagcccaggagtttgagaccagctttggcaacgtttgtctctacaaaaataaaaaaagaatacaaaattagctgagtgtcacagttacatgggaggctgaggcaggaggatgccttgagcccaggagctgaaggttgcagtgagctatgattatgccactgcactgcaccctgggtgacagagcaagactgtcaaaaaataaataaataaaacctgaaaagcaatcttaatgatagtaaggaattaatgggcttttttgtttatgttggtttattagtgttttgttactttttttaaaacaaatccttcttctacagatgcattctgaaaatttttatgattaaaaaaaagaaacatattagttgagtttttgtggcgtaagggcagtgttagtttttctgtttttgttttttgtttttttgagacaaggtctcactctgttgcccaggctggtcttgaactcctggtctcaagccatcctcctgcctcatcctcccaaagtgctgggattacaggtgtgagccactgcacccagctgagactttctgagctaaaaaaaaactgtatgaatccctacccataagaaaactcttatttctattattttatgttttaaaaactgtttctatgaaattatgcatttttaaatatactataaatacttgcagtcttgtgttctagcttaagctgattcagttaaacttaccagttgttcaagaagcggaaaggatttgatgagtctaaagtctacagcccaagttatttacgttttgtagattatctgaaaatagtctagtgggatttgggtagagaagtatatatttaatcacattgcattatataattctttagattgtagtaatgggtctaaatgattgctgaatatttttccttctgaatttgtgtcttcaaaaagtcaattatttggctgatcttgaatagtgaacttaaaatactttgatggaaaaaggaattatttcattcatgatactggattattctgtttcataactttccttgatctaggtgatcttgctgtaagaaactctgtatttaggctggacgtggtggctcacacctataatcctagcattttgggaggctgaggcgggaggatcacttgagctcaggagttcaagaccagcctagacaacatagtgagacctcatctctatgataaaacagatttttttaaagtaaaaaaaaaacctctctatttgaaaatttgatcataaaacacattaagcagtgtttataatgtgaaataatttacttgatttactataaatatactgtatgtgtaactggcaagtttggtatacagagttggctttatacataaatatactgtatgtgcaactagcaagtttggtatacagaattggtatacacatatactgtatgtgtaactggcaagttttgtatacagagtgtgtgtacgtatatacgcacatatacatacatatttaaatttggaatcagcaaaattttttcttttctaggaactaagcgtcttgtagaaggaactattaatccaggagaaacctgtttaatcattgaagatgttgtcaccagtggatctagtgttttggaaactgttgaggttcttcagaaggagggcttgaaggtcactgatgccatagtgctgttggacagagagcagggaggcaaggacaagttgcaggcgcacgggatccgcctccactcagtgtgtacattgtccaaaatgctggagattctcgagcagcagaaaaaagttgatgctgagacagttgggagagtgaagaggtttattcaggagaatgtctttgtggcagcgaatcataatggttctcccctttctataaaggaagcacccaaagaactcagcttcggtgcacgtgcagagctgcccaggatccacccagttgcatcgaagcttctcaggcttatgcaaaagaaggagaccaatctgtgtctatctgctgatgtttcactggccagagagctgttgcagctagcagatgctttaggacctagtatctgcatgctgaagactcatgtagatattttgaatgattttactctggatgtgatgaaggagttgataactctggcaaaatgccatgagttcttgatatttgaagaccggaagtttgcagatataggaaacacagtgaaaaagcagtatgaaggtaagtgtattattcaggaatctgcaagaatcagaaatccagcttaaactgaagaagaaaaaggaaatgctcatgtcattgaaagtccattcatagagcaggctgtcaagcgtggttggatccaggagctcaagtgatatcttcatgacttgctttctctccatctctcagctctgctttcttctctgttgacttctttctcaggtaggcatactctgcatgctcaccccaaaccaatcactctagcttgggatgtagaataccttcattaactagcctgggcaatttgctctgcaactgtgaggttgttaactctgtatgaccttcttgaaataagaaccagtcagggataatttccttaaagaaaatggatgtgctagtaccagaagaagggtatgtgcctgggcaagcaaatttgacagatgtccttggcagaatatgatgttttgaatgaaaattccacataaaggaaacaatgaaaaagaaatataaaatggtaagatttatttgtagcagaaaaagttctattgataaacattatttaaagatttttcttttatcaaatagggactcaaagtagtgcatgtgttggttgagaaaaatgcttagttctactgcctattctatgcaaatttctgtctatgtttttacaactgtgtgatcagactatatttaatgcatttttcacttaacctggtaacagatatttggttgtgtcatataacattttttgtaggcatctttgaggtaacttttctttaatgtatgcatgttcataagctatttctttaaaatagatttgtctttaagtgacttcttcatgtgcttaagatgtcctgccctcatcacattgcctagcttactttagctgattgactgacataagagttttatacaaactttcttcagctctgcatagagttttttcgaaaatcaggcttgttactgtccgcttttaaaaggaatatagttgcctattgaaattagatagctaaggagatctaaggaacacgtagaaatattgagcgatagtaaagctgctgagagacccctgcagagtgaaaacttgtcatcttcaagaagaattttatttttattattattttttttgagatggggtcttgctctgtcgcccaggctggagtgcagtggtgcaatcttgactcactgcaacctccacctcctgggctcaagtgatcctcccacctcagcctcccaagtagctgggaccacaggcatgcgccaccacacctagctaatttttttgtatttttggtagagatggagttttgccatgttgcccaggctggtctcgaactcctaaactcaagcaatctgcccacctcagcctcccaaagtactgggattacaagcatgagccaccatgcccagcttcaagaggaatttttaaatgttatccttgacatcaataaatgtttatcttcactggagtccctttctaatagcatgagctttatttgtggtcatgagcttcagccttcaaggaaaaagagtcctgttagtgttccagataagccaagtgcagaccttgaaagttttttctcattgtgatctctcacccagctacttacctgaataacagatacagttttcacagatggaaccatgggtctgctgataatcactaaagttcctgaagagttttgattctctcattaacatgttactgggagattatttcatattgtagttggttggttggacaagacgttagaggttttgtttgaaaatcagcaaatatcttttttcccccttcttcttaggaggtatctttaaaatagcttcctgggcagatctagtaaatgctcacgtggtgccaggctcaggagttgtgaaaggcctgcaagaagtgggcctgcctttgcatcgggggtgcctccttattgcggaaatgagctccaccggctccctggccactggggactacactagagcagcggtaagtggtggggggactgggtgagagggggcaggggctgctatgctgcatgctgcaagaagatatctcctaatctggcgtttctggaacctctgccaaaaaaaaaatccagctcttgttagtgtgacagtatattaatactagttggatagaattccttgatagttaatagcattttatatcatgtagtggacacttcaggaatttgaattatactccaagagaaactttgagacccagatagttagtcaaacaaacacttactaaatctaccaggactttaagataatgtctttttcatcttaccatgaattgagagaagatgagaagagcttcccagacatgcagtttctcagaatctcccaagtcctacagagatgcacattcccatgacagcagcccacatgcagtggctttctcttattcttgtcagatattttagaatataatattactttaaaaaaattgccatagggggctgggcgcagttgctcacacctgtaatcctagcactttgggaggccaaggcgggaggattgcttgaggccaggagttggacgtcatagtgagatctcgtctctacaaaaaaatgaaaaagaaaataaccaggcatggtggtacgtgcctatagtcccagctgcttgggaggctgaggtgggaggatcgcttgagcttgaagttcaaggctgcagggagccatgatcatgccactttacctcagcctgggcaagagtaagagcctgtcaaaaaaaattaaaaataaaaagccccaagaaaatccccatgatttttttaaaaatgaaatccccaagacaatccccatgtgaagattctagaagtaaaggatttccattttttcatattatttcagactatttggagacttaactcatatggccctacagtcaggttttaaccctatccctgaattgactataactgtctgatttcccaagtctcaaaatcacaggggccatgagtcagttttaatatttggcattctgggagtctgggtctggctcaaggacaagacatgacttgtttgttggcagtagtacttggtggcaagaatgaatgtatcaatgtgtgtctcaggtctcgaagtaccgaggctggagtgcagtggtggtactgagtctggtctccgggaagtatcaaataagaagggaagtatgggagtcacgtctcggggaaagtacctaccgaatcagaaagccaggcagaccttctaaagagacttttatgaatgtgagataatagtatagaaattggggagaccagttgatgttacagaagagggaaagtggtagaggtgagatttctttagctcttgaaagcgtagctgttctttacatgacagctgcctttggatatggagtaccccgtctgtagatagtcagtaagccttgaatgtggtttcataccattataatatgttctagagtactcgcctcaaatcctttttggaagtaggtgggtcaccaagcattattagaaataagaaattatgcagcatcttgattttagatgcatatagtataggatttctgctttacgtatggtttattgcgggaagggaagggaaagggtcatctcagagtcttaatgaagcagatgtgttttattatggtttctatctaagatgacctgtttcagatatagtaactttatatatatggaatgagaaaaggcatctataatacagcaaagtttctaactagataatagagcataagccaggcatggtgacttacaactgtaaccccagcactttgggaggccaaggtaggaggatcccttgagcccaggggttcaagaccagccagggaacatagggagacctcatgtcttttttttttttttttaagttttgaaaaaatagagcatatttttacttttattctgtgtgattaactgttttcttataatatgtcctattacattccatttaggttagaatggctgaggagcactctgaatttgttgttggttttatttctggctcccgagtaagcatgaaaccagaatttcttcacttgactccaggagttcagttggaagcaggaggtaaatctggtcactggtcgtggctcttccaaaaatgcttctttacccatggcaggcaaaataaaactttgcatattattatacacttgcttaagaaaagccttcttagtctagaacaataatgaatgagccctttggtaactatgtatctttggacaagtcagtttacttcttttagtctaattgtctgtaaaatggggatgataacagtattgacctcataaggtaatcaagatgctttaatgagataacatgtagaatatttaacacaatgtcttggcacagagtaaacactctgtacttataagcccttattcgtaagccctaataattgtttgactagatattatagttagggtctaggcttttaagaatacttaaagtatcttggatttggaagataataagccatttaacagaatgcttctgaaacagcggaatttaataaaaaagcaaaatttaaggattcgggtttatggatagtctgtgtgaccacttgatggggttcttgtatatggtagtggtcaggttagacttgctcagcagtgccttgtggtgattctaagatgtgtgctaaaattttcttcaattgtgaggccaatctttattgtatttttttgatattgaacctttctttgcaacatatgagttttacttctttttttaatatattgttaagctacagatgatctaaaatttgacattgagggggtgaatatttagggcaacttgaatttatgcttctggaaaaaaattacatgaaaaaataatgataaaataaataaggctgggtgcgggggctcacgctcgtaatcccagcactttgtgaggccgaggtgggcagatcacctgaggtcaggagttcaagaccagcttggccgacatggtgaaaccctgtctctactcaaaatacaaaaattagccgggcgtggtggtgcacgcttttaatcccagctactcgggaggctgaggcaggagaatcgcttgaatccgggaggcgggggttgcagcgagctgagattgtgccattgcactccagcctgggtgacagagcaagactctgtctcaaaaaaataaataaataaatagggcggggcgcagtagctcatgcctgtaatcccagcactttgggaggctgaggcgggcggatcatgaggtcaggagatcgagaccatcctggctaacacggtgaaactccatctctactaaaaaatacaaaaaattagccaggcgtggtggcaggcgcctgtagtcccagctactcgggaggctgaggcaggagaatggcatgaacctgggaggcagagcttgcagtgagccgagatagcaccactgcactccagcctgggtgacagagcgagactccgtctcaaaaaaataaataaataaaaataaataaataaataaataaataaaataaactttaccattgaaaaggagttggtgatcatctttctccatttgacgtctctggcctacccagtgagtctcttcagctcctgtttttacgcagttgctgtacaaaaggggaacgaaagtaggggcatgtttttatttaaagctggttagatactttttcagagaagtcatgtgacaggttttctgatttttgtattatgtgaaacaacaatttttgtgtttcttgcaggagataatcttggccaacagtacaatagcccacaagaagttattggcaaacgaggttccgatatcatcattgtaggtcgtggcataatctcagcagctgatcgtctggaagcagcagagatgtacagaaaagctgcttgggaagcgtatttgagtagacttggtgtttgagtgcttcagatacatttttcagatacaatgtgaagacattgaagatatgtggtcctcctgaaagtcactggctggaaataatccaattattcctgcttggattcttccacagggcctgtgtaagaatgggttctggagttctcatggtctttaggaaatattgagtaatttgtaatcaccgcattgatactataataagttcattcttaagcttgctttttttgagactggtgtttgttagacagccacagtcctgtctgggttagggtcttccacatttgaggatccttcctatctctccatgggactagactgctttgttattctatttattttttaatttttttcgagacaggatctcactctgttgcccaggatggagtgcagtggtgagatcacggctcattgcagcctcgacctcccaggtgatcctcccacctcagcttccagattagctggtgctataggcatgcaccaccacgtccatctaaatttctttattatttgtagagatgaggtcttgccatgttacccaggctggtctcaactcctgggctcaagcgatcctcctgcctcagtctctcaaagtgctgggattacaggtgtgagccactgtgcccagcctaattgcagtaagacaaaaattctagggcaccaagaggctaaagtcagcacagcttttcttgtgtcctgtattctctgtctaatgtgttgcccaaataatacctaattgttagccattcccctccatctctggcctaaaagtgatagtccaggtatccacatgggctggttcccagaactgccattgctcactctccaaagaggggaaggtggggaaggggaaggtgactatagctcagctcctgagctagtatctggctgttatttcaacaaccggagttggggtttgggctcattttttcccctagccagcaattatggaccagtagtaacacaagtgacagcttcctgtgactgacttcacaattaggaggtctaagattccatttgggtatttgcttaaggatcccacataattgtcccaacggtcattagtagaggggaggtaagccttcattaataataaagagaaagcccacattcaaggtggtgtttgagcaggggcagggtgagggctgtcccggtgctcattgcaccagcacactcacattccttctcatttggggcccacctgcaggaagtggcacaggatcagccatttccccacccttgtcagctgatggcccactgttctttaatgactcagaggaatgcctaggatttttttttttttttgagacagaatctcactgtcgcccaggctggagttcagtggcacgatctcggctcactgcaacttctgcctctctggttcaagcagttctcctgcctcagcctcccgagtagctgggactacaagcctaggatttttaactcaggtttttattatattccctcctgaagtttttacttcaagagcttctgctctaaagtccaatttgggcttcatgtccccagtgctgcatctccagggaaatgctgtctgtgggagagaccaactctcaaggaagaagtggccacagaaggagcaggaagggagttggccctcagggctactctggggaagccaaaagtcatgaaggggagaagaattttctgacaaaaacttgcaggaatctcttaggtgtcttcagtgttggagtgatatgttgagaggcctttggagtgatgtgctgaggtctcaggcgcccacctccctggctgtcacttccatgtgtcagtggttctcccactttagcaggtatcagagtcacctggagtcttgtcaaaacaggtaccagccccacccgcagcgtttctgactctgggtagctctgggatggggcttgagaatttgcgtttccaaaaaggtcccaggtgatgctgcggttgcctgcgcagggactggactttgagaaccacttcactggttattcacatttctgcctctgcagtgagacagccttgaggtctgcctcctgctaagagtcacatgctcctgtcctttagaaatgtgggctcctgccatctccaggacgcaggcactgttcctgttgatgaaccctatttcacaggacccctgctaaggtgatttgaggggaaatgagaggaggctcaaataatcacccagcccctgccacttactgaaagtgtaggtccttgtgccccacaccatcagagtttctgcgttagcagatttgtggtttgcccagcagcctgggcgtgtgcatttctaatgggtgcctcaagtgatctgtttctgatttgtatttctattgtgaagagtcagcccagtactgcaggcctcttacctaagcagaatcccagtctggcatcaaagctttagaggacaagttgattcaggcagagaagaacttgggctatacaagcgctgttcttcagcattgaagtattttggaggcattagatagtttaaccctttctcagtcaaggaatatttacagaacatgatctctgggcattgtaactcctggtcttagtggggaatatagggaccccatgtctccatggggtgcacagaatgtctgtgagactgatggagtggagaacgccatcccccagcctctccagctactcgaggcattctgtagaacataagcccatagattgtgtgtgtgtgtgtgtgtgtgtgtgtgtgtgtgtgtgtgtgcatgcgcgcgcgtgcgcactggaggaacctaagaaactatttggtgcacttcctcttattttagagctcccaaagtgtagctccagaatcgtaaagggatatgctcagtctcacagccagcctgtggatctcagtcccaacactcacccttgtgctactgagtcagctctaagaaaatctgccaaaagtaggccgagggctggttttttgttttgttttgtttgtttgatacagggtcttcactctgttgcccaggctggagtatatcatggctcactgcaaccttgacttgggctcaagcgatccgctcaagtagctggaactactctcaagtagctctcaagagcctctcgagtggctggaactacaggcgtgcaccaccacagctggttaatttttaaaattttttgtagagacggtggaggaggttctcactgtgactcagtgtgtgcccgacagcagagcccacaccactccagttgcagtggttgccatctgggtcatcagacctggctgtcaggggtgcagccacaggagagccaacagcagagggtgctggccgctgagctagctgctaatgctggcctgggtgcagttctcatccaaagtacccggtgggtgggagtcactcagtaccagttccgagcctgaacccaaactctcgtgtttctgctcacccctctctggcttctgccaccacatgggaagaatatgccctggttagcccatggcttctgaagagcaagagaaagtagagcagagcctactccagcctcccccgtccaatgtatgaaagccccagctgatctgtaagcctgggagcgtgataaatgcttagtagtgcatgccatggagttccagggtggtttattacacggcaatatctagctaaatacatttaacttgctgcagctctctggatccagcctggttaccaggaagacaaaaactgggctccaccaggaaccagtcttctgccttcccaaccatcacctctggctgcatcagcgatctctcccagcgaaatagctgcttggtcttgtgtgaatcctgtactttaacacagtggaccaagtgtcagtcattgaaaatgaccatgagtaaccctgtggactctctgcagcttggttcctttgccccttaacaggtgggtatgaatcgtgtcttcagtgccagggctgaatgagaaagggcattcctttttgaaggaatctgatactaaacacaaagcatgagaaaaatcaggacttgttggagttatatttttaaaatatatattttaacagttatatatattagatataatatataatagtatatataaataatactatattgcccaggctggtctcgaactccttagctcaagtgatcctcctgccttggcttcccaaagtgctaggattacaggtgtgagccactgctcccggcctgttggagttctttacatttattttataatcaatgctgttttattaaatgcggattttattttggattacaggatgtagaatgccatatttttcttagatcatagggcctttcacatttgtaatttggccttgtatgagttaccctgcaatccctttgttttccccataacccttccaaaggaaggccgcaatagaaatacaaagagaaacaaaataattagaatattttttaacttctaaagttcaaggttttggcataagtctggtttagaagcacatttgcctagccctttccttcccaccaagggggaaagtcttcctctagacaagaggcagagggctcctcagagtcagatcctggtgtgggctctcacgtgctgctgctgaatcccagggaaggagggaggaagggcagttgacacccaaaataagggtggggaactgtcagcagaggaggtctgtgtcatgtttttcagcgctggggttggggggagcccaggagagcaggaagatccagagatccctcgccccagctcggccatgtgtgtctgggacagagcctgaggtggcctgagcttcctgtggctccagagtaacattatagagaagctgaattctcctgtttttctgaaaagggcatgggagttagctgagaagcagacctggtgggcctgagagtctcaatcgtcaggtaaggacagtcagtgggaagtggacgggccgcacaaccaaggttctcatgaggacaaccatgtcttcgggggtgcccttgtgcacagacagctccatagtcctgcctccaatgtcccaacactgcattgtctccctgcacttagcagccctgcagggtgagacttggggaggatcctgaaatgattgtatttaacaagacatgctgtccttgtttacctggaacctagcaatgttgttttctgccacaacttgaatagatacttgaagcagagatgatgttgagttaaaaaaaatatatacataaaaatatgggttcttttcaacctgaatagatggcctaaaaattcaaa

SEQ ID NO: 14782 - DNA, 6652 bp, Homo sapiens
caaacaggcagcgcgcgacaatggcggtcgctcgtgcagctttggggccattggtgacgggtctgtacgacgtgcaggctttcaagtttggggacttcgtgctgaagagcgggctttcctcccccatctacatcgatctgcggggcatcgtgtctcgaccgcgtcttctgagtcaggttgcagatattttattccaaactgcccaaaatgcaggcatcagttttgacaccgtgtgtggagtgccttatacagctttgccattggctacagttatctgttcaaccaatcaaattccaatgcttattagaaggaaagaaacaaaggattatggaactaagcgtcttgtagaaggaactattaatccaggagaaacctgtttaatcattgaagatgttgtcaccagtggatctagtgttttggaaactgttgaggttcttcagaaggagggcttgaaggtcactgatgccatagtgctgttggacagagagcagggaggcaaggacaagttgcaggcgcacgggatccgcctccactcagtgtgtacattgtccaaaatgctggagattctcgagcagcagaaaaaagttgatgctgagacagttgggagagtgaagaggtttattcaggagaatgtctttgtggcagcgaatcataatggttctcccctttctataaaggaagcacccaaagaactcagcttcggtgcacgtgcagagctgcccaggatccacccagttgcatcgaagcttctcaggcttatgcaaaagaaggagaccaatctgtgtctatctgctgatgtttcactggccagagagctgttgcagctagcagatgctttaggacctagtatctgcatgctgaagactcatgtagatattttgaatgattttactctggatgtgatgaaggagttgataactctggcaaaatgccatgagttcttgatatttgaagaccggaagtttgcagatataggaaacacagtgaaaaagcagtatgaaggaggtatctttaaaatagcttcctgggcagatctagtaaatgctcacgtggtgccaggctcaggagttgtgaaaggcctgcaagaagtgggcctgcctttgcatcgggggtgcctccttattgcggaaatgagctccaccggctccctggccactggggactacactagagcagcggttagaatggctgaggagcactctgaatttgttgttggttttatttctggctcccgagtaagcatgaaaccagaatttcttcacttgactccaggagttcagttggaagcaggaggagataatcttggccaacagtacaatagcccacaagaagttattggcaaacgaggttccgatatcatcattgtaggtcgtggcataatctcagcagctgatcgtctggaagcagcagagatgtacagaaaagctgcttgggaagcgtatttgagtagacttggtgtttgagtgcttcagatacatttttcagatacaatgtgaagacattgaagatatgtggtcctcctgaaagtcactggctggaaataatccaattattcctgcttggattcttccacagggcctgtgtaagaatgggttctggagttctcatggtctttaggaaatattgagtaatttgtaatcaccgcattgatactataataagttcattcttaagcttgctttttttgagactggtgtttgttagacagccacagtcctgtctgggttagggtcttccacatttgaggatccttcctatctctccatgggactagactgctttgttattctatttattttttaatttttttcgagacaggatctcactctgttgcccaggatggagtgcagtggtgagatcacggctcattgcagcctcgacctcccaggtgatcctcccacctcagcttccagattagctggtgctataggcatgcaccaccacgtccatctaaatttctttattatttgtagagatgaggtcttgccatgttacccaggctggtctcaactcctgggctcaagcgatcctcctgcctcagtctctcaaagtgctgggattacaggtgtgagccactgtgcccagcctaattgcagtaagacaaaaattctagggcaccaagaggctaaagtcagcacagcttttcttgtgtcctgtattctctgtctaatgtgttgcccaaataatacctaattgttagccattcccctccatctctggcctaaaagtgatagtccaggtatccacatgggctggttcccagaactgccattgctcactctccaaagaggggaaggtggggaaggggaaggtgactatagctcagctcctgagctagtatctggctgttatttcaacaaccggagttggggtttgggctcattttttcccctagccagcaattatggaccagtagtaacacaagtgacagcttcctgtgactgacttcacaattaggaggtctaagattccatttgggtatttgcttaaggatcccacataattgtcccaacggtcattagtagaggggaggtaagccttcattaataataaagagaaagcccacattcaaggtggtgtttgagcaggggcagggtgagggctgtcccggtgctcattgcaccagcacactcacattccttctcatttggggcccacctgcaggaagtggcacaggatcagccatttccccacccttgtcagctgatggcccactgttctttaatgactcagaggaatgcctaggatttttttttttttttgagacagaatctcactgtcgcccaggctggagttcagtggcacgatctcggctcactgcaacttctgcctctctggttcaagcagttctcctgcctcagcctcccgagtagctgggactacaagcctaggatttttaactcaggtttttattatattccctcctgaagtttttacttcaagagcttctgctctaaagtccaatttgggcttcatgtccccagtgctgcatctccagggaaatgctgtctgtgggagagaccaactctcaaggaagaagtggccacagaaggagcaggaagggagttggccctcagggctactctggggaagccaaaagtcatgaaggggagaagaattttctgacaaaaacttgcaggaatctcttaggtgtcttcagtgttggagtgatatgttgagaggcctttggagtgatgtgctgaggtctcaggcgcccacctccctggctgtcacttccatgtgtcagtggttctcccactttagcaggtatcagagtcacctggagtcttgtcaaaacaggtaccagccccacccgcagcgtttctgactctgggtagctctgggatggggcttgagaatttgcgtttccaaaaaggtcccaggtgatgctgcggttgcctgcgcagggactggactttgagaaccacttcactggttattcacatttctgcctctgcagtgagacagccttgaggtctgcctcctgctaagagtcacatgctcctgtcctttagaaatgtgggctcctgccatctccaggacgcaggcactgttcctgttgatgaaccctatttcacaggacccctgctaaggtgatttgaggggaaatgagaggaggctcaaataatcacccagcccctgccacttactgaaagtgtaggtccttgtgccccacaccatcagagtttctgcgttagcagatttgtggtttgcccagcagcctgggcgtgtgcatttctaatgggtgcctcaagtgatctgtttctgatttgtatttctattgtgaagagtcagcccagtactgcaggcctcttacctaagcagaatcccagtctggcatcaaagctttagaggacaagttgattcaggcagagaagaacttgggctatacaagcgctgttcttcagcattgaagtattttggaggcattagatagtttaaccctttctcagtcaaggaatatttacagaacatgatctctgggcattgtaactcctggtcttagtggggaatatagggaccccatgtctccatggggtgcacagaatgtctgtgagactgatggagtggagaacgccatcccccagcctctccagctactcgaggcattctgtagaacataagcccatagattgtgtgtgtgtgtgtgtgtgtgtgtgtgtgtgtgtgtgtgtgcatgcgcgcgcgtgcgcactggaggaacctaagaaactatttggtgcacttcctcttattttagagctcccaaagtgtagctccagaatcgtaaagggatatgctcagtctcacagccagcctgtggatctcagtcccaacactcacccttgtgctactgagtcagctctaagaaaatctgccaaaagtaggccgagggctggttttttgttttgttttgtttgtttgatacagggtcttcactctgttgcccaggctggagtatatcatggctcactgcaaccttgacttgggctcaagcgatccgctcaagtagctggaactactctcaagtagctctcaagagcctctcgagtggctggaactacaggcgtgcaccaccacagctggttaatttttaaaattttttgtagagacggtggaggaggttctcactgtgactcagtgtgtgcccgacagcagagcccacaccactccagttgcagtggttgccatctgggtcatcagacctggctgtcaggggtgcagccacaggagagccaacagcagagggtgctggccgctgagctagctgctaatgctggcctgggtgcagttctcatccaaagtacccggtgggtgggagtcactcagtaccagttccgagcctgaacccaaactctcgtgtttctgctcacccctctctggcttctgccaccacatgggaagaatatgccctggttagcccatggcttctgaagagcaagagaaagtagagcagagcctactccagcctcccccgtccaatgtatgaaagccccagctgatctgtaagcctgggagcgtgataaatgcttagtagtgcatgccatggagttccagggtggtttattacacggcaatatctagctaaatacatttaacttgctgcagctctctggatccagcctggttaccaggaagacaaaaactgggctccaccaggaaccagtcttctgccttcccaaccatcacctctggctgcatcagcgatctctcccagcgaaatagctgcttggtcttgtgtgaatcctgtactttaacacagtggaccaagtgtcagtcattgaaaatgaccatgagtaaccctgtggactctctgcagcttggttcctttgccccttaacaggtgggtatgaatcgtgtcttcagtgccagggctgaatgagaaagggcattcctttttgaaggaatctgatactaaacacaaagcatgagaaaaatcaggacttgttggagttatatttttaaaatatatattttaacagttatatatattagatataatatataatagtatatataaataatactatattgcccaggctggtctcgaactccttagctcaagtgatcctcctgccttggcttcccaaagtgctaggattacaggtgtgagccactgctcccggcctgttggagttctttacatttattttataatcaatgctgttttattaaatgcggattttattttggattacaggatgtagaatgccatatttttcttagatcatagggcctttcacatttgtaatttggccttgtatgagttaccctgcaatccctttgttttccccataacccttccaaaggaaggccgcaatagaaatacaaagagaaacaaaataattagaatattttttaacttctaaagttcaaggttttggcataagtctggtttagaagcacatttgcctagccctttccttcccaccaagggggaaagtcttcctctagacaagaggcagagggctcctcagagtcagatcctggtgtgggctctcacgtgctgctgctgaatcccagggaaggagggaggaagggcagttgacacccaaaataagggtggggaactgtcagcagaggaggtctgtgtcatgtttttcagcgctggggttggggggagcccaggagagcaggaagatccagagatccctcgccccagctcggccatgtgtgtctgggacagagcctgaggtggcctgagcttcctgtggctccagagtaacattatagagaagctgaattctcctgtttttctgaaaagggcatgggagttagctgagaagcagacctggtgggcctgagagtctcaatcgtcaggtaaggacagtcagtgggaagtggacgggccgcacaaccaaggttctcatgaggacaaccatgtcttcgggggtgcccttgtgcacagacagctccatagtcctgcctccaatgtcccaacactgcattgtctccctgcacttagcagccctgcagggtgagacttggggaggatcctgaaatgattgtatttaacaagacatgctgtccttgtttacctggaacctagcaatgttgttttctgccacaacttgaatagatacttgaagcagagatgatgttgagttaaaaaaaatatatacataaaaatatgggttcttttcaacctgaatagatggcctaaaaattcaaa

SEQ ID NO: 14783 - DNA, 14306 bp, Homo sapiens
caaacaggcagcgcgcgacaatggcggtcgctcgtgcagctttggggccattggtgacgggtctgtacgacgtgcaggctttcaagtttggggacttcgtgctgaagagcgggctttcctcccccatctacatcgatctgcggggcatcgtgtctcgaccgcgtcttctgagtcaggtgctggcctaggaagggaaaggacagggcttggtggcgggaaggaggacaaggaaatggaagagggtgacaggagttgggccgtgagtgagagcaaaagagccaagcaggcagaccgaccctactcttggtttggggagtaagcatgagaagcacagaggccaggggttgggctcctcgagagtcgtctgttctttcacccacacgcttagacacgtgttttgcaaaagtcgggaaacccagtttggaacgctttctggcactgaagcacacttgaatgaattctgtatatttaactctttaagaaaattagacttgcggccgggcgtggtgcctcatgagagtaataccagcactttgggatgcctaagtgggcagatcacctgagccccaggagttcgagaccagcctgggcaacatgacgagaccccgtctctacaaaaaattagctgggtgtggtggcgcacgcctgggacgctgaggtgggaggatcacctgagcctgggaggtcaaggctgcaatgagctgtcattgcgccactgcactccagcctgggcgacaagtgagaccctgccctcaaaaaacaaacaaatagaccgggaaaacgtgggtaggcagagaattcagtagctgggaaattactggtgagaaaaggaaaatagaacaaccagaactctgtgatgtatacaaaatttatcagagcccagagagacttcaaccatactcccctatgcagccccgggacaattatttaaaggaattttgtccctgactagctgcctctcccattatcttaatgtacctggaatgtgtgatacaaagaacaatgtatagctaatcaatcgcttgtgttattattttatttatttattttttagatgggatctctcttacgtcacccaggctggagtgcagctctgtgatcatagctcactgcagcctggaactcctgggcttaagagatcttcttgcctcgggtgagcacaggggctcatgcctgtagtcccaactttgggaggctttctttgggaggctgaggcgggtggatcacttaaggtctggagttcgagaccagcctggccaacatggtgaaaccctgtctctactgaaaatgcaaaaattagctgggcatggtggtgcacacctgtaatcccagctactcaggaggctgaggcagaagaatcaggaggttgcagttagccgaaattgagccactgcactccagcctgggcaacagagggagactgtctcagaaaaaaaaaaaaaaaagagatcctcttacctcaacctctgagtagctggaactacaggcatgtgccatcatgcccaccaaattaaaaattttttttttttgtagagaggaggtctcaccatactgcccaggctcgtctcaaactcctggcctcaaaagatcctcttgccttggcggcttcccaagtagctgggactacaaatgcctggtgccacccccgggctacctcctgttatttcaatgcaaattcttggtgaatataggaactgccccttcttttgctttaaaaatccacttgtaactactgtaatcgaagcctatagtcagggcaactactcatattaattttgcctcagcctcttcctgttaggtccacacttggaagggctgtttggaaaggggagttgaattttgcactgtgcggccagaagcaataattaagactagaaggtggacatattgggaaagcaggtttttagtcaatataaggaaaatttttgtacaaattagaggtttctaatacagtgcttctcaactttgagtatatatgaattacctgggaattttgttaaaatgcagaatccatttctgtagctctgagactagacctgaggttgtgcatttctaacaaagtgccagctgaaactgcagaccacactgagtagagggccgtaaatatgctttccaatacagtttgctactagccacgtgttactattgagcattatgaatttttaagtttaaatagtcatatatggccagtggctatcatattggactgcaaagatagagaacatttccatcattgcagaaagttctatcaagaagacatataagtttcctcagcccacttaagggtttatgttcactagggaccactttgtgtggttattgtaaaaagtattgaagataggttggactattaaggttgcggtactttggaccattaacttctcaccatccagaatcttgctatggtgtatcttagcaatgtggagaattactaaggattttctagggaaaaattgatttattttaataagccagctgataaatgacagaaaaagttttttgataactagatcatggtgtgtgtgtgtgtgtgtgtgtgtgtgtgtattttggtgattaactggggaggagttcaaaacatggagagacttgggtataacaaaacttcttttcacatcttatgcgaatagaatttctcagtatttacaccccaaaaagcaatataatttatgctaaactctaacttcccttaataagtgataataagtgatatttgactatagtactatatacacattagtgtacataaagtaattggagaggaaaggtagcattaactcactaaaaatgcattttccaaatctgtttttatctctctgtcaaaatttgcaaatcatgtttgaattaatcatatgcttgttataatttaatgatatacagaagaattctcttctttaaaaagtacaatttccattttcttttcctcaagagaatagtttctcttcagtccttaaggattcagctccttacatgggctttggtgagggtcatgaggcagcacccacaggtttaaatcagattggggtatttggtccttgtgggattcacaagatggattactgactgccttgctgtgaatggcacaactcacaccttaatgtagcttcgcatacagcttgggaagaacataggaggcaaagttgctcactgcagtaatgtccctgactgctgcggcctctactatgttttgcacgacgagcttcttaatggtcttttccttgggcatgcatcggacatagtatgtgccactactggccacagccctttttggcacgatcattgttcctttcttttctttgtcatcttggaagtaaggacctgagagagctacagaagaattcttgacatctagagacttatggtcatgggaaatttttttttaattaccattttaaatttcagtttacatacatatagacaagtatgacagagggatcagtaaaagcttttcaagtataatcatatattactttagaataaaattctgtggacacagtggagtgaaaatatgagttggaaaaagatgtaaaaaattttaaacttttcatagtccagcaatttcacgttttgtttttttaaatggagatggtggatatccagtcactagcatttgtattccaagtttattccttaaaaagagtgataaaacagttctaagataatatgttaatatttttagtactagaaattacattctctgcaacttaaaatagtcatagtttttttttgtttgtttttttactctttagaagtactggtgtaaacctatgatctagttcacaaagcaactcagtgactgtttgcttttttaaaaaaaaaatgaggtggtcttgggtgggaatatgtatcctaacattaaaatatgatgatttatgtggaaaaggagattataaaatagcaattcacacaatagtctgtatttatgaaacttcctaattgaaggcttctttcaggatatataactaaaagatgataggtttagatactcagcctaatgggttactgaggaaaccaggaagtcgggatcgtccttagtctttggggtcaacatcatgagcttccccagcacatctcaggttgccttcagaacagattctgagtctggttgaatagattcattcttgtgtttttagatttatatttgtgtactgggtttatggagagggtaataaaaaggcatttgtttttttttctccaatcaagtttgagacttacccccactagtttattactgtcttttctgttacgttgttacatgtttatacactatttaaaatagttacaataggctgggcgcagtggctcacgcctgtaatcccagcactttgggaggccgaggcaggtggatcacaaggccaagagtttgaggccagcctgaccaacatagtgaaaccccatctctactaaaaatacaaaaaaattagctgggtgtagtggtgcgcgcctgtaatctcagctccttgggaggctggggcaggagaatcacttgaacctgggaggcagaggttgcagtgagccgagatcgcaccactgcattccagcctgggcaacagggcgagactccatctcaaaaaataaaaaatataaaataaaataaaatagttacaataaaacattgtttatgtgttcattttcttacaggttgcagatattttattccaaactgcccaaaatgcaggcatcagttttgacaccgtgtgtggagtgccttatacagctttgccattggctacagttatctgttcaaccaatcaaattccaatgcttattagaaggaaagaaacaaaggattatggtaaaataaaagtaacataaagcatgaagttaattaatctgtaacatcatactcttagaatttttccgcttctgtgcactaatgttttaccagtcatcttgagttctttaagttgttactgcttgtagaatttataattgttactataagtcaccttcctttttttagacttggggtgaaatgctttgtattgattaggaaatgaaaagtgctttttttggtactgtatctatgaaactccaacattttttttttttaccagcccttccctcatcagcaaaatgttgtaacagcacatactttcccagtatgtttgtatttaaacttcatgaaaagtaatccatggataaaattactctcataaagcagtgtaaacacctcagagagatatttttgtgggttcatggcaatagattatcaggtgacttgctttaaaacccgaaaatttgtccaggcaccatggctcacgcctgtaatcccagcacttttggaggccgaggtaggcggatcacttgaggtcaggagttcaagaccagcctgaccaacgtggtaaaactccgtctctactaaaaatacaaaaattagctgggcgtggtggtatgcacctgtagtcccagctactggagaggctgaggcaggagatgcgcttgaacccaggaggtggaggttgcaatgagctgagattgcgccactgcactccagcctgggcgacaaagtgagaccctatttcaaacaaaaaaaaccctgaaaattggccaggcacagtggctcacacttgtaatcccagcactttgggagggcaaggtgggaggatagcttgagcccaggagtttgagaccagctttggcaacgtttgtctctacaaaaataaaaaaagaatacaaaattagctgagtgtcacagttacatgggaggctgaggcaggaggatgccttgagcccaggagctgaaggttgcagtgagctatgattatgccactgcactgcaccctgggtgacagagcaagactgtcaaaaaataaataaataaaacctgaaaagcaatcttaatgatagtaaggaattaatgggcttttttgtttatgttggtttattagtgttttgttactttttttaaaacaaatccttcttctacagatgcattctgaaaatttttatgattaaaaaaaagaaacatattagttgagtttttgtggcgtaagggcagtgttagtttttctgtttttgttttttgtttttttgagacaaggtctcactctgttgcccaggctggtcttgaactcctggtctcaagccatcctcctgcctcatcctcccaaagtgctgggattacaggtgtgagccactgcacccagctgagactttctgagctaaaaaaaaactgtatgaatccctacccataagaaaactcttatttctattattttatgttttaaaaactgtttctatgaaattatgcatttttaaatatactataaatacttgcagtcttgtgttctagcttaagctgattcagttaaacttaccagttgttcaagaagcggaaaggatttgatgagtctaaagtctacagcccaagttatttacgttttgtagattatctgaaaatagtctagtgggatttgggtagagaagtatatatttaatcacattgcattatataattctttagattgtagtaatgggtctaaatgattgctgaatatttttccttctgaatttgtgtcttcaaaaagtcaattatttggctgatcttgaatagtgaacttaaaatactttgatggaaaaaggaattatttcattcatgatactggattattctgtttcataactttccttgatctaggtgatcttgctgtaagaaactctgtatttaggctggacgtggtggctcacacctataatcctagcattttgggaggctgaggcgggaggatcacttgagctcaggagttcaagaccagcctagacaacatagtgagacctcatctctatgataaaacagatttttttaaagtaaaaaaaaaacctctctatttgaaaatttgatcataaaacacattaagcagtgtttataatgtgaaataatttacttgatttactataaatatactgtatgtgtaactggcaagtttggtatacagagttggctttatacataaatatactgtatgtgcaactagcaagtttggtatacagaattggtatacacatatactgtatgtgtaactggcaagttttgtatacagagtgtgtgtacgtatatacgcacatatacatacatatttaaatttggaatcagcaaaattttttcttttctaggaactaagcgtcttgtagaaggaactattaatccaggagaaacctgtttaatcattgaagatgttgtcaccagtggatctagtgttttggaaactgttgaggttcttcagaaggagggcttgaaggtcactgatgccatagtgctgttggacagagagcagggaggcaaggacaagttgcaggcgcacgggatccgcctccactcagtgtgtacattgtccaaaatgctggagattctcgagcagcagaaaaaagttgatgctgagacagttgggagagtgaagaggtttattcaggagaatgtctttgtggcagcgaatcataatggttctcccctttctataaaggaagcacccaaagaactcagcttcggtgcacgtgcagagctgcccaggatccacccagttgcatcgaagcttctcaggcttatgcaaaagaaggagaccaatctgtgtctatctgctgatgtttcactggccagagagctgttgcagctagcagatgctttaggacctagtatctgcatgctgaagactcatgtagatattttgaatgattttactctggatgtgatgaaggagttgataactctggcaaaatgccatgagttcttgatatttgaagaccggaagtttgcagatataggaaacacagtgaaaaagcagtatgaaggtaagtgtattattcaggaatctgcaagaatcagaaatccagcttaaactgaagaagaaaaaggaaatgctcatgtcattgaaagtccattcatagagcaggctgtcaagcgtggttggatccaggagctcaagtgatatcttcatgacttgctttctctccatctctcagctctgctttcttctctgttgacttctttctcaggtaggcatactctgcatgctcaccccaaaccaatcactctagcttgggatgtagaataccttcattaactagcctgggcaatttgctctgcaactgtgaggttgttaactctgtatgaccttcttgaaataagaaccagtcagggataatttccttaaagaaaatggatgtgctagtaccagaagaagggtatgtgcctgggcaagcaaatttgacagatgtccttggcagaatatgatgttttgaatgaaaattccacataaaggaaacaatgaaaaagaaatataaaatggtaagatttatttgtagcagaaaaagttctattgataaacattatttaaagatttttcttttatcaaatagggactcaaagtagtgcatgtgttggttgagaaaaatgcttagttctactgcctattctatgcaaatttctgtctatgtttttacaactgtgtgatcagactatatttaatgcatttttcacttaacctggtaacagatatttggttgtgtcatataacattttttgtaggcatctttgaggtaacttttctttaatgtatgcatgttcataagctatttctttaaaatagatttgtctttaagtgacttcttcatgtgcttaagatgtcctgccctcatcacattgcctagcttactttagctgattgactgacataagagttttatacaaactttcttcagctctgcatagagttttttcgaaaatcaggcttgttactgtccgcttttaaaaggaatatagttgcctattgaaattagatagctaaggagatctaaggaacacgtagaaatattgagcgatagtaaagctgctgagagacccctgcagagtgaaaacttgtcatcttcaagaagaattttatttttattattattttttttgagatggggtcttgctctgtcgcccaggctggagtgcagtggtgcaatcttgactcactgcaacctccacctcctgggctcaagtgatcctcccacctcagcctcccaagtagctgggaccacaggcatgcgccaccacacctagctaatttttttgtatttttggtagagatggagttttgccatgttgcccaggctggtctcgaactcctaaactcaagcaatctgcccacctcagcctcccaaagtactgggattacaagcatgagccaccatgcccagcttcaagaggaatttttaaatgttatccttgacatcaataaatgtttatcttcactggagtccctttctaatagcatgagctttatttgtggtcatgagcttcagccttcaaggaaaaagagtcctgttagtgttccagataagccaagtgcagaccttgaaagttttttctcattgtgatctctcacccagctacttacctgaataacagatacagttttcacagatggaaccatgggtctgctgataatcactaaagttcctgaagagttttgattctctcattaacatgttactgggagattatttcatattgtagttggttggttggacaagacgttagaggttttgtttgaaaatcagcaaatatcttttttcccccttcttcttaggaggtatctttaaaatagcttcctgggcagatctagtaaatgctcacgtggtgccaggctcaggagttgtgaaaggcctgcaagaagtgggcctgcctttgcatcgggggtgcctccttattgcggaaatgagctccaccggctccctggccactggggactacactagagcagcggtaagtggtggggggactgggtgagagggggcaggggctgctatgctgcatgctgcaagaagatatctcctaatctggcgtttctggaacctctgccaaaaaaaaaatccagctcttgttagtgtgacagtatattaatactagttggatagaattccttgatagttaatagcattttatatcatgtagtggacacttcaggaatttgaattatactccaagagaaactttgagacccagatagttagtcaaacaaacacttactaaatctaccaggactttaagataatgtctttttcatcttaccatgaattgagagaagatgagaagagcttcccagacatgcagtttctcagaatctcccaagtcctacagagatgcacattcccatgacagcagcccacatgcagtggctttctcttattcttgtcagatattttagaatataatattactttaaaaaaattgccatagggggctgggcgcagttgctcacacctgtaatcctagcactttgggaggccaaggcgggaggattgcttgaggccaggagttggacgtcatagtgagatctcgtctctacaaaaaaatgaaaaagaaaataaccaggcatggtggtacgtgcctatagtcccagctgcttgggaggctgaggtgggaggatcgcttgagcttgaagttcaaggctgcagggagccatgatcatgccactttacctcagcctgggcaagagtaagagcctgtcaaaaaaaattaaaaataaaaagccccaagaaaatccccatgatttttttaaaaatgaaatccccaagacaatccccatgtgaagattctagaagtaaaggatttccattttttcatattatttcagactatttggagacttaactcatatggccctacagtcaggttttaaccctatccctgaattgactataactgtctgatttcccaagtctcaaaatcacaggggccatgagtcagttttaatatttggcattctgggagtctgggtctggctcaaggacaagacatgacttgtttgttggcagtagtacttggtggcaagaatgaatgtatcaatgtgtgtctcaggtctcgaagtaccgaggctggagtgcagtggtggtactgagtctggtctccgggaagtatcaaataagaagggaagtatgggagtcacgtctcggggaaagtacctaccgaatcagaaagccaggcagaccttctaaagagacttttatgaatgtgagataatagtatagaaattggggagaccagttgatgttacagaagagggaaagtggtagaggtgagatttctttagctcttgaaagcgtagctgttctttacatgacagctgcctttggatatggagtaccccgtctgtagatagtcagtaagccttgaatgtggtttcataccattataatatgttctagagtactcgcctcaaatcctttttggaagtaggtgggtcaccaagcattattagaaataagaaattatgcagcatcttgattttagatgcatatagtataggatttctgctttacgtatggtttattgcgggaagggaagggaaagggtcatctcagagtcttaatgaagcagatgtgttttattatggtttctatctaagatgacctgtttcagatatagtaactttatatatatggaatgagaaaaggcatctataatacagcaaagtttctaactagataatagagcataagccaggcatggtgacttacaactgtaaccccagcactttgggaggccaaggtaggaggatcccttgagcccaggggttcaagaccagccagggaacatagggagacctcatgtcttttttttttttttttaagttttgaaaaaatagagcatatttttacttttattctgtgtgattaactgttttcttataatatgtcctattacattccatttaggttagaatggctgaggagcactctgaatttgttgttggttttatttctggctcccgagtaagcatgaaaccagaatttcttcacttgactccaggagttcagttggaagcaggaggtaaatctggtcactggtcgtggctcttccaaaaatgcttctttacccatggcaggcaaaataaaactttgcatattattatacacttgcttaagaaaagccttcttagtctagaacaataatgaatgagccctttggtaactatgtatctttggacaagtcagtttacttcttttagtctaattgtctgtaaaatggggatgataacagtattgacctcataaggtaatcaagatgctttaatgagataacatgtagaatatttaacacaatgtcttggcacagagtaaacactctgtacttataagcccttattcgtaagccctaataattgtttgactagatattatagttagggtctaggcttttaagaatacttaaagtatcttggatttggaagataataagccatttaacagaatgcttctgaaacagcggaatttaataaaaaagcaaaatttaaggattcgggtttatggatagtctgtgtgaccacttgatggggttcttgtatatggtagtggtcaggttagacttgctcagcagtgccttgtggtgattctaagatgtgtgctaaaattttcttcaattgtgaggccaatctttattgtatttttttgatattgaacctttctttgcaacatatgagttttacttctttttttaatatattgttaagctacagatgatctaaaatttgacattgagggggtgaatatttagggcaacttgaatttatgcttctggaaaaaaattacatgaaaaaataatgataaaataaataaggctgggtgcgggggctcacgctcgtaatcccagcactttgtgaggccgaggtgggcagatcacctgaggtcaggagttcaagaccagcttggccgacatggtgaaaccctgtctctactcaaaatacaaaaattagccgggcgtggtggtgcacgcttttaatcccagctactcgggaggctgaggcaggagaatcgcttgaatccgggaggcgggggttgcagcgagctgagattgtgccattgcactccagcctgggtgacagagcaagactctgtctcaaaaaaataaataaataaatagggcggggcgcagtagctcatgcctgtaatcccagcactttgggaggctgaggcgggcggatcatgaggtcaggagatcgagaccatcctggctaacacggtgaaactccatctctactaaaaaatacaaaaaattagccaggcgtggtggcaggcgcctgtagtcccagctactcgggaggctgaggcaggagaatggcatgaacctgggaggcagagcttgcagtgagccgagatagcaccactgcactccagcctgggtgacagagcgagactccgtctcaaaaaaataaataaataaaaataaataaataaataaataaataaaataaactttaccattgaaaaggagttggtgatcatctttctccatttgacgtctctggcctacccagtgagtctcttcagctcctgtttttacgcagttgctgtacaaaaggggaacgaaagtaggggcatgtttttatttaaagctggttagatactttttcagagaagtcatgtgacaggttttctgatttttgtattatgtgaaacaacaatttttgtgtttcttgcaggagataatcttggccaacagtacaatagcccacaagaagttattggcaaacgaggttccgatatcatcattgtaggtcgtggcataatctcagcagctgatcgtctggaagcagcagagatgtacagaaaagctgcttgggaagcgtatttgagtagacttggtgtttgagtgcttcagatacatttttcagatacaatgtgaagacattgaagatatgtggtcctcctgaaagtcactggctggaaataatccaattattcctgcttggattcttccacagggcctgtgtaagaatgggttctggagttctcatggtctttaggaaatattgagtaatttgtaatcaccgcattgatactataataagttcattcttaagcttgctttttttgagactggtgtttgttagacagccacagtcctgtctgggttagggtcttccacatttgaggatccttcctatctctccatgggactagactgctttgttattctatttattttttaatttttttcgagacaggatctcactctgttgcccaggatggagtgcagtggtgagatcacggctcattgcagcctcgacctcccaggtgatcctcccacctcagcttccagattagctggtgctataggcatgcaccaccacgtccatctaaatttctttattatttgtagagatgaggtcttgccatgttacccaggctggtctcaactcctgggctcaagcgatcctcctgcctcagtctctcaaagtgctgggattacaggtgtgagccactgtgcccagcctaattgcagtaagacaaaaattctagggcaccaagaggctaaagtcagc

SEQ ID NO: 14784 - DNA, 2081 bp, Homo sapiens
caaacaggcagcgcgcgacaatggcggtcgctcgtgcagctttggggccattggtgacgggtctgtacgacgtgcaggctttcaagtttggggacttcgtgctgaagagcgggctttcctcccccatctacatcgatctgcggggcatcgtgtctcgaccgcgtcttctgagtcagatgggatctctcttacgtcacccaggctggagtgcagctctgtgatcatagctcactgcagcctggaactcctgggcttaagagatcttcttgcctcgggaactaagcgtcttgtagaaggaactattaatccaggagaaacctgtttaatcattgaagatgttgtcaccagtggatctagtgttttggaaactgttgaggttcttcagaaggagggcttgaaggtcactgatgccatagtgctgttggacagagagcagggaggcaaggacaagttgcaggcgcacgggatccgcctccactcagtgtgtacattgtccaaaatgctggagattctcgagcagcagaaaaaagttgatgctgagacagttgggagagtgaagaggtttattcaggagaatgtctttgtggcagcgaatcataatggttctcccctttctataaaggaagcacccaaagaactcagcttcggtgcacgtgcagagctgcccaggatccacccagttgcatcgaagcttctcaggcttatgcaaaagaaggagaccaatctgtgtctatctgctgatgtttcactggccagagagctgttgcagctagcagatgctttaggacctagtatctgcatgctgaagactcatgtagatattttgaatgattttactctggatgtgatgaaggagttgataactctggcaaaatgccatgagttcttgatatttgaagaccggaagtttgcagatataggaaacacagtgaaaaagcagtatgaaggaggtatctttaaaatagcttcctgggcagatctagtaaatgctcacgtggtgccaggctcaggagttgtgaaaggcctgcaagaagtgggcctgcctttgcatcgggggtgcctccttattgcggaaatgagctccaccggctccctggccactggggactacactagagcagcggttagaatggctgaggagcactctgaatttgttgttggttttatttctggctcccgagtaagcatgaaaccagaatttcttcacttgactccaggagttcagttggaagcaggaggagataatcttggccaacagtacaatagcccacaagaagttattggcaaacgaggttccgatatcatcattgtaggtcgtggcataatctcagcagctgatcgtctggaagcagcagagatgtacagaaaagctgcttgggaagcgtatttgagtagacttggtgtttgagtgcttcagatacatttttcagatacaatgtgaagacattgaagatatgtggtcctcctgaaagtcactggctggaaataatccaattattcctgcttggattcttccacagggcctgtgtaagaatgggttctggagttctcatggtctttaggaaatattgagtaatttgtaatcaccgcattgatactataataagttcattcttaagcttgctttttttgagactggtgtttgttagacagccacagtcctgtctgggttagggtcttccacatttgaggatccttcctatctctccatgggactagactgctttgttattctatttattttttaatttttttcgagacaggatctcactctgttgcccaggatggagtgcagtggtgagatcacggctcattgcagcctcgacctcccaggtgatcctcccacctcagcttccagattagctggtgctataggcatgcaccaccacgtccatctaaatttctttattatttgtagagatgaggtcttgccatgttacccaggctggtctcaactcctgggctcaagcgatcctcctgcctcagtctctcaaagtgctgggattacaggtgtgagccactgtgcccagcctaattgcagtaagacaaaaattctagggcaccaagaggctaaagtcagc

SEQ ID NO: 14785 - DNA, 14325 bp, Homo sapiens
ggcgcctgggaatttgaagcaaacaggcagcgcgcgacaatggcggtcgctcgtgcagctttggggccattggtgacgggtctgtacgacgtgcaggctttcaagtttggggacttcgtgctgaagagcgggctttcctcccccatctacatcgatctgcggggcatcgtgtctcgaccgcgtcttctgagtcaggtgctggcctaggaagggaaaggacagggcttggtggcgggaaggaggacaaggaaatggaagagggtgacaggagttgggccgtgagtgagagcaaaagagccaagcaggcagaccgaccctactcttggtttggggagtaagcatgagaagcacagaggccaggggttgggctcctcgagagtcgtctgttctttcacccacacgcttagacacgtgttttgcaaaagtcgggaaacccagtttggaacgctttctggcactgaagcacacttgaatgaattctgtatatttaactctttaagaaaattagacttgcggccgggcgtggtgcctcatgagagtaataccagcactttgggatgcctaagtgggcagatcacctgagccccaggagttcgagaccagcctgggcaacatgacgagaccccgtctctacaaaaaattagctgggtgtggtggcgcacgcctgggacgctgaggtgggaggatcacctgagcctgggaggtcaaggctgcaatgagctgtcattgcgccactgcactccagcctgggcgacaagtgagaccctgccctcaaaaaacaaacaaatagaccgggaaaacgtgggtaggcagagaattcagtagctgggaaattactggtgagaaaaggaaaatagaacaaccagaactctgtgatgtatacaaaatttatcagagcccagagagacttcaaccatactcccctatgcagccccgggacaattatttaaaggaattttgtccctgactagctgcctctcccattatcttaatgtacctggaatgtgtgatacaaagaacaatgtatagctaatcaatcgcttgtgttattattttatttatttattttttagatgggatctctcttacgtcacccaggctggagtgcagctctgtgatcatagctcactgcagcctggaactcctgggcttaagagatcttcttgcctcgggtgagcacaggggctcatgcctgtagtcccaactttgggaggctttctttgggaggctgaggcgggtggatcacttaaggtctggagttcgagaccagcctggccaacatggtgaaaccctgtctctactgaaaatgcaaaaattagctgggcatggtggtgcacacctgtaatcccagctactcaggaggctgaggcagaagaatcaggaggttgcagttagccgaaattgagccactgcactccagcctgggcaacagagggagactgtctcagaaaaaaaaaaaaaaaagagatcctcttacctcaacctctgagtagctggaactacaggcatgtgccatcatgcccaccaaattaaaaattttttttttttgtagagaggaggtctcaccatactgcccaggctcgtctcaaactcctggcctcaaaagatcctcttgccttggcggcttcccaagtagctgggactacaaatgcctggtgccacccccgggctacctcctgttatttcaatgcaaattcttggtgaatataggaactgccccttcttttgctttaaaaatccacttgtaactactgtaatcgaagcctatagtcagggcaactactcatattaattttgcctcagcctcttcctgttaggtccacacttggaagggctgtttggaaaggggagttgaattttgcactgtgcggccagaagcaataattaagactagaaggtggacatattgggaaagcaggtttttagtcaatataaggaaaatttttgtacaaattagaggtttctaatacagtgcttctcaactttgagtatatatgaattacctgggaattttgttaaaatgcagaatccatttctgtagctctgagactagacctgaggttgtgcatttctaacaaagtgccagctgaaactgcagaccacactgagtagagggccgtaaatatgctttccaatacagtttgctactagccacgtgttactattgagcattatgaatttttaagtttaaatagtcatatatggccagtggctatcatattggactgcaaagatagagaacatttccatcattgcagaaagttctatcaagaagacatataagtttcctcagcccacttaagggtttatgttcactagggaccactttgtgtggttattgtaaaaagtattgaagataggttggactattaaggttgcggtactttggaccattaacttctcaccatccagaatcttgctatggtgtatcttagcaatgtggagaattactaaggattttctagggaaaaattgatttattttaataagccagctgataaatgacagaaaaagttttttgataactagatcatggtgtgtgtgtgtgtgtgtgtgtgtgtgtgtattttggtgattaactggggaggagttcaaaacatggagagacttgggtataacaaaacttcttttcacatcttatgcgaatagaatttctcagtatttacaccccaaaaagcaatataatttatgctaaactctaacttcccttaataagtgataataagtgatatttgactatagtactatatacacattagtgtacataaagtaattggagaggaaaggtagcattaactcactaaaaatgcattttccaaatctgtttttatctctctgtcaaaatttgcaaatcatgtttgaattaatcatatgcttgttataatttaatgatatacagaagaattctcttctttaaaaagtacaatttccattttcttttcctcaagagaatagtttctcttcagtccttaaggattcagctccttacatgggctttggtgagggtcatgaggcagcacccacaggtttaaatcagattggggtatttggtccttgtgggattcacaagatggattactgactgccttgctgtgaatggcacaactcacaccttaatgtagcttcgcatacagcttgggaagaacataggaggcaaagttgctcactgcagtaatgtccctgactgctgcggcctctactatgttttgcacgacgagcttcttaatggtcttttccttgggcatgcatcggacatagtatgtgccactactggccacagccctttttggcacgatcattgttcctttcttttctttgtcatcttggaagtaaggacctgagagagctacagaagaattcttgacatctagagacttatggtcatgggaaatttttttttaattaccattttaaatttcagtttacatacatatagacaagtatgacagagggatcagtaaaagcttttcaagtataatcatatattactttagaataaaattctgtggacacagtggagtgaaaatatgagttggaaaaagatgtaaaaaattttaaacttttcatagtccagcaatttcacgttttgtttttttaaatggagatggtggatatccagtcactagcatttgtattccaagtttattccttaaaaagagtgataaaacagttctaagataatatgttaatatttttagtactagaaattacattctctgcaacttaaaatagtcatagtttttttttgtttgtttttttactctttagaagtactggtgtaaacctatgatctagttcacaaagcaactcagtgactgtttgcttttttaaaaaaaaaatgaggtggtcttgggtgggaatatgtatcctaacattaaaatatgatgatttatgtggaaaaggagattataaaatagcaattcacacaatagtctgtatttatgaaacttcctaattgaaggcttctttcaggatatataactaaaagatgataggtttagatactcagcctaatgggttactgaggaaaccaggaagtcgggatcgtccttagtctttggggtcaacatcatgagcttccccagcacatctcaggttgccttcagaacagattctgagtctggttgaatagattcattcttgtgtttttagatttatatttgtgtactgggtttatggagagggtaataaaaaggcatttgtttttttttctccaatcaagtttgagacttacccccactagtttattactgtcttttctgttacgttgttacatgtttatacactatttaaaatagttacaataggctgggcgcagtggctcacgcctgtaatcccagcactttgggaggccgaggcaggtggatcacaaggccaagagtttgaggccagcctgaccaacatagtgaaaccccatctctactaaaaatacaaaaaaattagctgggtgtagtggtgcgcgcctgtaatctcagctccttgggaggctggggcaggagaatcacttgaacctgggaggcagaggttgcagtgagccgagatcgcaccactgcattccagcctgggcaacagggcgagactccatctcaaaaaataaaaaatataaaataaaataaaatagttacaataaaacattgtttatgtgttcattttcttacaggttgcagatattttattccaaactgcccaaaatgcaggcatcagttttgacaccgtgtgtggagtgccttatacagctttgccattggctacagttatctgttcaaccaatcaaattccaatgcttattagaaggaaagaaacaaaggattatggtaaaataaaagtaacataaagcatgaagttaattaatctgtaacatcatactcttagaatttttccgcttctgtgcactaatgttttaccagtcatcttgagttctttaagttgttactgcttgtagaatttataattgttactataagtcaccttcctttttttagacttggggtgaaatgctttgtattgattaggaaatgaaaagtgctttttttggtactgtatctatgaaactccaacattttttttttttaccagcccttccctcatcagcaaaatgttgtaacagcacatactttcccagtatgtttgtatttaaacttcatgaaaagtaatccatggataaaattactctcataaagcagtgtaaacacctcagagagatatttttgtgggttcatggcaatagattatcaggtgacttgctttaaaacccgaaaatttgtccaggcaccatggctcacgcctgtaatcccagcacttttggaggccgaggtaggcggatcacttgaggtcaggagttcaagaccagcctgaccaacgtggtaaaactccgtctctactaaaaatacaaaaattagctgggcgtggtggtatgcacctgtagtcccagctactggagaggctgaggcaggagatgcgcttgaacccaggaggtggaggttgcaatgagctgagattgcgccactgcactccagcctgggcgacaaagtgagaccctatttcaaacaaaaaaaaccctgaaaattggccaggcacagtggctcacacttgtaatcccagcactttgggagggcaaggtgggaggatagcttgagcccaggagtttgagaccagctttggcaacgtttgtctctacaaaaataaaaaaagaatacaaaattagctgagtgtcacagttacatgggaggctgaggcaggaggatgccttgagcccaggagctgaaggttgcagtgagctatgattatgccactgcactgcaccctgggtgacagagcaagactgtcaaaaaataaataaataaaacctgaaaagcaatcttaatgatagtaaggaattaatgggcttttttgtttatgttggtttattagtgttttgttactttttttaaaacaaatccttcttctacagatgcattctgaaaatttttatgattaaaaaaaagaaacatattagttgagtttttgtggcgtaagggcagtgttagtttttctgtttttgttttttgtttttttgagacaaggtctcactctgttgcccaggctggtcttgaactcctggtctcaagccatcctcctgcctcatcctcccaaagtgctgggattacaggtgtgagccactgcacccagctgagactttctgagctaaaaaaaaactgtatgaatccctacccataagaaaactcttatttctattattttatgttttaaaaactgtttctatgaaattatgcatttttaaatatactataaatacttgcagtcttgtgttctagcttaagctgattcagttaaacttaccagttgttcaagaagcggaaaggatttgatgagtctaaagtctacagcccaagttatttacgttttgtagattatctgaaaatagtctagtgggatttgggtagagaagtatatatttaatcacattgcattatataattctttagattgtagtaatgggtctaaatgattgctgaatatttttccttctgaatttgtgtcttcaaaaagtcaattatttggctgatcttgaatagtgaacttaaaatactttgatggaaaaaggaattatttcattcatgatactggattattctgtttcataactttccttgatctaggtgatcttgctgtaagaaactctgtatttaggctggacgtggtggctcacacctataatcctagcattttgggaggctgaggcgggaggatcacttgagctcaggagttcaagaccagcctagacaacatagtgagacctcatctctatgataaaacagatttttttaaagtaaaaaaaaaacctctctatttgaaaatttgatcataaaacacattaagcagtgtttataatgtgaaataatttacttgatttactataaatatactgtatgtgtaactggcaagtttggtatacagagttggctttatacataaatatactgtatgtgcaactagcaagtttggtatacagaattggtatacacatatactgtatgtgtaactggcaagttttgtatacagagtgtgtgtacgtatatacgcacatatacatacatatttaaatttggaatcagcaaaattttttcttttctaggaactaagcgtcttgtagaaggaactattaatccaggagaaacctgtttaatcattgaagatgttgtcaccagtggatctagtgttttggaaactgttgaggttcttcagaaggagggcttgaaggtcactgatgccatagtgctgttggacagagagcagggaggcaaggacaagttgcaggcgcacgggatccgcctccactcagtgtgtacattgtccaaaatgctggagattctcgagcagcagaaaaaagttgatgctgagacagttgggagagtgaagaggtttattcaggagaatgtctttgtggcagcgaatcataatggttctcccctttctataaaggaagcacccaaagaactcagcttcggtgcacgtgcagagctgcccaggatccacccagttgcatcgaagcttctcaggcttatgcaaaagaaggagaccaatctgtgtctatctgctgatgtttcactggccagagagctgttgcagctagcagatgctttaggacctagtatctgcatgctgaagactcatgtagatattttgaatgattttactctggatgtgatgaaggagttgataactctggcaaaatgccatgagttcttgatatttgaagaccggaagtttgcagatataggaaacacagtgaaaaagcagtatgaaggtaagtgtattattcaggaatctgcaagaatcagaaatccagcttaaactgaagaagaaaaaggaaatgctcatgtcattgaaagtccattcatagagcaggctgtcaagcgtggttggatccaggagctcaagtgatatcttcatgacttgctttctctccatctctcagctctgctttcttctctgttgacttctttctcaggtaggcatactctgcatgctcaccccaaaccaatcactctagcttgggatgtagaataccttcattaactagcctgggcaatttgctctgcaactgtgaggttgttaactctgtatgaccttcttgaaataagaaccagtcagggataatttccttaaagaaaatggatgtgctagtaccagaagaagggtatgtgcctgggcaagcaaatttgacagatgtccttggcagaatatgatgttttgaatgaaaattccacataaaggaaacaatgaaaaagaaatataaaatggtaagatttatttgtagcagaaaaagttctattgataaacattatttaaagatttttcttttatcaaatagggactcaaagtagtgcatgtgttggttgagaaaaatgcttagttctactgcctattctatgcaaatttctgtctatgtttttacaactgtgtgatcagactatatttaatgcatttttcacttaacctggtaacagatatttggttgtgtcatataacattttttgtaggcatctttgaggtaacttttctttaatgtatgcatgttcataagctatttctttaaaatagatttgtctttaagtgacttcttcatgtgcttaagatgtcctgccctcatcacattgcctagcttactttagctgattgactgacataagagttttatacaaactttcttcagctctgcatagagttttttcgaaaatcaggcttgttactgtccgcttttaaaaggaatatagttgcctattgaaattagatagctaaggagatctaaggaacacgtagaaatattgagcgatagtaaagctgctgagagacccctgcagagtgaaaacttgtcatcttcaagaagaattttatttttattattattttttttgagatggggtcttgctctgtcgcccaggctggagtgcagtggtgcaatcttgactcactgcaacctccacctcctgggctcaagtgatcctcccacctcagcctcccaagtagctgggaccacaggcatgcgccaccacacctagctaatttttttgtatttttggtagagatggagttttgccatgttgcccaggctggtctcgaactcctaaactcaagcaatctgcccacctcagcctcccaaagtactgggattacaagcatgagccaccatgcccagcttcaagaggaatttttaaatgttatccttgacatcaataaatgtttatcttcactggagtccctttctaatagcatgagctttatttgtggtcatgagcttcagccttcaaggaaaaagagtcctgttagtgttccagataagccaagtgcagaccttgaaagttttttctcattgtgatctctcacccagctacttacctgaataacagatacagttttcacagatggaaccatgggtctgctgataatcactaaagttcctgaagagttttgattctctcattaacatgttactgggagattatttcatattgtagttggttggttggacaagacgttagaggttttgtttgaaaatcagcaaatatcttttttcccccttcttcttaggaggtatctttaaaatagcttcctgggcagatctagtaaatgctcacgtggtgccaggctcaggagttgtgaaaggcctgcaagaagtgggcctgcctttgcatcgggggtgcctccttattgcggaaatgagctccaccggctccctggccactggggactacactagagcagcggtaagtggtggggggactgggtgagagggggcaggggctgctatgctgcatgctgcaagaagatatctcctaatctggcgtttctggaacctctgccaaaaaaaaaatccagctcttgttagtgtgacagtatattaatactagttggatagaattccttgatagttaatagcattttatatcatgtagtggacacttcaggaatttgaattatactccaagagaaactttgagacccagatagttagtcaaacaaacacttactaaatctaccaggactttaagataatgtctttttcatcttaccatgaattgagagaagatgagaagagcttcccagacatgcagtttctcagaatctcccaagtcctacagagatgcacattcccatgacagcagcccacatgcagtggctttctcttattcttgtcagatattttagaatataatattactttaaaaaaattgccatagggggctgggcgcagttgctcacacctgtaatcctagcactttgggaggccaaggcgggaggattgcttgaggccaggagttggacgtcatagtgagatctcgtctctacaaaaaaatgaaaaagaaaataaccaggcatggtggtacgtgcctatagtcccagctgcttgggaggctgaggtgggaggatcgcttgagcttgaagttcaaggctgcagggagccatgatcatgccactttacctcagcctgggcaagagtaagagcctgtcaaaaaaaattaaaaataaaaagccccaagaaaatccccatgatttttttaaaaatgaaatccccaagacaatccccatgtgaagattctagaagtaaaggatttccattttttcatattatttcagactatttggagacttaactcatatggccctacagtcaggttttaaccctatccctgaattgactataactgtctgatttcccaagtctcaaaatcacaggggccatgagtcagttttaatatttggcattctgggagtctgggtctggctcaaggacaagacatgacttgtttgttggcagtagtacttggtggcaagaatgaatgtatcaatgtgtgtctcaggtctcgaagtaccgaggctggagtgcagtggtggtactgagtctggtctccgggaagtatcaaataagaagggaagtatgggagtcacgtctcggggaaagtacctaccgaatcagaaagccaggcagaccttctaaagagacttttatgaatgtgagataatagtatagaaattggggagaccagttgatgttacagaagagggaaagtggtagaggtgagatttctttagctcttgaaagcgtagctgttctttacatgacagctgcctttggatatggagtaccccgtctgtagatagtcagtaagccttgaatgtggtttcataccattataatatgttctagagtactcgcctcaaatcctttttggaagtaggtgggtcaccaagcattattagaaataagaaattatgcagcatcttgattttagatgcatatagtataggatttctgctttacgtatggtttattgcgggaagggaagggaaagggtcatctcagagtcttaatgaagcagatgtgttttattatggtttctatctaagatgacctgtttcagatatagtaactttatatatatggaatgagaaaaggcatctataatacagcaaagtttctaactagataatagagcataagccaggcatggtgacttacaactgtaaccccagcactttgggaggccaaggtaggaggatcccttgagcccaggggttcaagaccagccagggaacatagggagacctcatgtcttttttttttttttttaagttttgaaaaaatagagcatatttttacttttattctgtgtgattaactgttttcttataatatgtcctattacattccatttaggttagaatggctgaggagcactctgaatttgttgttggttttatttctggctcccgagtaagcatgaaaccagaatttcttcacttgactccaggagttcagttggaagcaggaggtaaatctggtcactggtcgtggctcttccaaaaatgcttctttacccatggcaggcaaaataaaactttgcatattattatacacttgcttaagaaaagccttcttagtctagaacaataatgaatgagccctttggtaactatgtatctttggacaagtcagtttacttcttttagtctaattgtctgtaaaatggggatgataacagtattgacctcataaggtaatcaagatgctttaatgagataacatgtagaatatttaacacaatgtcttggcacagagtaaacactctgtacttataagcccttattcgtaagccctaataattgtttgactagatattatagttagggtctaggcttttaagaatacttaaagtatcttggatttggaagataataagccatttaacagaatgcttctgaaacagcggaatttaataaaaaagcaaaatttaaggattcgggtttatggatagtctgtgtgaccacttgatggggttcttgtatatggtagtggtcaggttagacttgctcagcagtgccttgtggtgattctaagatgtgtgctaaaattttcttcaattgtgaggccaatctttattgtatttttttgatattgaacctttctttgcaacatatgagttttacttctttttttaatatattgttaagctacagatgatctaaaatttgacattgagggggtgaatatttagggcaacttgaatttatgcttctggaaaaaaattacatgaaaaaataatgataaaataaataaggctgggtgcgggggctcacgctcgtaatcccagcactttgtgaggccgaggtgggcagatcacctgaggtcaggagttcaagaccagcttggccgacatggtgaaaccctgtctctactcaaaatacaaaaattagccgggcgtggtggtgcacgcttttaatcccagctactcgggaggctgaggcaggagaatcgcttgaatccgggaggcgggggttgcagcgagctgagattgtgccattgcactccagcctgggtgacagagcaagactctgtctcaaaaaaataaataaataaatagggcggggcgcagtagctcatgcctgtaatcccagcactttgggaggctgaggcgggcggatcatgaggtcaggagatcgagaccatcctggctaacacggtgaaactccatctctactaaaaaatacaaaaaattagccaggcgtggtggcaggcgcctgtagtcccagctactcgggaggctgaggcaggagaatggcatgaacctgggaggcagagcttgcagtgagccgagatagcaccactgcactccagcctgggtgacagagcgagactccgtctcaaaaaaataaataaataaaaataaataaataaataaataaataaaataaactttaccattgaaaaggagttggtgatcatctttctccatttgacgtctctggcctacccagtgagtctcttcagctcctgtttttacgcagttgctgtacaaaaggggaacgaaagtaggggcatgtttttatttaaagctggttagatactttttcagagaagtcatgtgacaggttttctgatttttgtattatgtgaaacaacaatttttgtgtttcttgcaggagataatcttggccaacagtacaatagcccacaagaagttattggcaaacgaggttccgatatcatcattgtaggtcgtggcataatctcagcagctgatcgtctggaagcagcagagatgtacagaaaagctgcttgggaagcgtatttgagtagacttggtgtttgagtgcttcagatacatttttcagatacaatgtgaagacattgaagatatgtggtcctcctgaaagtcactggctggaaataatccaattattcctgcttggattcttccacagggcctgtgtaagaatgggttctggagttctcatggtctttaggaaatattgagtaatttgtaatcaccgcattgatactataataagttcattcttaagcttgctttttttgagactggtgtttgttagacagccacagtcctgtctgggttagggtcttccacatttgaggatccttcctatctctccatgggactagactgctttgttattctatttattttttaatttttttcgagacaggatctcactctgttgcccaggatggagtgcagtggtgagatcacggctcattgcagcctcgacctcccaggtgatcctcccacctcagcttccagattagctggtgctataggcatgcaccaccacgtccatctaaatttctttattatttgtagagatgaggtcttgccatgttacccaggctggtctcaactcctgggctcaagcgatcctcctgcctcagtctctcaaagtgctgggattacaggtgtgagccactgtgcccagcctaattgcagtaagacaaaaattctagggcaccaagaggctaaagtcagc

SEQ ID NO: 14786 - DNA, 2001 bp, Homo sapiens
ggcgcctgggaatttgaagcaaacaggcagcgcgcgacaatggcggtcgctcgtgcagctttggggccattggtgacgggtctgtacgacgtgcaggctttcaagtttggggacttcgtgctgaagagcgggctttcctcccccatctacatcgatctgcggggcatcgtgtctcgaccgcgtcttctgagtcaggaactaagcgtcttgtagaaggaactattaatccaggagaaacctgtttaatcattgaagatgttgtcaccagtggatctagtgttttggaaactgttgaggttcttcagaaggagggcttgaaggtcactgatgccatagtgctgttggacagagagcagggaggcaaggacaagttgcaggcgcacgggatccgcctccactcagtgtgtacattgtccaaaatgctggagattctcgagcagcagaaaaaagttgatgctgagacagttgggagagtgaagaggtttattcaggagaatgtctttgtggcagcgaatcataatggttctcccctttctataaaggaagcacccaaagaactcagcttcggtgcacgtgcagagctgcccaggatccacccagttgcatcgaagcttctcaggcttatgcaaaagaaggagaccaatctgtgtctatctgctgatgtttcactggccagagagctgttgcagctagcagatgctttaggacctagtatctgcatgctgaagactcatgtagatattttgaatgattttactctggatgtgatgaaggagttgataactctggcaaaatgccatgagttcttgatatttgaagaccggaagtttgcagatataggaaacacagtgaaaaagcagtatgaaggaggtatctttaaaatagcttcctgggcagatctagtaaatgctcacgtggtgccaggctcaggagttgtgaaaggcctgcaagaagtgggcctgcctttgcatcgggggtgcctccttattgcggaaatgagctccaccggctccctggccactggggactacactagagcagcggttagaatggctgaggagcactctgaatttgttgttggttttatttctggctcccgagtaagcatgaaaccagaatttcttcacttgactccaggagttcagttggaagcaggaggagataatcttggccaacagtacaatagcccacaagaagttattggcaaacgaggttccgatatcatcattgtaggtcgtggcataatctcagcagctgatcgtctggaagcagcagagatgtacagaaaagctgcttgggaagcgtatttgagtagacttggtgtttgagtgcttcagatacatttttcagatacaatgtgaagacattgaagatatgtggtcctcctgaaagtcactggctggaaataatccaattattcctgcttggattcttccacagggcctgtgtaagaatgggttctggagttctcatggtctttaggaaatattgagtaatttgtaatcaccgcattgatactataataagttcattcttaagcttgctttttttgagactggtgtttgttagacagccacagtcctgtctgggttagggtcttccacatttgaggatccttcctatctctccatgggactagactgctttgttattctatttattttttaatttttttcgagacaggatctcactctgttgcccaggatggagtgcagtggtgagatcacggctcattgcagcctcgacctcccaggtgatcctcccacctcagcttccagattagctggtgctataggcatgcaccaccacgtccatctaaatttctttattatttgtagagatgaggtcttgccatgttacccaggctggtctcaactcctgggctcaagcgatcctcctgcctcagtctctcaaagtgctgggattacaggtgtgagccactgtgcccagcctaattgcagtaagacaaaaattctagggcaccaagaggctaaagtcagc

SEQ ID NO: 14787 - DNA, 14313 bp, Homo sapiens
tttgaagcaaacaggcagcgcgcgacaatggcggtcgctcgtgcagctttggggccattggtgacgggtctgtacgacgtgcaggctttcaagtttggggacttcgtgctgaagagcgggctttcctcccccatctacatcgatctgcggggcatcgtgtctcgaccgcgtcttctgagtcaggtgctggcctaggaagggaaaggacagggcttggtggcgggaaggaggacaaggaaatggaagagggtgacaggagttgggccgtgagtgagagcaaaagagccaagcaggcagaccgaccctactcttggtttggggagtaagcatgagaagcacagaggccaggggttgggctcctcgagagtcgtctgttctttcacccacacgcttagacacgtgttttgcaaaagtcgggaaacccagtttggaacgctttctggcactgaagcacacttgaatgaattctgtatatttaactctttaagaaaattagacttgcggccgggcgtggtgcctcatgagagtaataccagcactttgggatgcctaagtgggcagatcacctgagccccaggagttcgagaccagcctgggcaacatgacgagaccccgtctctacaaaaaattagctgggtgtggtggcgcacgcctgggacgctgaggtgggaggatcacctgagcctgggaggtcaaggctgcaatgagctgtcattgcgccactgcactccagcctgggcgacaagtgagaccctgccctcaaaaaacaaacaaatagaccgggaaaacgtgggtaggcagagaattcagtagctgggaaattactggtgagaaaaggaaaatagaacaaccagaactctgtgatgtatacaaaatttatcagagcccagagagacttcaaccatactcccctatgcagccccgggacaattatttaaaggaattttgtccctgactagctgcctctcccattatcttaatgtacctggaatgtgtgatacaaagaacaatgtatagctaatcaatcgcttgtgttattattttatttatttattttttagatgggatctctcttacgtcacccaggctggagtgcagctctgtgatcatagctcactgcagcctggaactcctgggcttaagagatcttcttgcctcgggtgagcacaggggctcatgcctgtagtcccaactttgggaggctttctttgggaggctgaggcgggtggatcacttaaggtctggagttcgagaccagcctggccaacatggtgaaaccctgtctctactgaaaatgcaaaaattagctgggcatggtggtgcacacctgtaatcccagctactcaggaggctgaggcagaagaatcaggaggttgcagttagccgaaattgagccactgcactccagcctgggcaacagagggagactgtctcagaaaaaaaaaaaaaaaagagatcctcttacctcaacctctgagtagctggaactacaggcatgtgccatcatgcccaccaaattaaaaattttttttttttgtagagaggaggtctcaccatactgcccaggctcgtctcaaactcctggcctcaaaagatcctcttgccttggcggcttcccaagtagctgggactacaaatgcctggtgccacccccgggctacctcctgttatttcaatgcaaattcttggtgaatataggaactgccccttcttttgctttaaaaatccacttgtaactactgtaatcgaagcctatagtcagggcaactactcatattaattttgcctcagcctcttcctgttaggtccacacttggaagggctgtttggaaaggggagttgaattttgcactgtgcggccagaagcaataattaagactagaaggtggacatattgggaaagcaggtttttagtcaatataaggaaaatttttgtacaaattagaggtttctaatacagtgcttctcaactttgagtatatatgaattacctgggaattttgttaaaatgcagaatccatttctgtagctctgagactagacctgaggttgtgcatttctaacaaagtgccagctgaaactgcagaccacactgagtagagggccgtaaatatgctttccaatacagtttgctactagccacgtgttactattgagcattatgaatttttaagtttaaatagtcatatatggccagtggctatcatattggactgcaaagatagagaacatttccatcattgcagaaagttctatcaagaagacatataagtttcctcagcccacttaagggtttatgttcactagggaccactttgtgtggttattgtaaaaagtattgaagataggttggactattaaggttgcggtactttggaccattaacttctcaccatccagaatcttgctatggtgtatcttagcaatgtggagaattactaaggattttctagggaaaaattgatttattttaataagccagctgataaatgacagaaaaagttttttgataactagatcatggtgtgtgtgtgtgtgtgtgtgtgtgtgtgtattttggtgattaactggggaggagttcaaaacatggagagacttgggtataacaaaacttcttttcacatcttatgcgaatagaatttctcagtatttacaccccaaaaagcaatataatttatgctaaactctaacttcccttaataagtgataataagtgatatttgactatagtactatatacacattagtgtacataaagtaattggagaggaaaggtagcattaactcactaaaaatgcattttccaaatctgtttttatctctctgtcaaaatttgcaaatcatgtttgaattaatcatatgcttgttataatttaatgatatacagaagaattctcttctttaaaaagtacaatttccattttcttttcctcaagagaatagtttctcttcagtccttaaggattcagctccttacatgggctttggtgagggtcatgaggcagcacccacaggtttaaatcagattggggtatttggtccttgtgggattcacaagatggattactgactgccttgctgtgaatggcacaactcacaccttaatgtagcttcgcatacagcttgggaagaacataggaggcaaagttgctcactgcagtaatgtccctgactgctgcggcctctactatgttttgcacgacgagcttcttaatggtcttttccttgggcatgcatcggacatagtatgtgccactactggccacagccctttttggcacgatcattgttcctttcttttctttgtcatcttggaagtaaggacctgagagagctacagaagaattcttgacatctagagacttatggtcatgggaaatttttttttaattaccattttaaatttcagtttacatacatatagacaagtatgacagagggatcagtaaaagcttttcaagtataatcatatattactttagaataaaattctgtggacacagtggagtgaaaatatgagttggaaaaagatgtaaaaaattttaaacttttcatagtccagcaatttcacgttttgtttttttaaatggagatggtggatatccagtcactagcatttgtattccaagtttattccttaaaaagagtgataaaacagttctaagataatatgttaatatttttagtactagaaattacattctctgcaacttaaaatagtcatagtttttttttgtttgtttttttactctttagaagtactggtgtaaacctatgatctagttcacaaagcaactcagtgactgtttgcttttttaaaaaaaaaatgaggtggtcttgggtgggaatatgtatcctaacattaaaatatgatgatttatgtggaaaaggagattataaaatagcaattcacacaatagtctgtatttatgaaacttcctaattgaaggcttctttcaggatatataactaaaagatgataggtttagatactcagcctaatgggttactgaggaaaccaggaagtcgggatcgtccttagtctttggggtcaacatcatgagcttccccagcacatctcaggttgccttcagaacagattctgagtctggttgaatagattcattcttgtgtttttagatttatatttgtgtactgggtttatggagagggtaataaaaaggcatttgtttttttttctccaatcaagtttgagacttacccccactagtttattactgtcttttctgttacgttgttacatgtttatacactatttaaaatagttacaataggctgggcgcagtggctcacgcctgtaatcccagcactttgggaggccgaggcaggtggatcacaaggccaagagtttgaggccagcctgaccaacatagtgaaaccccatctctactaaaaatacaaaaaaattagctgggtgtagtggtgcgcgcctgtaatctcagctccttgggaggctggggcaggagaatcacttgaacctgggaggcagaggttgcagtgagccgagatcgcaccactgcattccagcctgggcaacagggcgagactccatctcaaaaaataaaaaatataaaataaaataaaatagttacaataaaacattgtttatgtgttcattttcttacaggttgcagatattttattccaaactgcccaaaatgcaggcatcagttttgacaccgtgtgtggagtgccttatacagctttgccattggctacagttatctgttcaaccaatcaaattccaatgcttattagaaggaaagaaacaaaggattatggtaaaataaaagtaacataaagcatgaagttaattaatctgtaacatcatactcttagaatttttccgcttctgtgcactaatgttttaccagtcatcttgagttctttaagttgttactgcttgtagaatttataattgttactataagtcaccttcctttttttagacttggggtgaaatgctttgtattgattaggaaatgaaaagtgctttttttggtactgtatctatgaaactccaacattttttttttttaccagcccttccctcatcagcaaaatgttgtaacagcacatactttcccagtatgtttgtatttaaacttcatgaaaagtaatccatggataaaattactctcataaagcagtgtaaacacctcagagagatatttttgtgggttcatggcaatagattatcaggtgacttgctttaaaacccgaaaatttgtccaggcaccatggctcacgcctgtaatcccagcacttttggaggccgaggtaggcggatcacttgaggtcaggagttcaagaccagcctgaccaacgtggtaaaactccgtctctactaaaaatacaaaaattagctgggcgtggtggtatgcacctgtagtcccagctactggagaggctgaggcaggagatgcgcttgaacccaggaggtggaggttgcaatgagctgagattgcgccactgcactccagcctgggcgacaaagtgagaccctatttcaaacaaaaaaaaccctgaaaattggccaggcacagtggctcacacttgtaatcccagcactttgggagggcaaggtgggaggatagcttgagcccaggagtttgagaccagctttggcaacgtttgtctctacaaaaataaaaaaagaatacaaaattagctgagtgtcacagttacatgggaggctgaggcaggaggatgccttgagcccaggagctgaaggttgcagtgagctatgattatgccactgcactgcaccctgggtgacagagcaagactgtcaaaaaataaataaataaaacctgaaaagcaatcttaatgatagtaaggaattaatgggcttttttgtttatgttggtttattagtgttttgttactttttttaaaacaaatccttcttctacagatgcattctgaaaatttttatgattaaaaaaaagaaacatattagttgagtttttgtggcgtaagggcagtgttagtttttctgtttttgttttttgtttttttgagacaaggtctcactctgttgcccaggctggtcttgaactcctggtctcaagccatcctcctgcctcatcctcccaaagtgctgggattacaggtgtgagccactgcacccagctgagactttctgagctaaaaaaaaactgtatgaatccctacccataagaaaactcttatttctattattttatgttttaaaaactgtttctatgaaattatgcatttttaaatatactataaatacttgcagtcttgtgttctagcttaagctgattcagttaaacttaccagttgttcaagaagcggaaaggatttgatgagtctaaagtctacagcccaagttatttacgttttgtagattatctgaaaatagtctagtgggatttgggtagagaagtatatatttaatcacattgcattatataattctttagattgtagtaatgggtctaaatgattgctgaatatttttccttctgaatttgtgtcttcaaaaagtcaattatttggctgatcttgaatagtgaacttaaaatactttgatggaaaaaggaattatttcattcatgatactggattattctgtttcataactttccttgatctaggtgatcttgctgtaagaaactctgtatttaggctggacgtggtggctcacacctataatcctagcattttgggaggctgaggcgggaggatcacttgagctcaggagttcaagaccagcctagacaacatagtgagacctcatctctatgataaaacagatttttttaaagtaaaaaaaaaacctctctatttgaaaatttgatcataaaacacattaagcagtgtttataatgtgaaataatttacttgatttactataaatatactgtatgtgtaactggcaagtttggtatacagagttggctttatacataaatatactgtatgtgcaactagcaagtttggtatacagaattggtatacacatatactgtatgtgtaactggcaagttttgtatacagagtgtgtgtacgtatatacgcacatatacatacatatttaaatttggaatcagcaaaattttttcttttctaggaactaagcgtcttgtagaaggaactattaatccaggagaaacctgtttaatcattgaagatgttgtcaccagtggatctagtgttttggaaactgttgaggttcttcagaaggagggcttgaaggtcactgatgccatagtgctgttggacagagagcagggaggcaaggacaagttgcaggcgcacgggatccgcctccactcagtgtgtacattgtccaaaatgctggagattctcgagcagcagaaaaaagttgatgctgagacagttgggagagtgaagaggtttattcaggagaatgtctttgtggcagcgaatcataatggttctcccctttctataaaggaagcacccaaagaactcagcttcggtgcacgtgcagagctgcccaggatccacccagttgcatcgaagcttctcaggcttatgcaaaagaaggagaccaatctgtgtctatctgctgatgtttcactggccagagagctgttgcagctagcagatgctttaggacctagtatctgcatgctgaagactcatgtagatattttgaatgattttactctggatgtgatgaaggagttgataactctggcaaaatgccatgagttcttgatatttgaagaccggaagtttgcagatataggaaacacagtgaaaaagcagtatgaaggtaagtgtattattcaggaatctgcaagaatcagaaatccagcttaaactgaagaagaaaaaggaaatgctcatgtcattgaaagtccattcatagagcaggctgtcaagcgtggttggatccaggagctcaagtgatatcttcatgacttgctttctctccatctctcagctctgctttcttctctgttgacttctttctcaggtaggcatactctgcatgctcaccccaaaccaatcactctagcttgggatgtagaataccttcattaactagcctgggcaatttgctctgcaactgtgaggttgttaactctgtatgaccttcttgaaataagaaccagtcagggataatttccttaaagaaaatggatgtgctagtaccagaagaagggtatgtgcctgggcaagcaaatttgacagatgtccttggcagaatatgatgttttgaatgaaaattccacataaaggaaacaatgaaaaagaaatataaaatggtaagatttatttgtagcagaaaaagttctattgataaacattatttaaagatttttcttttatcaaatagggactcaaagtagtgcatgtgttggttgagaaaaatgcttagttctactgcctattctatgcaaatttctgtctatgtttttacaactgtgtgatcagactatatttaatgcatttttcacttaacctggtaacagatatttggttgtgtcatataacattttttgtaggcatctttgaggtaacttttctttaatgtatgcatgttcataagctatttctttaaaatagatttgtctttaagtgacttcttcatgtgcttaagatgtcctgccctcatcacattgcctagcttactttagctgattgactgacataagagttttatacaaactttcttcagctctgcatagagttttttcgaaaatcaggcttgttactgtccgcttttaaaaggaatatagttgcctattgaaattagatagctaaggagatctaaggaacacgtagaaatattgagcgatagtaaagctgctgagagacccctgcagagtgaaaacttgtcatcttcaagaagaattttatttttattattattttttttgagatggggtcttgctctgtcgcccaggctggagtgcagtggtgcaatcttgactcactgcaacctccacctcctgggctcaagtgatcctcccacctcagcctcccaagtagctgggaccacaggcatgcgccaccacacctagctaatttttttgtatttttggtagagatggagttttgccatgttgcccaggctggtctcgaactcctaaactcaagcaatctgcccacctcagcctcccaaagtactgggattacaagcatgagccaccatgcccagcttcaagaggaatttttaaatgttatccttgacatcaataaatgtttatcttcactggagtccctttctaatagcatgagctttatttgtggtcatgagcttcagccttcaaggaaaaagagtcctgttagtgttccagataagccaagtgcagaccttgaaagttttttctcattgtgatctctcacccagctacttacctgaataacagatacagttttcacagatggaaccatgggtctgctgataatcactaaagttcctgaagagttttgattctctcattaacatgttactgggagattatttcatattgtagttggttggttggacaagacgttagaggttttgtttgaaaatcagcaaatatcttttttcccccttcttcttaggaggtatctttaaaatagcttcctgggcagatctagtaaatgctcacgtggtgccaggctcaggagttgtgaaaggcctgcaagaagtgggcctgcctttgcatcgggggtgcctccttattgcggaaatgagctccaccggctccctggccactggggactacactagagcagcggtaagtggtggggggactgggtgagagggggcaggggctgctatgctgcatgctgcaagaagatatctcctaatctggcgtttctggaacctctgccaaaaaaaaaatccagctcttgttagtgtgacagtatattaatactagttggatagaattccttgatagttaatagcattttatatcatgtagtggacacttcaggaatttgaattatactccaagagaaactttgagacccagatagttagtcaaacaaacacttactaaatctaccaggactttaagataatgtctttttcatcttaccatgaattgagagaagatgagaagagcttcccagacatgcagtttctcagaatctcccaagtcctacagagatgcacattcccatgacagcagcccacatgcagtggctttctcttattcttgtcagatattttagaatataatattactttaaaaaaattgccatagggggctgggcgcagttgctcacacctgtaatcctagcactttgggaggccaaggcgggaggattgcttgaggccaggagttggacgtcatagtgagatctcgtctctacaaaaaaatgaaaaagaaaataaccaggcatggtggtacgtgcctatagtcccagctgcttgggaggctgaggtgggaggatcgcttgagcttgaagttcaaggctgcagggagccatgatcatgccactttacctcagcctgggcaagagtaagagcctgtcaaaaaaaattaaaaataaaaagccccaagaaaatccccatgatttttttaaaaatgaaatccccaagacaatccccatgtgaagattctagaagtaaaggatttccattttttcatattatttcagactatttggagacttaactcatatggccctacagtcaggttttaaccctatccctgaattgactataactgtctgatttcccaagtctcaaaatcacaggggccatgagtcagttttaatatttggcattctgggagtctgggtctggctcaaggacaagacatgacttgtttgttggcagtagtacttggtggcaagaatgaatgtatcaatgtgtgtctcaggtctcgaagtaccgaggctggagtgcagtggtggtactgagtctggtctccgggaagtatcaaataagaagggaagtatgggagtcacgtctcggggaaagtacctaccgaatcagaaagccaggcagaccttctaaagagacttttatgaatgtgagataatagtatagaaattggggagaccagttgatgttacagaagagggaaagtggtagaggtgagatttctttagctcttgaaagcgtagctgttctttacatgacagctgcctttggatatggagtaccccgtctgtagatagtcagtaagccttgaatgtggtttcataccattataatatgttctagagtactcgcctcaaatcctttttggaagtaggtgggtcaccaagcattattagaaataagaaattatgcagcatcttgattttagatgcatatagtataggatttctgctttacgtatggtttattgcgggaagggaagggaaagggtcatctcagagtcttaatgaagcagatgtgttttattatggtttctatctaagatgacctgtttcagatatagtaactttatatatatggaatgagaaaaggcatctataatacagcaaagtttctaactagataatagagcataagccaggcatggtgacttacaactgtaaccccagcactttgggaggccaaggtaggaggatcccttgagcccaggggttcaagaccagccagggaacatagggagacctcatgtcttttttttttttttttaagttttgaaaaaatagagcatatttttacttttattctgtgtgattaactgttttcttataatatgtcctattacattccatttaggttagaatggctgaggagcactctgaatttgttgttggttttatttctggctcccgagtaagcatgaaaccagaatttcttcacttgactccaggagttcagttggaagcaggaggtaaatctggtcactggtcgtggctcttccaaaaatgcttctttacccatggcaggcaaaataaaactttgcatattattatacacttgcttaagaaaagccttcttagtctagaacaataatgaatgagccctttggtaactatgtatctttggacaagtcagtttacttcttttagtctaattgtctgtaaaatggggatgataacagtattgacctcataaggtaatcaagatgctttaatgagataacatgtagaatatttaacacaatgtcttggcacagagtaaacactctgtacttataagcccttattcgtaagccctaataattgtttgactagatattatagttagggtctaggcttttaagaatacttaaagtatcttggatttggaagataataagccatttaacagaatgcttctgaaacagcggaatttaataaaaaagcaaaatttaaggattcgggtttatggatagtctgtgtgaccacttgatggggttcttgtatatggtagtggtcaggttagacttgctcagcagtgccttgtggtgattctaagatgtgtgctaaaattttcttcaattgtgaggccaatctttattgtatttttttgatattgaacctttctttgcaacatatgagttttacttctttttttaatatattgttaagctacagatgatctaaaatttgacattgagggggtgaatatttagggcaacttgaatttatgcttctggaaaaaaattacatgaaaaaataatgataaaataaataaggctgggtgcgggggctcacgctcgtaatcccagcactttgtgaggccgaggtgggcagatcacctgaggtcaggagttcaagaccagcttggccgacatggtgaaaccctgtctctactcaaaatacaaaaattagccgggcgtggtggtgcacgcttttaatcccagctactcgggaggctgaggcaggagaatcgcttgaatccgggaggcgggggttgcagcgagctgagattgtgccattgcactccagcctgggtgacagagcaagactctgtctcaaaaaaataaataaataaatagggcggggcgcagtagctcatgcctgtaatcccagcactttgggaggctgaggcgggcggatcatgaggtcaggagatcgagaccatcctggctaacacggtgaaactccatctctactaaaaaatacaaaaaattagccaggcgtggtggcaggcgcctgtagtcccagctactcgggaggctgaggcaggagaatggcatgaacctgggaggcagagcttgcagtgagccgagatagcaccactgcactccagcctgggtgacagagcgagactccgtctcaaaaaaataaataaataaaaataaataaataaataaataaataaaataaactttaccattgaaaaggagttggtgatcatctttctccatttgacgtctctggcctacccagtgagtctcttcagctcctgtttttacgcagttgctgtacaaaaggggaacgaaagtaggggcatgtttttatttaaagctggttagatactttttcagagaagtcatgtgacaggttttctgatttttgtattatgtgaaacaacaatttttgtgtttcttgcaggagataatcttggccaacagtacaatagcccacaagaagttattggcaaacgaggttccgatatcatcattgtaggtcgtggcataatctcagcagctgatcgtctggaagcagcagagatgtacagaaaagctgcttgggaagcgtatttgagtagacttggtgtttgagtgcttcagatacatttttcagatacaatgtgaagacattgaagatatgtggtcctcctgaaagtcactggctggaaataatccaattattcctgcttggattcttccacagggcctgtgtaagaatgggttctggagttctcatggtctttaggaaatattgagtaatttgtaatcaccgcattgatactataataagttcattcttaagcttgctttttttgagactggtgtttgttagacagccacagtcctgtctgggttagggtcttccacatttgaggatccttcctatctctccatgggactagactgctttgttattctatttattttttaatttttttcgagacaggatctcactctgttgcccaggatggagtgcagtggtgagatcacggctcattgcagcctcgacctcccaggtgatcctcccacctcagcttccagattagctggtgctataggcatgcaccaccacgtccatctaaatttctttattatttgtagagatgaggtcttgccatgttacccaggctggtctcaactcctgggctcaagcgatcctcctgcctcagtctctcaaagtgctgggattacaggtgtgagccactgtgcccagcctaattgcagtaagacaaaaattctagggcaccaagaggctaaagtcagc

SEQ ID NO: 14788 - DNA, 2242 bp, Homo sapiens
tttgaagcaaacaggcagcgcgcgacaatggcggtcgctcgtgcagctttggggccattggtgacgggtctgtacgacgtgcaggctttcaagtttggggacttcgtgctgaagagcgggctttcctcccccatctacatcgatctgcggggcatcgtgtctcgaccgcgtcttctgagtcagatgggatctctcttacgtcacccaggctggagtgcagctctgtgatcatagctcactgcagcctggaactcctgggcttaagagatcttcttgcctcgggttgcagatattttattccaaactgcccaaaatgcaggcatcagttttgacaccgtgtgtggagtgccttatacagctttgccattggctacagttatctgttcaaccaatcaaattccaatgcttattagaaggaaagaaacaaaggattatggaactaagcgtcttgtagaaggaactattaatccaggagaaacctgtttaatcattgaagatgttgtcaccagtggatctagtgttttggaaactgttgaggttcttcagaaggagggcttgaaggtcactgatgccatagtgctgttggacagagagcagggaggcaaggacaagttgcaggcgcacgggatccgcctccactcagtgtgtacattgtccaaaatgctggagattctcgagcagcagaaaaaagttgatgctgagacagttgggagagtgaagaggtttattcaggagaatgtctttgtggcagcgaatcataatggttctcccctttctataaaggaagcacccaaagaactcagcttcggtgcacgtgcagagctgcccaggatccacccagttgcatcgaagcttctcaggcttatgcaaaagaaggagaccaatctgtgtctatctgctgatgtttcactggccagagagctgttgcagctagcagatgctttaggacctagtatctgcatgctgaagactcatgtagatattttgaatgattttactctggatgtgatgaaggagttgataactctggcaaaatgccatgagttcttgatatttgaagaccggaagtttgcagatataggaaacacagtgaaaaagcagtatgaaggaggtatctttaaaatagcttcctgggcagatctagtaaatgctcacgtggtgccaggctcaggagttgtgaaaggcctgcaagaagtgggcctgcctttgcatcgggggtgcctccttattgcggaaatgagctccaccggctccctggccactggggactacactagagcagcggttagaatggctgaggagcactctgaatttgttgttggttttatttctggctcccgagtaagcatgaaaccagaatttcttcacttgactccaggagttcagttggaagcaggaggagataatcttggccaacagtacaatagcccacaagaagttattggcaaacgaggttccgatatcatcattgtaggtcgtggcataatctcagcagctgatcgtctggaagcagcagagatgtacagaaaagctgcttgggaagcgtatttgagtagacttggtgtttgagtgcttcagatacatttttcagatacaatgtgaagacattgaagatatgtggtcctcctgaaagtcactggctggaaataatccaattattcctgcttggattcttccacagggcctgtgtaagaatgggttctggagttctcatggtctttaggaaatattgagtaatttgtaatcaccgcattgatactataataagttcattcttaagcttgctttttttgagactggtgtttgttagacagccacagtcctgtctgggttagggtcttccacatttgaggatccttcctatctctccatgggactagactgctttgttattctatttattttttaatttttttcgagacaggatctcactctgttgcccaggatggagtgcagtggtgagatcacggctcattgcagcctcgacctcccaggtgatcctcccacctcagcttccagattagctggtgctataggcatgcaccaccacgtccatctaaatttctttattatttgtagagatgaggtcttgccatgttacccaggctggtctcaactcctgggctcaagcgatcctcctgcctcagtctctcaaagtgctgggattacaggtgtgagccactgtgcccagcctaattgcagtaagacaaaaattctagggcaccaagaggctaaagtcagc

SEQ ID NO: 14789 - DNA, 14306 bp, Homo sapiens; identical to SEQ ID NO: 14783

SEQ ID NO: 14790 - DNA, 1789 bp, Homo sapiens
caaacaggcagcgcgcgacaatggcggtcgctcgtgcagctttggggccattggtgacgggtctgtacgacgtgcaggctttcaagtttggggacttcgtgctgaagagcgggctttcctcccccatctacatcgatctgcggggcatcgtgtctcgaccgcgtcttctgagtcaggttgcagatattttattccaaactgcccaaaatgcaggcatcagttttgacaccgtgtgtggagtgccttatacagctttgccattggctacagttatctgttcaaccaatcaaattccaatgcttattagaaggaaagaaacaaaggattatggaagcacccaaagaactcagcttcggtgcacgtgcagagctgcccaggatccacccagttgcatcgaagcttctcaggcttatgcaaaagaaggagaccaatctgtgtctatctgctgatgtttcactggccagagagctgttgcagctagcagatgctttaggacctagtatctgcatgctgaagactcatgtagatattttgaatgattttactctggatgtgatgaaggagttgataactctggcaaaatgccatgagttcttgatatttgaagaccggaagtttgcagatataggaaacacagtgaaaaagcagtatgaaggaggtatctttaaaatagcttcctgggcagatctagtaaatgctcacgtggtgccaggctcaggagttgtgaaaggcctgcaagaagtgggcctgcctttgcatcgggggtgcctccttattgcggaaatgagctccaccggctccctggccactggggactacactagagcagcggttagaatggctgaggagcactctgaatttgttgttggttttatttctggctcccgagtaagcatgaaaccagaatttcttcacttgactccaggagttcagttggaagcaggaggagataatcttggccaacagtacaatagcccacaagaagttattggcaaacgaggttccgatatcatcattgtaggtcgtggcataatctcagcagctgatcgtctggaagcagcagagatgtacagaaaagctgcttgggaagcgtatttgagtagacttggtgtttgagtgcttcagatacatttttcagatacaatgtgaagacattgaagatatgtggtcctcctgaaagtcactggctggaaataatccaattattcctgcttggattcttccacagggcctgtgtaagaatgggttctggagttctcatggtctttaggaaatattgagtaatttgtaatcaccgcattgatactataataagttcattcttaagcttgctttttttgagactggtgtttgttagacagccacagtcctgtctgggttagggtcttccacatttgaggatccttcctatctctccatgggactagactgctttgttattctatttattttttaatttttttcgagacaggatctcactctgttgcccaggatggagtgcagtggtgagatcacggctcattgcagcctcgacctcccaggtgatcctcccacctcagcttccagattagctggtgctataggcatgcaccaccacgtccatctaaatttctttattatttgtagagatgaggtcttgccatgttacccaggctggtctcaactcctgggctcaagcgatcctcctgcctcagtctctcaaagtgctgggattacaggtgtgagccactgtgcccagcctaattgcagtaagacaaaaattctagggcaccaagaggctaaagtcagc

SEQ ID NO: 14791 - DNA, 14306 bp, Homo sapiens; identical to SEQ ID NO: 14783

SEQ ID NO: 14792 - DNA, 2340 bp, Homo sapiens
caaacaggcagcgcgcgacaatggcggtcgctcgtgcagctttggggccattggtgacgggtctgtacgacgtgcaggctttcaagtttggggacttcgtgctgaagagcgggctttcctcccccatctacatcgatctgcggggcatcgtgtctcgaccgcgtcttctgagtcaggttgcagatattttattccaaactgcccaaaatgcaggcatcagttttgacaccgtgtgtggagtgccttatacagctttgccattggctacagttatctgttcaaccaatcaaattccaatgcttattagaaggaaagaaacaaaggattatggaactaagcgtcttgtagaaggaactattaatccaggagaaacctgtttaatcattgaagatgttgtcaccagtggatctagtgttttggaaactgttgaggttcttcagaaggagggcttgaaggtcactgatgccatagtgctgttggacagagagcagggaggcaaggacaagttgcaggcgcacgggatccgcctccactcagtgtgtacattgtccaaaatgctggagattctcgagcagcagaaaaaagttgatgctgagacagttgggagagtgaagaggtttattcaggagaatgtctttgtggcagcgaatcataatggttctcccctttctataaaggaagcacccaaagaactcagcttcggtgcacgtgcagagctgcccaggatccacccagttgcatcgaagcttctcaggcttatgcaaaagaaggagaccaatctgtgtctatctgctgatgtttcactggccagagagctgttgcagctagcagatgctttaggacctagtatctgcatgctgaagactcatgtagatattttgaatgattttactctggatgtgatgaaggagttgataactctggcaaaatgccatgagttcttgatatttgaagaccggaagtttgcagatataggaaacacagtgaaaaagcagtatgaaggtaagtgtattattcaggaatctgcaagaatcagaaatccagcttaaactgaagaagaaaaaggaaatgctcatgtcattgaaagtccattcatagagcaggctgtcaagcgtggttggatccaggagctcaagtgatatcttcatgacttgctttctctccatctctcagctctgctttcttctctgttgacttctttctcaggaggtatctttaaaatagcttcctgggcagatctagtaaatgctcacgtggtgccaggctcaggagttgtgaaaggcctgcaagaagtgggcctgcctttgcatcgggggtgcctccttattgcggaaatgagctccaccggctccctggccactggggactacactagagcagcggttagaatggctgaggagcactctgaatttgttgttggttttatttctggctcccgagtaagcatgaaaccagaatttcttcacttgactccaggagttcagttggaagcaggaggagataatcttggccaacagtacaatagcccacaagaagttattggcaaacgaggttccgatatcatcattgtaggtcgtggcataatctcagcagctgatcgtctggaagcagcagagatgtacagaaaagctgcttgggaagcgtatttgagtagacttggtgtttgagtgcttcagatacatttttcagatacaatgtgaagacattgaagatatgtggtcctcctgaaagtcactggctggaaataatccaattattcctgcttggattcttccacagggcctgtgtaagaatgggttctggagttctcatggtctttaggaaatattgagtaatttgtaatcaccgcattgatactataataagttcattcttaagcttgctttttttgagactggtgtttgttagacagccacagtcctgtctgggttagggtcttccacatttgaggatccttcctatctctccatgggactagactgctttgttattctatttattttttaatttttttcgagacaggatctcactctgttgcccaggatggagtgcagtggtgagatcacggctcattgcagcctcgacctcccaggtgatcctcccacctcagcttccagattagctggtgctataggcatgcaccaccacgtccatctaaatttctttattatttgtagagatgaggtcttgccatgttacccaggctggtctcaactcctgggctcaagcgatcctcctgcctcagtctctcaaagtgctgggattacaggtgtgagccactgtgcccagcctaattgcagtaagacaaaaattctagggcaccaagaggctaaagtcagc

SEQ ID NO: 14793 - DNA, 4535 bp, Homo sapiens
ctggatgtgatgaaggagttgataactctggcaaaatgccatgagttcttgatatttgaagaccggaagtttgcagatataggaaacacagtgaaaaagcagtatgaaggtaagtgtattattcaggaatctgcaagaatcagaaatccagcttaaactgaagaagaaaaaggaaatgctcatgtcattgaaagtccattcatagagcaggctgtcaagcgtggttggatccaggagctcaagtgatatcttcatgacttgctttctctccatctctcagctctgctttcttctctgttgacttctttctcaggtaggcatactctgcatgctcaccccaaaccaatcactctagcttgggatgtagaataccttcattaactagcctgggcaatttgctctgcaactgtgaggttgttaactctgtatgaccttcttgaaataagaaccagtcagggataatttccttaaagaaaatggatgtgctagtaccagaagaagggtatgtgcctgggcaagcaaatttgacagatgtccttggcagaatatgatgttttgaatgaaaattccacataaaggaaacaatgaaaaagaaatataaaatggtaagatttatttgtagcagaaaaagttctattgataaacattatttaaagatttttcttttatcaaatagggactcaaagtagtgcatgtgttggttgagaaaaatgcttagttctactgcctattctatgcaaatttctgtctatgtttttacaactgtgtgatcagactatatttaatgcatttttcacttaacctggtaacagatatttggttgtgtcatataacattttttgtaggcatctttgaggtaacttttctttaatgtatgcatgttcataagctatttctttaaaatagatttgtctttaagtgacttcttcatgtgcttaagatgtcctgccctcatcacattgcctagcttactttagctgattgactgacataagagttttatacaaactttcttcagctctgcatagagttttttcgaaaatcaggcttgttactgtccgcttttaaaaggaatatagttgcctattgaaattagatagctaaggagatctaaggaacacgtagaaatattgagcgatagtaaagctgctgagagacccctgcagagtgaaaacttgtcatcttcaagaagaattttatttttattattattttttttgagatggggtcttgctctgtcgcccaggctggagtgcagtggtgcaatcttgactcactgcaacctccacctcctgggctcaagtgatcctcccacctcagcctcccaagtagctgggaccacaggcatgcgccaccacacctagctaatttttttgtatttttggtagagatggagttttgccatgttgcccaggctggtctcgaactcctaaactcaagcaatctgcccacctcagcctcccaaagtactgggattacaagcatgagccaccatgcccagcttcaagaggaatttttaaatgttatccttgacatcaataaatgtttatcttcactggagtccctttctaatagcatgagctttatttgtggtcatgagcttcagccttcaaggaaaaagagtcctgttagtgttccagataagccaagtgcagaccttgaaagttttttctcattgtgatctctcacccagctacttacctgaataacagatacagttttcacagatggaaccatgggtctgctgataatcactaaagttcctgaagagttttgattctctcattaacatgttactgggagattatttcatattgtagttggttggttggacaagacgttagaggttttgtttgaaaatcagcaaatatcttttttcccccttcttcttaggaggtatctttaaaatagcttcctgggcagatctagtaaatgctcacgtggtgccaggctcaggagttgtgaaaggcctgcaagaagtgggcctgcctttgcatcgggggtgcctccttattgcggaaatgagctccaccggctccctggccactggggactacactagagcagcggtaagtggtggggggactgggtgagagggggcaggggctgctatgctgcatgctgcaagaagatatctcctaatctggcgtttctggaacctctgccaaaaaaaaaatccagctcttgttagtgtgacagtatattaatactagttggatagaattccttgatagttaatagcattttatatcatgtagtggacacttcaggaatttgaattatactccaagagaaactttgagacccagatagttagtcaaacaaacacttactaaatctaccaggactttaagataatgtctttttcatcttaccatgaattgagagaagatgagaagagcttcccagacatgcagtttctcagaatctcccaagtcctacagagatgcacattcccatgacagcagcccacatgcagtggctttctcttattcttgtcagatattttagaatataatattactttaaaaaaattgccatagggggctgggcgcagttgctcacacctgtaatcctagcactttgggaggccaaggcgggaggattgcttgaggccaggagttggacgtcatagtgagatctcgtctctacaaaaaaatgaaaaagaaaataaccaggcatggtggtacgtgcctatagtcccagctgcttgggaggctgaggtgggaggatcgcttgagcttgaagttcaaggctgcagggagccatgatcatgccactttacctcagcctgggcaagagtaagagcctgtcaaaaaaaattaaaaataaaaagccccaagaaaatccccatgatttttttaaaaatgaaatccccaagacaatccccatgtgaagattctagaagtaaaggatttccattttttcatattatttcagactatttggagacttaactcatatggccctacagtcaggttttaaccctatccctgaattgactataactgtctgatttcccaagtctcaaaatcacaggggccatgagtcagttttaatatttggcattctgggagtctgggtctggctcaaggacaagacatgacttgtttgttggcagtagtacttggtggcaagaatgaatgtatcaatgtgtgtctcaggtctcgaagtaccgaggctggagtgcagtggtggtactgagtctggtctccgggaagtatcaaataagaagggaagtatgggagtcacgtctcggggaaagtacctaccgaatcagaaagccaggcagaccttctaaagagacttttatgaatgtgagataatagtatagaaattggggagaccagttgatgttacagaagagggaaagtggtagaggtgagatttctttagctcttgaaagcgtagctgttctttacatgacagctgcctttggatatggagtaccccgtctgtagatagtcagtaagccttgaatgtggtttcataccattataatatgttctagagtactcgcctcaaatcctttttggaagtaggtgggtcaccaagcattattagaaataagaaattatgcagcatcttgattttagatgcatatagtataggatttctgctttacgtatggtttattgcgggaagggaagggaaagggtcatctcagagtcttaatgaagcagatgtgttttattatggtttctatctaagatgacctgtttcagatatagtaactttatatatatggaatgagaaaaggcatctataatacagcaaagtttctaactagataatagagcataagccaggcatggtgacttacaactgtaaccccagcactttgggaggccaaggtaggaggatcccttgagcccaggggttcaagaccagccagggaacatagggagacctcatgtcttttttttttttttttaagttttgaaaaaatagagcatatttttacttttattctgtgtgattaactgttttcttataatatgtcctattacattccatttaggttagaatggctgaggagcactctgaatttgttgttggttttatttctggctcccgagtaagcatgaaaccagaatttcttcacttgactccaggagttcagttggaagcaggaggtaaatctggtcactggtcgtggctcttccaaaaatgcttctttacccatggcaggcaaaataaaactttgcatattattatacacttgcttaagaaaagccttcttagtctagaacaataatgaatgagccctttggtaactatgtatctttggacaagtcagtttacttcttttagtctaattgtctgtaaaatggggatgataacagtattgacctcataaggtaatcaagatgctttaatgagataacatgtagaatatttaacacaatgtcttggcacagagtaaacactctgtacttataagcccttattcgtaagccctaataattgtttgactagatattatagttagggtctaggcttttaagaatacttaaagtatcttggatttggaa

SEQ ID NO: 14794 - DNA, 799 bp, Homo sapiens
ctggatgtgatgaaggagttgataactctggcaaaatgccatgagttcttgatatttgaagaccggaagtttgcagatataggaaacacagtgaaaaagcagtatgaaggaggtatctttaaaatagcttcctgggcagatctagtaaatgctcacgtggtgccaggctcaggagttgtgaaaggcctgcaagaagtgggcctgcctttgcatcgggggtgcctccttattgcggaaatgagctccaccggctccctggccactggggactacactagagcagcggttagaatggctgaggagcactctgaatttgttgttggttttatttctggctcccgagtaagcatgaaaccagaatttcttcacttgactccaggagttcagttggaagcaggaggtaaatctggtcactggtcgtggctcttccaaaaatgcttctttacccatggcaggcaaaataaaactttgcatattattatacacttgcttaagaaaagccttcttagtctagaacaataatgaatgagccctttggtaactatgtatctttggacaagtcagtttacttcttttagtctaattgtctgtaaaatggggatgataacagtattgacctcataaggtaatcaagatgctttaatgagataacatgtagaatatttaacacaatgtcttggcacagagtaaacactctgtacttataagcccttattcgtaagccctaataattgtttgactagatattatagttagggtctaggcttttaagaatacttaaagtatcttggatttggaa

SEQ ID NO: 14795 - DNA, 5446 bp, Homo sapiens
gaagaagggtatgtgcctgggcaagcaaatttgacagatgtccttggcagaatatgatgttttgaatgaaaattccacataaaggaaacaatgaaaaagaaatataaaatggtaagatttatttgtagcagaaaaagttctattgataaacattatttaaagatttttcttttatcaaatagggactcaaagtagtgcatgtgttggttgagaaaaatgcttagttctactgcctattctatgcaaatttctgtctatgtttttacaactgtgtgatcagactatatttaatgcatttttcacttaacctggtaacagatatttggttgtgtcatataacattttttgtaggcatctttgaggtaacttttctttaatgtatgcatgttcataagctatttctttaaaatagatttgtctttaagtgacttcttcatgtgcttaagatgtcctgccctcatcacattgcctagcttactttagctgattgactgacataagagttttatacaaactttcttcagctctgcatagagttttttcgaaaatcaggcttgttactgtccgcttttaaaaggaatatagttgcctattgaaattagatagctaaggagatctaaggaacacgtagaaatattgagcgatagtaaagctgctgagagacccctgcagagtgaaaacttgtcatcttcaagaagaattttatttttattattattttttttgagatggggtcttgctctgtcgcccaggctggagtgcagtggtgcaatcttgactcactgcaacctccacctcctgggctcaagtgatcctcccacctcagcctcccaagtagctgggaccacaggcatgcgccaccacacctagctaatttttttgtatttttggtagagatggagttttgccatgttgcccaggctggtctcgaactcctaaactcaagcaatctgcccacctcagcctcccaaagtactgggattacaagcatgagccaccatgcccagcttcaagaggaatttttaaatgttatccttgacatcaataaatgtttatcttcactggagtccctttctaatagcatgagctttatttgtggtcatgagcttcagccttcaaggaaaaagagtcctgttagtgttccagataagccaagtgcagaccttgaaagttttttctcattgtgatctctcacccagctacttacctgaataacagatacagttttcacagatggaaccatgggtctgctgataatcactaaagttcctgaagagttttgattctctcattaacatgttactgggagattatttcatattgtagttggttggttggacaagacgttagaggttttgtttgaaaatcagcaaatatcttttttcccccttcttcttaggaggtatctttaaaatagcttcctgggcagatctagtaaatgctcacgtggtgccaggctcaggagttgtgaaaggcctgcaagaagtgggcctgcctttgcatcgggggtgcctccttattgcggaaatgagctccaccggctccctggccactggggactacactagagcagcggtaagtggtggggggactgggtgagagggggcaggggctgctatgctgcatgctgcaagaagatatctcctaatctggcgtttctggaacctctgccaaaaaaaaaatccagctcttgttagtgtgacagtatattaatactagttggatagaattccttgatagttaatagcattttatatcatgtagtggacacttcaggaatttgaattatactccaagagaaactttgagacccagatagttagtcaaacaaacacttactaaatctaccaggactttaagataatgtctttttcatcttaccatgaattgagagaagatgagaagagcttcccagacatgcagtttctcagaatctcccaagtcctacagagatgcacattcccatgacagcagcccacatgcagtggctttctcttattcttgtcagatattttagaatataatattactttaaaaaaattgccatagggggctgggcgcagttgctcacacctgtaatcctagcactttgggaggccaaggcgggaggattgcttgaggccaggagttggacgtcatagtgagatctcgtctctacaaaaaaatgaaaaagaaaataaccaggcatggtggtacgtgcctatagtcccagctgcttgggaggctgaggtgggaggatcgcttgagcttgaagttcaaggctgcagggagccatgatcatgccactttacctcagcctgggcaagagtaagagcctgtcaaaaaaaattaaaaataaaaagccccaagaaaatccccatgatttttttaaaaatgaaatccccaagacaatccccatgtgaagattctagaagtaaaggatttccattttttcatattatttcagactatttggagacttaactcatatggccctacagtcaggttttaaccctatccctgaattgactataactgtctgatttcccaagtctcaaaatcacaggggccatgagtcagttttaatatttggcattctgggagtctgggtctggctcaaggacaagacatgacttgtttgttggcagtagtacttggtggcaagaatgaatgtatcaatgtgtgtctcaggtctcgaagtaccgaggctggagtgcagtggtggtactgagtctggtctccgggaagtatcaaataagaagggaagtatgggagtcacgtctcggggaaagtacctaccgaatcagaaagccaggcagaccttctaaagagacttttatgaatgtgagataatagtatagaaattggggagaccagttgatgttacagaagagggaaagtggtagaggtgagatttctttagctcttgaaagcgtagctgttctttacatgacagctgcctttggatatggagtaccccgtctgtagatagtcagtaagccttgaatgtggtttcataccattataatatgttctagagtactcgcctcaaatcctttttggaagtaggtgggtcaccaagcattattagaaataagaaattatgcagcatcttgattttagatgcatatagtataggatttctgctttacgtatggtttattgcgggaagggaagggaaagggtcatctcagagtcttaatgaagcagatgtgttttattatggtttctatctaagatgacctgtttcagatatagtaactttatatatatggaatgagaaaaggcatctataatacagcaaagtttctaactagataatagagcataagccaggcatggtgacttacaactgtaaccccagcactttgggaggccaaggtaggaggatcccttgagcccaggggttcaagaccagccagggaacatagggagacctcatgtcttttttttttttttttaagttttgaaaaaatagagcatatttttacttttattctgtgtgattaactgttttcttataatatgtcctattacattccatttaggttagaatggctgaggagcactctgaatttgttgttggttttatttctggctcccgagtaagcatgaaaccagaatttcttcacttgactccaggagttcagttggaagcaggaggtaaatctggtcactggtcgtggctcttccaaaaatgcttctttacccatggcaggcaaaataaaactttgcatattattatacacttgcttaagaaaagccttcttagtctagaacaataatgaatgagccctttggtaactatgtatctttggacaagtcagtttacttcttttagtctaattgtctgtaaaatggggatgataacagtattgacctcataaggtaatcaagatgctttaatgagataacatgtagaatatttaacacaatgtcttggcacagagtaaacactctgtacttataagcccttattcgtaagccctaataattgtttgactagatattatagttagggtctaggcttttaagaatacttaaagtatcttggatttggaagataataagccatttaacagaatgcttctgaaacagcggaatttaataaaaaagcaaaatttaaggattcgggtttatggatagtctgtgtgaccacttgatggggttcttgtatatggtagtggtcaggttagacttgctcagcagtgccttgtggtgattctaagatgtgtgctaaaattttcttcaattgtgaggccaatctttattgtatttttttgatattgaacctttctttgcaacatatgagttttacttctttttttaatatattgttaagctacagatgatctaaaatttgacattgagggggtgaatatttagggcaacttgaatttatgcttctggaaaaaaattacatgaaaaaataatgataaaataaataaggctgggtgcgggggctcacgctcgtaatcccagcactttgtgaggccgaggtgggcagatcacctgaggtcaggagttcaagaccagcttggccgacatggtgaaaccctgtctctactcaaaatacaaaaattagccgggcgtggtggtgcacgcttttaatcccagctactcgggaggctgaggcaggagaatcgcttgaatccgggaggcgggggttgcagcgagctgagattgtgccattgcactccagcctgggtgacagagcaagactctgtctcaaaaaaataaataaataaatagggcggggcgcagtagctcatgcctgtaatcccagcactttgggaggctgaggcgggcggatcatgaggtcaggagatcgagaccatcctggctaacacggtgaaactccatctctactaaaaaatacaaaaaattagccaggcgtggtggcaggcgcctgtagtcccagctactcgggaggctgaggcaggagaatggcatgaacctgggaggcagagcttgcagtgagccgagatagcaccactgcactccagcctgggtgacagagcgagactccgtctcaaaaaaataaataaataaaaataaataaataaataaataaataaaataaactttaccattgaaaaggagttggtgatcatctttctccatttgacgtctctggcctacccagtgagtctcttcagctcctgtttttacgcagttgctgtacaaaaggggaacgaaagtaggggcatgtttttatttaaagctggttagatactttttcagagaagtcatgtgacaggttttctgatttttgtattatgtgaaacaacaatttttgtgtttcttgcaggagataatcttggccaacagtacaatagcccacaagaagttattggcaaacgaggttccgatatcatcattgtaggtcgtggcataatctcagcagctgatcgtctggaagcagcagagatgtacagaaaagctgcttgggaagcgtatttgagta

SEQ ID NO: 14796 - DNA, 558 bp, Homo sapiens
gaagaagggtatgtgcctgggcaagcaaatttgacagatgtccttggcagaatatgatgttttgaatgaaaattccacataaaggaaacaatgaaaaagaaatataaaatggaggtatctttaaaatagcttcctgggcagatctagtaaatgctcacgtggtgccaggctcaggagttgtgaaaggcctgcaagaagtgggcctgcctttgcatcgggggtgcctccttattgcggaaatgagctccaccggctccctggccactggggactacactagagcagcggttagaatggctgaggagcactctgaatttgttgttggttttatttctggctcccgagtaagcatgaaaccagaatttcttcacttgactccaggagttcagttggaagcaggaggagataatcttggccaacagtacaatagcccacaagaagttattggcaaacgaggttccgatatcatcattgtaggtcgtggcataatctcagcagctgatcgtctggaagcagcagagatgtacagaaaagctgcttgggaagcgtatttgagta

SEQ ID NO: 14797 - DNA, 14306 bp, Homo sapiens; identical to SEQ ID NO: 14783

SEQ ID NO: 14798 - DNA, 1691 bp, Homo sapiens
caaacaggcagcgcgcgacaatggcggtcgctcgtgcagctttggggccattggtgacgggtctgtacgacgtgcaggctttcaagtttggggacttcgtgctgaagagcgggctttcctcccccatctacatcgatctgcggggcatcgtgtctcgaccgcgtcttctgagtcaggaactaagcgtcttgtagaaggaactattaatccaggagaaacctgtttaatcattgaagatgttgtcaccagtggatctagtgttttggaaactgttgaggttcttcagaaggagggcttgaaggtcactgatgccatagtgctgttggacagagagcagggaggcaaggacaagttgcaggcgcacgggatccgcctccactcagtgtgtacattgtccaaaatgctggagattctcgagcagcagaaaaaagttgatgctgagacagttgggagagtgaagaggtttattcaggagaatgtctttgtggcagcgaatcataatggttctcccctttctataaaggaagcacccaaagaactcagcttcggtgcacgtgcagagctgcccaggatccacccagttgcatcgaagcttctcaggcttatgcaaaagaaggagaccaatctgtgtctatctgctgatgtttcactggccagagagctgttgcagctagcagatgctttaggacctagtatctgcatgctgaagactcatgtagatattttgaatgattttactctggatgtgatgaaggagttgataactctggcaaaatgccatgagttcttgatatttgaagaccggaagtttgcagatataggaaacacagtgaaaaagcagtatgaaggagataatcttggccaacagtacaatagcccacaagaagttattggcaaacgaggttccgatatcatcattgtaggtcgtggcataatctcagcagctgatcgtctggaagcagcagagatgtacagaaaagctgcttgggaagcgtatttgagtagacttggtgtttgagtgcttcagatacatttttcagatacaatgtgaagacattgaagatatgtggtcctcctgaaagtcactggctggaaataatccaattattcctgcttggattcttccacagggcctgtgtaagaatgggttctggagttctcatggtctttaggaaatattgagtaatttgtaatcaccgcattgatactataataagttcattcttaagcttgctttttttgagactggtgtttgttagacagccacagtcctgtctgggttagggtcttccacatttgaggatccttcctatctctccatgggactagactgctttgttattctatttattttttaatttttttcgagacaggatctcactctgttgcccaggatggagtgcagtggtgagatcacggctcattgcagcctcgacctcccaggtgatcctcccacctcagcttccagattagctggtgctataggcatgcaccaccacgtccatctaaatttctttattatttgtagagatgaggtcttgccatgttacccaggctggtctcaactcctgggctcaagcgatcctcctgcctcagtctctcaaagtgctgggattacaggtgtgagccactgtgcccagcctaattgcagtaagacaaaaattctagggcaccaagaggctaaagtcagc

SEQ ID NO: 14799 - DNA, 1177 bp, Homo sapiens
ggagttcaagaccagcctagacaacatagtgagacctcatctctatgataaaacagatttttttaaagtaaaaaaaaaacctctctatttgaaaatttgatcataaaacacattaagcagtgtttataatgtgaaataatttacttgatttactataaatatactgtatgtgtaactggcaagtttggtatacagagttggctttatacataaatatactgtatgtgcaactagcaagtttggtatacagaattggtatacacatatactgtatgtgtaactggcaagttttgtatacagagtgtgtgtacgtatatacgcacatatacatacatatttaaatttggaatcagcaaaattttttcttttctaggaactaagcgtcttgtagaaggaactattaatccaggagaaacctgtttaatcattgaagatgttgtcaccagtggatctagtgttttggaaactgttgaggttcttcagaaggagggcttgaaggtcactgatgccatagtgctgttggacagagagcagggaggcaaggacaagttgcaggcgcacgggatccgcctccactcagtgtgtacattgtccaaaatgctggagattctcgagcagcagaaaaaagttgatgctgagacagttgggagagtgaagaggtttattcaggagaatgtctttgtggcagcgaatcataatggttctcccctttctataaaggaagcacccaaagaactcagcttcggtgcacgtgcagagctgcccaggatccacccagttgcatcgaagcttctcaggcttatgcaaaagaaggagaccaatctgtgtctatctgctgatgtttcactggccagagagctgttgcagctagcagatgctttaggacctagtatctgcatgctgaagactcatgtagatattttgaatgattttactctggatgtgatgaaggagttgataactctggcaaaatgccatgagttcttgatatttgaagaccggaagtttgcagatataggaaacacagtgaaaaagcagtatgaaggtaagtgtattattcaggaatctgcaagaatcagaaatccagcttaaactgaagaagaaaaaggaaatgctcatgtcattgaaagtccattcatagagcaggctgtcaagcgtggttggatccaggagctca

SEQ ID NO: 14800 - DNA, 832 bp, Homo sapiens
ggagttcaagaccagcctagacaacatagaactaagcgtcttgtagaaggaactattaatccaggagaaacctgtttaatcattgaagatgttgtcaccagtggatctagtgttttggaaactgttgaggttcttcagaaggagggcttgaaggtcactgatgccatagtgctgttggacagagagcagggaggcaaggacaagttgcaggcgcacgggatccgcctccactcagtgtgtacattgtccaaaatgctggagattctcgagcagcagaaaaaagttgatgctgagacagttgggagagtgaagaggtttattcaggagaatgtctttgtggcagcgaatcataatggttctcccctttctataaaggaagcacccaaagaactcagcttcggtgcacgtgcagagctgcccaggatccacccagttgcatcgaagcttctcaggcttatgcaaaagaaggagaccaatctgtgtctatctgctgatgtttcactggccagagagctgttgcagctagcagatgctttaggacctagtatctgcatgctgaagactcatgtagatattttgaatgattttactctggatgtgatgaaggagttgataactctggcaaaatgccatgagttcttgatatttgaagaccggaagtttgcagatataggaaacacagtgaaaaagcagtatgaaggtaagtgtattattcaggaatctgcaagaatcagaaatccagcttaaactgaagaagaaaaaggaaatgctcatgtcattgaaagtccattcatagagcaggctgtcaagcgtggttggatccaggagctca

SEQ ID NO: 14801 - DNA, 1106 bp, Homo sapiens
tttgaagcaaacaggcagcgcgcgacaatggcggtcgctcgtgcagctttggggccattggtgacgggtctgtacgacgtgcaggctttcaagtttggggacttcgtgctgaagagcgggctttcctcccccatctacatcgatctgcggggcatcgtgtctcgaccgcgtcttctgagtcaggtgctggcctaggaagggaaaggacagggcttggtggcgggaaggaggacaaggaaatggaagagggtgacaggagttgggccgtgagtgagagcaaaagagccaagcaggcagaccgaccctactcttggtttggggagtaagcatgagaagcacagaggccaggggttgggctcctcgagagtcgtctgttctttcacccacacgcttagacacgtgttttgcaaaagtcgggaaacccagtttggaacgctttctggcactgaagcacacttgaatgaattctgtatatttaactctttaagaaaattagacttgcggccgggcgtggtgcctcatgagagtaataccagcactttgggatgcctaagtgggcagatcacctgagccccaggagttcgagaccagcctgggcaacatgacgagaccccgtctctacaaaaaattagctgggtgtggtggcgcacgcctgggacgctgaggtgggaggatcacctgagcctgggaggtcaaggctgcaatgagctgtcattgcgccactgcactccagcctgggcgacaagtgagaccctgccctcaaaaaacaaacaaatagaccgggaaaacgtgggtaggcagagaattcagtagctgggaaattactggtgagaaaaggaaaatagaacaaccagaactctgtgatgtatacaaaatttatcagagcccagagagacttcaaccatactcccctatgcagccccgggacaattatttaaaggaattttgtccctgactagctgcctctcccattatcttaatgtacctggaatgtgtgatacaaagaacaatgtatagctaatcaatcgcttgtgttattattttatttatttattttttagatgggatctctcttacgtcacccaggctggagtgcagctctgtga

SEQ ID NO: 14802 - DNA, 228 bp, Homo sapiens
tttgaagcaaacaggcagcgcgcgacaatggcggtcgctcgtgcagctttggggccattggtgacgggtctgtacgacgtgcaggctttcaagtttggggacttcgtgctgaagagcgggctttcctcccccatctacatcgatctgcggggcatcgtgtctcgaccgcgtcttctgagtcagatgggatctctcttacgtcacccaggctggagtgcagctctgtga

SEQ ID NO: 14803 - DNA, 3322 bp, Homo sapiens
agacagctgaccatggaagcgaatgggttggggtgagttctccagagcacgcggtgtggctagccgggcttctaatttgagtcttccaactcaggactctatccctctactcccctttccccaccctggagacctcccaacctgaactccgttagctgggatcctgaatcctaaaaccatggatttttgagatgttcatcccagggccttaattcaagggatgcctcaggatttccaaccaggatctctattctgggaccatcaactctgatccctctttatcccccagcctgggtatttctcagcccctgaaccagcccagtgacattcccgtttctgaggctcactagttcgaagacccccaaactatccttagtgggccttcattccctccccccagtccctctggttgcttcgagcttggaagagtagagactaagtggagggaagaggccccagggcgggcccttctggagtttgtgcaccacctgataggcagagaggaggcggaacgggcggaaagccagggtttgggagctggcctggaggaggtagatagcggtcctggactgaatcggccttatgaacccgcgctttccccagcctccagcgtagcatactgacacctacccccacccccacctgatcgccagacctcagggttttccggagctgaagaatgacacattcctgcgagcagcctggggagaggaaacagactacactcccgtttggtgcatgcgccaggcaggccgttacttaccaggtaagagtcagggtctggaaatctagataaaactccggagggagaaaagttttcgaggggcaggggagggctctggagggcctcaaggctgagccctgtcttccctctgtatgcagagtttagggaaacccgggctgcccaggactttttcagcacgtgtcgctctcctgaggcctgctgtgaactgactctgcaggtgaggggtccacaaaagagggaaagatttatgccttcagtctgccacctagcaacctgtctcctgtttcctacagccactgcgtcgcttccctctggatgctgccatcattttctccgacatccttgttgtaccccaggtacccactcaaacctgatcctagaatataatccaaggacgccttgaaaatccttctatcagtccagtcaaggtttacaataagcacttatcctaactggatcgagggaaaaactaaggttgaaagaaatggagtttggcagagttttattctccttttccttcctcctggaatgagctgaacagaacctttcctcctggattccattttgggaacccagatgttttctccccctccaggcactgggcatggaggtgaccatggtacctggcaaaggacccagcttcccagagccattaagagaagagcaggacctagaacgcctacgggatccagaagtggtagcctctgagctaggctatgtgttccaagccatcacccttacccgacaacgactggctggacgtgtgccgctgattggctttgctggtgccccagtaatgtgggacagggcagggactcggggcgcggggagatcactctggaaggtctggggtagacaaaaggaagggtcagtctggcttctgtgacaccatctttctatccttctctagtggaccctgatgacatacatggttgagggtggtggctcaagcaccatggctcaggccaagcgctggctctatcagagacctcaggctagtcaccagctgcttcgcatcctcactgatgctctggtcccatatctggtaggacaagtggtggctggtgcccaggtgagtcctgagagagagagaaataggctgggatttggtctgtaaggaccagaagcaagagtgtcctaaacctgagagggcaggggtcttaatgccagggatgaaagaaccttggcctccagtgatctagcggagcagccaagcccatcctgacactgacagtggggcttaatgctctaagtattcagacaccaaagttagtgctgggatctgaggaaagtaaatttttttttttttaattactgggtttttagggtcaggcagtatcagggattgaagtcatttggggaaaattgaggtggattttgtatgtgggggaaacttcctctttgtgtgttacatatttttcttcaccataccctaactaggcattgcagctgtttgagtcccatgcagggcatcttggcccacagctcttcaacaagtttgcactgccttacatccgtgatgtggccaagcaagtgaaggccaggttgcgggaggcaggcctggcaccagtgcccatggtgaggattgggatgggttgagtgaaggtggtcctgtggagctttcaggctaagtcctgcatggactggagtgaccactggagggcagcagaagtacagtcaagaaagattagtggttgtagcaaggccctctgtagcctgagatctgcttttttctagatcatctttgctaaggatgggcattttgccctggaggagctggcccaagctggctatgaggtggttgggcttgactggacagtggccccaaagaaagcccggtaagccatggaagggtgaggccttgaggttgaggtgggggtgttggctgggggagctgccatgtatgcagttaccagaacgtggcgctggctttgcttccagggagtgtgtggggaagacggtgacattgcagggcaacctggacccctgtgccttgtatgcatctgaggtaacagccagggcccctctgtgtgtctgttactgtgcactcctgtggctgtggctgtattattctgtgtgcacttgtttttaatgtctgtctgtccttttcttctactctgtacaacataagccctagaaagaccggactttttgttgctgttgttcatttgtgtttatgcttcatgcctgggtccatactagggatctgataaattttattgaatgactgaataacactgagtagaagcatgcctacatatgcgtttgtcactagtatatatagggaggacaaaggcttgctggtcctcctgtagccagtgccctgttggtcccccaggaggagatcgggcagttggtgaagcagatgctggatgactttggaccacatcgctacattgccaacctgggccatgggctttatcctgacatggacccagaacatgtgggcgcctttgtggatgctgtgcataaacactcacgtctgcttcgacagaactgagtgtatacctttaccctcaagtaccactaacacagatgattgatcgtttccaggacaataaaagtttcggagttgaa

SEQ ID NO: 14804 - DNA, 1193 bp, Homo sapiens
agacagctgaccatggaagcgaatgggttgggacctcagggttttccggagctgaagaatgacacattcctgcgagcagcctggggagaggaaacagactacactcccgtttggtgcatgcgccaggcaggccgttacttaccagagtttagggaaacccgggctgcccaggactttttcagcacgtgtcgctctcctgaggcctgctgtgaactgactctgcagccactgcgtcgcttccctctggatgctgccatcattttctccgacatccttgttgtaccccaggcactgggcatggaggtgaccatggtacctggcaaaggacccagcttcccagagccattaagagaagagcaggacctagaacgcctacgggatccagaagtggtagcctctgagctaggctatgtgttccaagccatcacccttacccgacaacgactggctggacgtgtgccgctgattggctttgctggtgccccatggaccctgatgacatacatggttgagggtggtggctcaagcaccatggctcaggccaagcgctggctctatcagagacctcaggctagtcaccagctgcttcgcatcctcactgatgctctggtcccatatctggtaggacaagtggtggctggtgcccaggcattgcagctgtttgagtcccatgcagggcatcttggcccacagctcttcaacaagtttgcactgccttacatccgtgatgtggccaagcaagtgaaggccaggttgcgggaggcaggcctggcaccagtgcccatgatcatctttgctaaggatgggcattttgccctggaggagctggcccaagctggctatgaggtggttgggcttgactggacagtggccccaaagaaagcccgggagtgtgtggggaagacggtgacattgcagggcaacctggacccctgtgccttgtatgcatctgaggaggagatcgggcagttggtgaagcagatgctggatgactttggaccacatcgctacattgccaacctgggccatgggctttatcctgacatggacccagaacatgtgggcgcctttgtggatgctgtgcataaacactcacgtctgcttcgacagaactgagtgtatacctttaccctcaagtaccactaacacagatgattgatcgtttccaggacaataaaagtttcggagttgaa

SEQ ID NO: 14805 - DNA, 1919 bp, Homo sapiens
acctcagggttttccggagctgaagaatgacacattcctgcgagcagcctggggagaggaaacagactacactcccgtttggtgcatgcgccaggcaggccgttacttaccaggtaagagtcagggtctggaaatctagataaaactccggagggagaaaagttttcgaggggcaggggagggctctggagggcctcaaggctgagccctgtcttccctctgtatgcagagtttagggaaacccgggctgcccaggactttttcagcacgtgtcgctctcctgaggcctgctgtgaactgactctgcaggtgaggggtccacaaaagagggaaagatttatgccttcagtctgccacctagcaacctgtctcctgtttcctacagccactgcgtcgcttccctctggatgctgccatcattttctccgacatccttgttgtaccccaggtacccactcaaacctgatcctagaatataatccaaggacgccttgaaaatccttctatcagtccagtcaaggtttacaataagcacttatcctaactggatcgagggaaaaactaaggttgaaagaaatggagtttggcagagttttattctccttttccttcctcctggaatgagctgaacagaacctttcctcctggattccattttgggaacccagatgttttctccccctccaggcactgggcatggaggtgaccatggtacctggcaaaggacccagcttcccagagccattaagagaagagcaggacctagaacgcctacgggatccagaagtggtagcctctgagctaggctatgtgttccaagccatcacccttacccgacaacgactggctggacgtgtgccgctgattggctttgctggtgccccagtaatgtgggacagggcagggactcggggcgcggggagatcactctggaaggtctggggtagacaaaaggaagggtcagtctggcttctgtgacaccatctttctatccttctctagtggaccctgatgacatacatggttgagggtggtggctcaagcaccatggctcaggccaagcgctggctctatcagagacctcaggctagtcaccagctgcttcgcatcctcactgatgctctggtcccatatctggtaggacaagtggtggctggtgcccaggtgagtcctgagagagagagaaataggctgggatttggtctgtaaggaccagaagcaagagtgtcctaaacctgagagggcaggggtcttaatgccagggatgaaagaaccttggcctccagtgatctagcggagcagccaagcccatcctgacactgacagtggggcttaatgctctaagtattcagacaccaaagttagtgctgggatctgaggaaagtaaatttttttttttttaattactgggtttttagggtcaggcagtatcagggattgaagtcatttggggaaaattgaggtggattttgtatgtgggggaaacttcctctttgtgtgttacatatttttcttcaccataccctaactaggcattgcagctgtttgagtcccatgcagggcatcttggcccacagctcttcaacaagtttgcactgccttacatccgtgatgtggccaagcaagtgaaggccaggttgcgggaggcaggcctggcaccagtgcccatggtgaggattgggatgggttgagtgaaggtggtcctgtggagctttcaggctaagtcctgcatggactggagtgaccactggagggcagcagaagtacagtcaagaaagattagtggttgtagcaaggccctctgtagcctgagatctgcttttttctagatcatctttgctaaggatgggcattttgccctggaggagctggcccaagctggctatgaggtggttgggcttgactggacagtggcccca

SEQ ID NO: 14806 - DNA, 682 bp, Homo sapiens
acctcagggttttccggagctgaagaatgacacattcctgcgagcagcctggggagaggaaacagactacactcccgtttggtgcatgcgccaggcaggccgttacttaccagagtttagggaaacccgggctgcccaggactttttcagcacgtgtcgctctcctgaggcctgctgtgaactgactctgcagccactgcgtcgcttccctctggatgctgccatcattttctccgacatccttgttgtaccccaggcactgggcatggaggtgaccatggtacctggcaaaggacccagcttcccagagccattaagagaagagcaggacctagaacgcctacgggatccagaagtggtagcctctgagctaggctatgtgttccaagccatcacccttacccgacaacgactggctggacgtgtgccgctgattggctttgctggtgccccagcattgcagctgtttgagtcccatgcagggcatcttggcccacagctcttcaacaagtttgcactgccttacatccgtgatgtggccaagcaagtgaaggccaggttgcgggaggcaggcctggcaccagtgcccatgatcatctttgctaaggatgggcattttgccctggaggagctggcccaagctggctatgaggtggttgggcttgactggacagtggcccca

SEQ ID NO: 14807 - DNA, 2321 bp, Homo sapiens
agacagctgaccatggaagcgaatgggttggggtgagttctccagagcacgcggtgtggctagccgggcttctaatttgagtcttccaactcaggactctatccctctactcccctttccccaccctggagacctcccaacctgaactccgttagctgggatcctgaatcctaaaaccatggatttttgagatgttcatcccagggccttaattcaagggatgcctcaggatttccaaccaggatctctattctgggaccatcaactctgatccctctttatcccccagcctgggtatttctcagcccctgaaccagcccagtgacattcccgtttctgaggctcactagttcgaagacccccaaactatccttagtgggccttcattccctccccccagtccctctggttgcttcgagcttggaagagtagagactaagtggagggaagaggccccagggcgggcccttctggagtttgtgcaccacctgataggcagagaggaggcggaacgggcggaaagccagggtttgggagctggcctggaggaggtagatagcggtcctggactgaatcggccttatgaacccgcgctttccccagcctccagcgtagcatactgacacctacccccacccccacctgatcgccagacctcagggttttccggagctgaagaatgacacattcctgcgagcagcctggggagaggaaacagactacactcccgtttggtgcatgcgccaggcaggccgttacttaccaggtaagagtcagggtctggaaatctagataaaactccggagggagaaaagttttcgaggggcaggggagggctctggagggcctcaaggctgagccctgtcttccctctgtatgcagagtttagggaaacccgggctgcccaggactttttcagcacgtgtcgctctcctgaggcctgctgtgaactgactctgcaggtgaggggtccacaaaagagggaaagatttatgccttcagtctgccacctagcaacctgtctcctgtttcctacagccactgcgtcgcttccctctggatgctgccatcattttctccgacatccttgttgtaccccaggtacccactcaaacctgatcctagaatataatccaaggacgccttgaaaatccttctatcagtccagtcaaggtttacaataagcacttatcctaactggatcgagggaaaaactaaggttgaaagaaatggagtttggcagagttttattctccttttccttcctcctggaatgagctgaacagaacctttcctcctggattccattttgggaacccagatgttttctccccctccaggcactgggcatggaggtgaccatggtacctggcaaaggacccagcttcccagagccattaagagaagagcaggacctagaacgcctacgggatccagaagtggtagcctctgagctaggctatgtgttccaagccatcacccttacccgacaacgactggctggacgtgtgccgctgattggctttgctggtgccccagtaatgtgggacagggcagggactcggggcgcggggagatcactctggaaggtctggggtagacaaaaggaagggtcagtctggcttctgtgacaccatctttctatccttctctagtggaccctgatgacatacatggttgagggtggtggctcaagcaccatggctcaggccaagcgctggctctatcagagacctcaggctagtcaccagctgcttcgcatcctcactgatgctctggtcccatatctggtaggacaagtggtggctggtgcccaggtgagtcctgagagagagagaaataggctgggatttggtctgtaaggaccagaagcaagagtgtcctaaacctgagagggcaggggtcttaatgccagggatgaaagaaccttggcctccagtgatctagcggagcagccaagcccatcctgacactgacagtggggcttaatgctctaagtattcagacaccaaagttagtgctgggatctgaggaaagtaaatttttttttttttaattactgggtttttagggtcaggcagtatcagggattgaagtcatttggggaaaattgaggtggattttgtatgtgggggaaacttcctctttgtgtgttacatatttttcttcaccataccctaactaggcattgcagctgtttgagtcccatgcagggcatcttggcccacagctcttcaacaagtttgcactgccttacatccgtgatgtggccaagcaagtgaaggccaggttgcgggaggcaggcctggcaccagtgccca

SEQ ID NO: 14808 - DNA, 838 bp, Homo sapiens
agacagctgaccatggaagcgaatgggttgggacctcagggttttccggagctgaagaatgacacattcctgcgagcagcctggggagaggaaacagactacactcccgtttggtgcatgcgccaggcaggccgttacttaccagagtttagggaaacccgggctgcccaggactttttcagcacgtgtcgctctcctgaggcctgctgtgaactgactctgcagccactgcgtcgcttccctctggatgctgccatcattttctccgacatccttgttgtaccccagaacctttcctcctggattccattttgggaacccagatgttttctccccctccaggcactgggcatggaggtgaccatggtacctggcaaaggacccagcttcccagagccattaagagaagagcaggacctagaacgcctacgggatccagaagtggtagcctctgagctaggctatgtgttccaagccatcacccttacccgacaacgactggctggacgtgtgccgctgattggctttgctggtgccccatggaccctgatgacatacatggttgagggtggtggctcaagcaccatggctcaggccaagcgctggctctatcagagacctcaggctagtcaccagctgcttcgcatcctcactgatgctctggtcccatatctggtaggacaagtggtggctggtgcccaggcattgcagctgtttgagtcccatgcagggcatcttggcccacagctcttcaacaagtttgcactgccttacatccgtgatgtggccaagcaagtgaaggccaggttgcgggaggcaggcctggcaccagtgccca

SEQ ID NO: 14809 - DNA, 1813 bp, Homo sapiens
agctgaccatggaagcgaatgggttggggtgagttctccagagcacgcggtgtggctagccgggcttctaatttgagtcttccaactcaggactctatccctctactcccctttccccaccctggagacctcccaacctgaactccgttagctgggatcctgaatcctaaaaccatggatttttgagatgttcatcccagggccttaattcaagggatgcctcaggatttccaaccaggatctctattctgggaccatcaactctgatccctctttatcccccagcctgggtatttctcagcccctgaaccagcccagtgacattcccgtttctgaggctcactagttcgaagacccccaaactatccttagtgggccttcattccctccccccagtccctctggttgcttcgagcttggaagagtagagactaagtggagggaagaggccccagggcgggcccttctggagtttgtgcaccacctgataggcagagaggaggcggaacgggcggaaagccagggtttgggagctggcctggaggaggtagatagcggtcctggactgaatcggccttatgaacccgcgctttccccagcctccagcgtagcatactgacacctacccccacccccacctgatcgccagacctcagggttttccggagctgaagaatgacacattcctgcgagcagcctggggagaggaaacagactacactcccgtttggtgcatgcgccaggcaggccgttacttaccaggtaagagtcagggtctggaaatctagataaaactccggagggagaaaagttttcgaggggcaggggagggctctggagggcctcaaggctgagccctgtcttccctctgtatgcagagtttagggaaacccgggctgcccaggactttttcagcacgtgtcgctctcctgaggcctgctgtgaactgactctgcaggtgaggggtccacaaaagagggaaagatttatgccttcagtctgccacctagcaacctgtctcctgtttcctacagccactgcgtcgcttccctctggatgctgccatcattttctccgacatccttgttgtaccccaggtacccactcaaacctgatcctagaatataatccaaggacgccttgaaaatccttctatcagtccagtcaaggtttacaataagcacttatcctaactggatcgagggaaaaactaaggttgaaagaaatggagtttggcagagttttattctccttttccttcctcctggaatgagctgaacagaacctttcctcctggattccattttgggaacccagatgttttctccccctccaggcactgggcatggaggtgaccatggtacctggcaaaggacccagcttcccagagccattaagagaagagcaggacctagaacgcctacgggatccagaagtggtagcctctgagctaggctatgtgttccaagccatcacccttacccgacaacgactggctggacgtgtgccgctgattggctttgctggtgccccagtaatgtgggacagggcagggactcggggcgcggggagatcactctggaaggtctggggtagacaaaaggaagggtcagtctggcttctgtgacaccatctttctatccttctctagtggaccctgatgacatacatggttgagggtggtggctcaagcaccatggctcaggccaagcgctggctctatcagagacctcaggctagtcaccagctgcttcgcatcctcactgatgctctggtcccatatctggtaggacaagtggtggctggtgcccag

SEQ ID NO: 14810 - DNA, 663 bp, Homo sapiens
agctgaccatggaagcgaatgggttgggacctcagggttttccggagctgaagaatgacacattcctgcgagcagcctggggagaggaaacagactacactcccgtttggtgcatgcgccaggcaggccgttacttaccagagtttagggaaacccgggctgcccaggactttttcagcacgtgtcgctctcctgaggcctgctgtgaactgactctgcagccactgcgtcgcttccctctggatgctgccatcattttctccgacatccttgttgtaccccagatgttttctccccctccaggcactgggcatggaggtgaccatggtacctggcaaaggacccagcttcccagagccattaagagaagagcaggacctagaacgcctacgggatccagaagtggtagcctctgagctaggctatgtgttccaagccatcacccttacccgacaacgactggctggacgtgtgccgctgattggctttgctggtgccccatggaccctgatgacatacatggttgagggtggtggctcaagcaccatggctcaggccaagcgctggctctatcagagacctcaggctagtcaccagctgcttcgcatcctcactgatgctctggtcccatatctggtaggacaagtggtggctggtgcccag

SEQ ID NO: 14811 - DNA, 1853 bp, Homo sapiens
ggaagcgaatgggttggggtgagttctccagagcacgcggtgtggctagccgggcttctaatttgagtcttccaactcaggactctatccctctactcccctttccccaccctggagacctcccaacctgaactccgttagctgggatcctgaatcctaaaaccatggatttttgagatgttcatcccagggccttaattcaagggatgcctcaggatttccaaccaggatctctattctgggaccatcaactctgatccctctttatcccccagcctgggtatttctcagcccctgaaccagcccagtgacattcccgtttctgaggctcactagttcgaagacccccaaactatccttagtgggccttcattccctccccccagtccctctggttgcttcgagcttggaagagtagagactaagtggagggaagaggccccagggcgggcccttctggagtttgtgcaccacctgataggcagagaggaggcggaacgggcggaaagccagggtttgggagctggcctggaggaggtagatagcggtcctggactgaatcggccttatgaacccgcgctttccccagcctccagcgtagcatactgacacctacccccacccccacctgatcgccagacctcagggttttccggagctgaagaatgacacattcctgcgagcagcctggggagaggaaacagactacactcccgtttggtgcatgcgccaggcaggccgttacttaccaggtaagagtcagggtctggaaatctagataaaactccggagggagaaaagttttcgaggggcaggggagggctctggagggcctcaaggctgagccctgtcttccctctgtatgcagagtttagggaaacccgggctgcccaggactttttcagcacgtgtcgctctcctgaggcctgctgtgaactgactctgcaggtgaggggtccacaaaagagggaaagatttatgccttcagtctgccacctagcaacctgtctcctgtttcctacagccactgcgtcgcttccctctggatgctgccatcattttctccgacatccttgttgtaccccaggtacccactcaaacctgatcctagaatataatccaaggacgccttgaaaatccttctatcagtccagtcaaggtttacaataagcacttatcctaactggatcgagggaaaaactaaggttgaaagaaatggagtttggcagagttttattctccttttccttcctcctggaatgagctgaacagaacctttcctcctggattccattttgggaacccagatgttttctccccctccaggcactgggcatggaggtgaccatggtacctggcaaaggacccagcttcccagagccattaagagaagagcaggacctagaacgcctacgggatccagaagtggtagcctctgagctaggctatgtgttccaagccatcacccttacccgacaacgactggctggacgtgtgccgctgattggctttgctggtgccccagtaatgtgggacagggcagggactcggggcgcggggagatcactctggaaggtctggggtagacaaaaggaagggtcagtctggcttctgtgacaccatctttctatccttctctagtggaccctgatgacatacatggttgagggtggtggctcaagcaccatggctcaggccaagcgctggctctatcagagacctcaggctagtcaccagctgcttcgcatcctcactgatgctctggtcccatatctggtaggacaagtggtggctggtgcccaggtgagtcctgagagagagagaaataggctgggatttggtctgtaaggacc

SEQ ID NO: 14812 - DNA, 820 bp, Homo sapiens
ggaagcgaatgggttgggacctcagggttttccggagctgaagaatgacacattcctgcgagcagcctggggagaggaaacagactacactcccgtttggtgcatgcgccaggcaggccgttacttaccagagtttagggaaacccgggctgcccaggactttttcagcacgtgtcgctctcctgaggcctgctgtgaactgactctgcagccactgcgtcgcttccctctggatgctgccatcattttctccgacatccttgttgtaccccagatgttttctccccctccaggcactgggcatggaggtgaccatggtacctggcaaaggacccagcttcccagagccattaagagaagagcaggacctagaacgcctacgggatccagaagtggtagcctctgagctaggctatgtgttccaagccatcacccttacccgacaacgactggctggacgtgtgccgctgattggctttgctggtgccccagtaatgtgggacagggcagggactcggggcgcggggagatcactctggaaggtctggggtagacaaaaggaagggtcagtctggcttctgtgacaccatctttctatccttctctagtggaccctgatgacatacatggttgagggtggtggctcaagcaccatggctcaggccaagcgctggctctatcagagacctcaggctagtcaccagctgcttcgcatcctcactgatgctctggtcccatatctggtaggacaagtggtggctggtgcccaggtgagtcctgagagagagagaaataggctgggatttggtctgtaaggacc

SEQ ID NO: 14813 - DNA, 1249 bp, Homo sapiens
ggctcagattcaggttaaattgtggattgagctcgcagttacagacagctgaccatggaagcgaatgggttggggtgagttctccagagcacgcggtgtggctagccgggcttctaatttgagtcttccaactcaggactctatccctctactcccctttccccaccctggagacctcccaacctgaactccgttagctgggatcctgaatcctaaaaccatggatttttgagatgttcatcccagggccttaattcaagggatgcctcaggatttccaaccaggatctctattctgggaccatcaactctgatccctctttatcccccagcctgggtatttctcagcccctgaaccagcccagtgacattcccgtttctgaggctcactagttcgaagacccccaaactatccttagtgggccttcattccctccccccagtccctctggttgcttcgagcttggaagagtagagactaagtggagggaagaggccccagggcgggcccttctggagtttgtgcaccacctgataggcagagaggaggcggaacgggcggaaagccagggtttgggagctggcctggaggaggtagatagcggtcctggactgaatcggccttatgaacccgcgctttccccagcctccagcgtagcatactgacacctacccccacccccacctgatcgccagacctcagggttttccggagctgaagaatgacacattcctgcgagcagcctggggagaggaaacagactacactcccgtttggtgcatgcgccaggcaggccgttacttaccaggtaagagtcagggtctggaaatctagataaaactccggagggagaaaagttttcgaggggcaggggagggctctggagggcctcaaggctgagccctgtcttccctctgtatgcagagtttagggaaacccgggctgcccaggactttttcagcacgtgtcgctctcctgaggcctgctgtgaactgactctgcaggtgaggggtccacaaaagagggaaagatttatgccttcagtctgccacctagcaacctgtctcctgtttcctacagccactgcgtcgcttccctctggatgctgccatcattttctccgacatccttgttgtaccccaggtacccactcaaacctgatcctagaatataatccaaggacgccttgaaaatccttctatcagtccagtcaaggtttacaataagcacttatcctaactggatcgag

SEQ ID NO: 14814 - DNA, 486 bp, Homo sapiens
ggctcagattcaggttaaattgtggattgagctcgcagttacagacagctgaccatggaagcgaatgggttgggcctccagcgtagcatactgacacctacccccacccccacctgatcgccagacctcagggttttccggagctgaagaatgacacattcctgcgagcagcctggggagaggaaacagactacactcccgtttggtgcatgcgccaggcaggccgttacttaccagagtttagggaaacccgggctgcccaggactttttcagcacgtgtcgctctcctgaggcctgctgtgaactgactctgcagccactgcgtcgcttccctctggatgctgccatcattttctccgacatccttgttgtaccccaggtacccactcaaacctgatcctagaatataatccaaggacgccttgaaaatccttctatcagtccagtcaaggtttacaataagcacttatcctaactggatcgag

SEQ ID NO: 14815 - DNA, 2312 bp, Homo sapiens
catggaagcgaatgggttggggtgagttctccagagcacgcggtgtggctagccgggcttctaatttgagtcttccaactcaggactctatccctctactcccctttccccaccctggagacctcccaacctgaactccgttagctgggatcctgaatcctaaaaccatggatttttgagatgttcatcccagggccttaattcaagggatgcctcaggatttccaaccaggatctctattctgggaccatcaactctgatccctctttatcccccagcctgggtatttctcagcccctgaaccagcccagtgacattcccgtttctgaggctcactagttcgaagacccccaaactatccttagtgggccttcattccctccccccagtccctctggttgcttcgagcttggaagagtagagactaagtggagggaagaggccccagggcgggcccttctggagtttgtgcaccacctgataggcagagaggaggcggaacgggcggaaagccagggtttgggagctggcctggaggaggtagatagcggtcctggactgaatcggccttatgaacccgcgctttccccagcctccagcgtagcatactgacacctacccccacccccacctgatcgccagacctcagggttttccggagctgaagaatgacacattcctgcgagcagcctggggagaggaaacagactacactcccgtttggtgcatgcgccaggcaggccgttacttaccaggtaagagtcagggtctggaaatctagataaaactccggagggagaaaagttttcgaggggcaggggagggctctggagggcctcaaggctgagccctgtcttccctctgtatgcagagtttagggaaacccgggctgcccaggactttttcagcacgtgtcgctctcctgaggcctgctgtgaactgactctgcaggtgaggggtccacaaaagagggaaagatttatgccttcagtctgccacctagcaacctgtctcctgtttcctacagccactgcgtcgcttccctctggatgctgccatcattttctccgacatccttgttgtaccccaggtacccactcaaacctgatcctagaatataatccaaggacgccttgaaaatccttctatcagtccagtcaaggtttacaataagcacttatcctaactggatcgagggaaaaactaaggttgaaagaaatggagtttggcagagttttattctccttttccttcctcctggaatgagctgaacagaacctttcctcctggattccattttgggaacccagatgttttctccccctccaggcactgggcatggaggtgaccatggtacctggcaaaggacccagcttcccagagccattaagagaagagcaggacctagaacgcctacgggatccagaagtggtagcctctgagctaggctatgtgttccaagccatcacccttacccgacaacgactggctggacgtgtgccgctgattggctttgctggtgccccagtaatgtgggacagggcagggactcggggcgcggggagatcactctggaaggtctggggtagacaaaaggaagggtcagtctggcttctgtgacaccatctttctatccttctctagtggaccctgatgacatacatggttgagggtggtggctcaagcaccatggctcaggccaagcgctggctctatcagagacctcaggctagtcaccagctgcttcgcatcctcactgatgctctggtcccatatctggtaggacaagtggtggctggtgcccaggtgagtcctgagagagagagaaataggctgggatttggtctgtaaggaccagaagcaagagtgtcctaaacctgagagggcaggggtcttaatgccagggatgaaagaaccttggcctccagtgatctagcggagcagccaagcccatcctgacactgacagtggggcttaatgctctaagtattcagacaccaaagttagtgctgggatctgaggaaagtaaatttttttttttttaattactgggtttttagggtcaggcagtatcagggattgaagtcatttggggaaaattgaggtggattttgtatgtgggggaaacttcctctttgtgtgttacatatttttcttcaccataccctaactaggcattgcagctgtttgagtcccatgcagggcatcttggcccacagctcttcaacaagtttgcactgccttacatccgtgatgtggccaagcaagtgaaggccaggttgcgggaggcaggcctggcaccagtgcccatg

SEQ ID NO: 14816 - DNA, 901 bp, Homo sapiens
catggaagcgaatgggttgggcctccagcgtagcatactgacacctacccccacccccacctgatcgccagacctcagggttttccggagctgaagaatgacacattcctgcgagcagcctggggagaggaaacagactacactcccgtttggtgcatgcgccaggcaggccgttacttaccagagtttagggaaacccgggctgcccaggactttttcagcacgtgtcgctctcctgaggcctgctgtgaactgactctgcaggtgaggggtccacaaaagagggaaagatttatgccttcagtctgccacctagcaacctgtctcctgtttcctacagccactgcgtcgcttccctctggatgctgccatcattttctccgacatccttgttgtaccccaggcactgggcatggaggtgaccatggtacctggcaaaggacccagcttcccagagccattaagagaagagcaggacctagaacgcctacgggatccagaagtggtagcctctgagctaggctatgtgttccaagccatcacccttacccgacaacgactggctggacgtgtgccgctgattggctttgctggtgccccatggaccctgatgacatacatggttgagggtggtggctcaagcaccatggctcaggccaagcgctggctctatcagagacctcaggctagtcaccagctgcttcgcatcctcactgatgctctggtcccatatctggtaggacaagtggtggctggtgcccaggcattgcagctgtttgagtcccatgcagggcatcttggcccacagctcttcaacaagtttgcactgccttacatccgtgatgtggccaagcaagtgaaggccaggttgcgggaggcaggcctggcaccagtgcccatg

SEQ ID NO: 14817 - DNA, 1705 bp, Homo sapiens
aaggggcggagcctggactggggggcaggctcagattcaggttaaattgtggattgagctcgcagttacagacagctgaccatggaagcgaatgggttggggtgagttctccagagcacgcggtgtggctagccgggcttctaatttgagtcttccaactcaggactctatccctctactcccctttccccaccctggagacctcccaacctgaactccgttagctgggatcctgaatcctaaaaccatggatttttgagatgttcatcccagggccttaattcaagggatgcctcaggatttccaaccaggatctctattctgggaccatcaactctgatccctctttatcccccagcctgggtatttctcagcccctgaaccagcccagtgacattcccgtttctgaggctcactagttcgaagacccccaaactatccttagtgggccttcattccctccccccagtccctctggttgcttcgagcttggaagagtagagactaagtggagggaagaggccccagggcgggcccttctggagtttgtgcaccacctgataggcagagaggaggcggaacgggcggaaagccagggtttgggagctggcctggaggaggtagatagcggtcctggactgaatcggccttatgaacccgcgctttccccagcctccagcgtagcatactgacacctacccccacccccacctgatcgccagacctcagggttttccggagctgaagaatgacacattcctgcgagcagcctggggagaggaaacagactacactcccgtttggtgcatgcgccaggcaggccgttacttaccaggtaagagtcagggtctggaaatctagataaaactccggagggagaaaagttttcgaggggcaggggagggctctggagggcctcaaggctgagccctgtcttccctctgtatgcagagtttagggaaacccgggctgcccaggactttttcagcacgtgtcgctctcctgaggcctgctgtgaactgactctgcaggtgaggggtccacaaaagagggaaagatttatgccttcagtctgccacctagcaacctgtctcctgtttcctacagccactgcgtcgcttccctctggatgctgccatcattttctccgacatccttgttgtaccccaggtacccactcaaacctgatcctagaatataatccaaggacgccttgaaaatccttctatcagtccagtcaaggtttacaataagcacttatcctaactggatcgagggaaaaactaaggttgaaagaaatggagtttggcagagttttattctccttttccttcctcctggaatgagctgaacagaacctttcctcctggattccattttgggaacccagatgttttctccccctccaggcactgggcatggaggtgaccatggtacctggcaaaggacccagcttcccagagccattaagagaagagcaggacctagaacgcctacgggatccagaagtggtagcctctgagctaggctatgtgttccaagccatcacccttacccgacaacgactggctggacgtgtgccgctgattggctttgctggtgccccagtaatgtgggacagggcagggactcggggcgcggggagatcactctggaaggtctggggtagacaaaaggaagggtcagtctggcttctgtgacacca

SEQ ID NO: 14818 - DNA, 968 bp, Homo sapiens
aaggggcggagcctggactggggggcaggctcagattcaggttaaattgtggattgagctcgcagttacagacagctgaccatggaagcgaatgggttgggacctcagggttttccggagctgaagaatgacacattcctgcgagcagcctggggagaggaaacagactacactcccgtttggtgcatgcgccaggcaggccgttacttaccagagtttagggaaacccgggctgcccaggactttttcagcacgtgtcgctctcctgaggcctgctgtgaactgactctgcaggtgaggggtccacaaaagagggaaagatttatgccttcagtctgccacctagcaacctgtctcctgtttcctacagccactgcgtcgcttccctctggatgctgccatcattttctccgacatccttgttgtaccccaggtacccactcaaacctgatcctagaatataatccaaggacgccttgaaaatccttctatcagtccagtcaaggtttacaataagcacttatcctaactggatcgagggaaaaactaaggttgaaagaaatggagtttggcagagttttattctccttttccttcctcctggaatgagctgaacagaacctttcctcctggattccattttgggaacccagatgttttctccccctccaggcactgggcatggaggtgaccatggtacctggcaaaggacccagcttcccagagccattaagagaagagcaggacctagaacgcctacgggatccagaagtggtagcctctgagctaggctatgtgttccaagccatcacccttacccgacaacgactggctggacgtgtgccgctgattggctttgctggtgccccagtaatgtgggacagggcagggactcggggcgcggggagatcactctggaaggtctggggtagacaaaaggaagggtcagtctggcttctgtgacacca

SEQ ID NO: 14819 - DNA, 859 bp, Homo sapiens
cgggaggcaggcctggcaccagtgcccatggtgaggattgggatgggttgagtgaaggtggtcctgtggagctttcaggctaagtcctgcatggactggagtgaccactggagggcagcagaagtacagtcaagaaagattagtggttgtagcaaggccctctgtagcctgagatctgcttttttctagatcatctttgctaaggatgggcattttgccctggaggagctggcccaagctggctatgaggtggttgggcttgactggacagtggccccaaagaaagcccggtaagccatggaagggtgaggccttgaggttgaggtgggggtgttggctgggggagctgccatgtatgcagttaccagaacgtggcgctggctttgcttccagggagtgtgtggggaagacggtgacattgcagggcaacctggacccctgtgccttgtatgcatctgaggtaacagccagggcccctctgtgtgtctgttactgtgcactcctgtggctgtggctgtattattctgtgtgcacttgtttttaatgtctgtctgtccttttcttctactctgtacaacataagccctagaaagaccggactttttgttgctgttgttcatttgtgtttatgcttcatgcctgggtccatactagggatctgataaattttattgaatgactgaataacactgagtagaagcatgcctacatatgcgtttgtcactagtatatatagggaggacaaaggcttgctggtcctcctgtagccagtgccctgttggtcccccaggaggagatcgggcagttggtgaagcagatgctggatgactttggaccacatcgctacattgccaacctg

SEQ ID NO: 14820 - DNA, 756 bp, Homo sapiens
cgggaggcaggcctggcaccagtgcccatggtgaggattgggatgggttgagtgaaggtggtcctgtggagctttcaggctaagtcctgcatggactggagtgaccactggagggcagcagaagtacagtcaagaaagattagtggttgtagcaaggccctctgtagcctgagatctgcttttttctagatcatctttgctaaggatgggcattttgccctggaggagctggcccaagctggctatgaggtggttgggcttgactggacagtggccccaaagaaagcccgggagtgtgtggggaagacggtgacattgcagggcaacctggacccctgtgccttgtatgcatctgaggtaacagccagggcccctctgtgtgtctgttactgtgcactcctgtggctgtggctgtattattctgtgtgcacttgtttttaatgtctgtctgtccttttcttctactctgtacaacataagccctagaaagaccggactttttgttgctgttgttcatttgtgtttatgcttcatgcctgggtccatactagggatctgataaattttattgaatgactgaataacactgagtagaagcatgcctacatatgcgtttgtcactagtatatatagggaggacaaaggcttgctggtcctcctgtagccagtgccctgttggtcccccaggaggagatcgggcagttggtgaagcagatgctggatgactttggaccacatcgctacattgccaacctg

SEQ ID NO: 14821 - DNA, 854 bp, Homo sapiens
ccaggttgcgggaggcaggcctggcaccagtgcccatggtgaggattgggatgggttgagtgaaggtggtcctgtggagctttcaggctaagtcctgcatggactggagtgaccactggagggcagcagaagtacagtcaagaaagattagtggttgtagcaaggccctctgtagcctgagatctgcttttttctagatcatctttgctaaggatgggcattttgccctggaggagctggcccaagctggctatgaggtggttgggcttgactggacagtggccccaaagaaagcccggtaagccatggaagggtgaggccttgaggttgaggtgggggtgttggctgggggagctgccatgtatgcagttaccagaacgtggcgctggctttgcttccagggagtgtgtggggaagacggtgacattgcagggcaacctggacccctgtgccttgtatgcatctgaggtaacagccagggcccctctgtgtgtctgttactgtgcactcctgtggctgtggctgtattattctgtgtgcacttgtttttaatgtctgtctgtccttttcttctactctgtacaacataagccctagaaagaccggactttttgttgctgttgttcatttgtgtttatgcttcatgcctgggtccatactagggatctgataaattttattgaatgactgaataacactgagtagaagcatgcctacatatgcgtttgtcactagtatatatagggaggacaaaggcttgctggtcctcctgtagccagtgccctgttggtcccccaggaggagatcgggcagttggtgaagcagatgctggatgactttggaccacatcgcta

SEQ ID NO: 14822 - DNA, 524 bp, Homo sapiens
ccaggttgcgggaggcaggcctggcaccagtgcccatggtgaggattgggatgggttgagtgaaggtggtcctgtggagctttcaggctaagtcctgcatggactggagtgaccactggagggcagcagaagtacagtcaagaaagattagtggttgtagcaaggccctctgtagcctgagatctgcttttttctagatcatctttgctaaggatgggcattttgccctggaggagctggcccaagctggctatgaggtggttgggcttgactggacagtggccccaaagaaagcccggtaagccatggaagggtgaggccttgaggttgaggtgggggtgttggctgggggagctgccatgtatgcagttaccagaacgtggcgctggctttgcttccagggagtgtgtggggaagacggtgacattgcagggcaacctggacccctgtgccttgtatgcatctgaggaggagatcgggcagttggtgaagcagatgctggatgactttggaccacatcgcta

SEQ ID NO: 14823 - DNA, 2119 bp, Homo sapiens
aagtggagggaagaggccccagggcgggcccttctggagtttgtgcaccacctgataggcagagaggaggcggaacgggcggaaagccagggtttgggagctggcctggaggaggtagatagcggtcctggactgaatcggccttatgaacccgcgctttccccagcctccagcgtagcatactgacacctacccccacccccacctgatcgccagacctcagggttttccggagctgaagaatgacacattcctgcgagcagcctggggagaggaaacagactacactcccgtttggtgcatgcgccaggcaggccgttacttaccaggtaagagtcagggtctggaaatctagataaaactccggagggagaaaagttttcgaggggcaggggagggctctggagggcctcaaggctgagccctgtcttccctctgtatgcagagtttagggaaacccgggctgcccaggactttttcagcacgtgtcgctctcctgaggcctgctgtgaactgactctgcaggtgaggggtccacaaaagagggaaagatttatgccttcagtctgccacctagcaacctgtctcctgtttcctacagccactgcgtcgcttccctctggatgctgccatcattttctccgacatccttgttgtaccccaggtacccactcaaacctgatcctagaatataatccaaggacgccttgaaaatccttctatcagtccagtcaaggtttacaataagcacttatcctaactggatcgagggaaaaactaaggttgaaagaaatggagtttggcagagttttattctccttttccttcctcctggaatgagctgaacagaacctttcctcctggattccattttgggaacccagatgttttctccccctccaggcactgggcatggaggtgaccatggtacctggcaaaggacccagcttcccagagccattaagagaagagcaggacctagaacgcctacgggatccagaagtggtagcctctgagctaggctatgtgttccaagccatcacccttacccgacaacgactggctggacgtgtgccgctgattggctttgctggtgccccagtaatgtgggacagggcagggactcggggcgcggggagatcactctggaaggtctggggtagacaaaaggaagggtcagtctggcttctgtgacaccatctttctatccttctctagtggaccctgatgacatacatggttgagggtggtggctcaagcaccatggctcaggccaagcgctggctctatcagagacctcaggctagtcaccagctgcttcgcatcctcactgatgctctggtcccatatctggtaggacaagtggtggctggtgcccaggtgagtcctgagagagagagaaataggctgggatttggtctgtaaggaccagaagcaagagtgtcctaaacctgagagggcaggggtcttaatgccagggatgaaagaaccttggcctccagtgatctagcggagcagccaagcccatcctgacactgacagtggggcttaatgctctaagtattcagacaccaaagttagtgctgggatctgaggaaagtaaatttttttttttttaattactgggtttttagggtcaggcagtatcagggattgaagtcatttggggaaaattgaggtggattttgtatgtgggggaaacttcctctttgtgtgttacatatttttcttcaccataccctaactaggcattgcagctgtttgagtcccatgcagggcatcttggcccacagctcttcaacaagtttgcactgccttacatccgtgatgtggccaagcaagtgaaggccaggttgcgggaggcaggcctggcaccagtgcccatggtgaggattgggatgggttgagtgaaggtggtcctgtggagctttcaggctaagtcctgcatggactggagtgaccactggagggcagcagaagtacagtcaagaaagattagtggttgtagcaaggccctctgtagcctgagatctgcttttttctagatcatctttgctaaggatgggcattttgccctggaggagctggcccaagctggctatgaggtggttgggcttga

SEQ ID NO: 14824 - DNA, 1044 bp, Homo sapiens
aagtggagggaagaggccccagggcgggcccttctggagtttgtgcaccacctgataggcagagaggaggcggaacgggcggaaagccagggtttgggagctggcctggaggaggtagatagcggtcctggactgaatcggccttatgaacccgcgctttccccagcctccagcgtagcatactgacacctacccccacccccacctgatcgccagacctcagggttttccggagctgaagaatgacacattcctgcgagcagcctggggagaggaaacagactacactcccgtttggtgcatgcgccaggcaggccgttacttaccagagtttagggaaacccgggctgcccaggactttttcagcacgtgtcgctctcctgaggcctgctgtgaactgactctgcagccactgcgtcgcttccctctggatgctgccatcattttctccgacatccttgttgtaccccaggcactgggcatggaggtgaccatggtacctggcaaaggacccagcttcccagagccattaagagaagagcaggacctagaacgcctacgggatccagaagtggtagcctctgagctaggctatgtgttccaagccatcacccttacccgacaacgactggctggacgtgtgccgctgattggctttgctggtgccccatggaccctgatgacatacatggttgagggtggtggctcaagcaccatggctcaggccaagcgctggctctatcagagacctcaggctagtcaccagctgcttcgcatcctcactgatgctctggtcccatatctggtaggacaagtggtggctggtgcccaggcattgcagctgtttgagtcccatgcagggcatcttggcccacagctcttcaacaagtttgcactgccttacatccgtgatgtggccaagcaagtgaaggccaggttgcgggaggcaggcctggcaccagtgcccatgatcatctttgctaaggatgggcattttgccctggaggagctggcccaagctggctatgaggtggttgggcttga

SEQ ID NO: 14825 - DNA, 1526 bp, Homo sapiens
caagtggtggctggtgcccaggtgagtcctgagagagagagaaataggctgggatttggtctgtaaggaccagaagcaagagtgtcctaaacctgagagggcaggggtcttaatgccagggatgaaagaaccttggcctccagtgatctagcggagcagccaagcccatcctgacactgacagtggggcttaatgctctaagtattcagacaccaaagttagtgctgggatctgaggaaagtaaatttttttttttttaattactgggtttttagggtcaggcagtatcagggattgaagtcatttggggaaaattgaggtggattttgtatgtgggggaaacttcctctttgtgtgttacatatttttcttcaccataccctaactaggcattgcagctgtttgagtcccatgcagggcatcttggcccacagctcttcaacaagtttgcactgccttacatccgtgatgtggccaagcaagtgaaggccaggttgcgggaggcaggcctggcaccagtgcccatggtgaggattgggatgggttgagtgaaggtggtcctgtggagctttcaggctaagtcctgcatggactggagtgaccactggagggcagcagaagtacagtcaagaaagattagtggttgtagcaaggccctctgtagcctgagatctgcttttttctagatcatctttgctaaggatgggcattttgccctggaggagctggcccaagctggctatgaggtggttgggcttgactggacagtggccccaaagaaagcccggtaagccatggaagggtgaggccttgaggttgaggtgggggtgttggctgggggagctgccatgtatgcagttaccagaacgtggcgctggctttgcttccagggagtgtgtggggaagacggtgacattgcagggcaacctggacccctgtgccttgtatgcatctgaggtaacagccagggcccctctgtgtgtctgttactgtgcactcctgtggctgtggctgtattattctgtgtgcacttgtttttaatgtctgtctgtccttttcttctactctgtacaacataagccctagaaagaccggactttttgttgctgttgttcatttgtgtttatgcttcatgcctgggtccatactagggatctgataaattttattgaatgactgaataacactgagtagaagcatgcctacatatgcgtttgtcactagtatatatagggaggacaaaggcttgctggtcctcctgtagccagtgccctgttggtcccccaggaggagatcgggcagttggtgaagcagatgctggatgactttggaccacatcgctacattgccaacctgggccatgggctttatcctgacatggacccagaacatgtgggcgcctttgtggatgctgtgcataaacactcacgtctgcttcgacagaactgagtgtatacctttaccctcaagtaccactaacacagatgattgatcgtttccaggacaataaaagtttcggagttgaa

SEQ ID NO: 14826 - DNA, 934 bp, Homo sapiens
caagtggtggctggtgcccaggtgagtcctgagagagagagaaataggctgggatttggtctgtaaggaccagaagcaagagtgtcctaaacctgagagggcaggggtcttaatgccagggatgaaagaaccttggcctccagtgatctagcggagcagccaagcccatcctgacactgacagtggggcttaatgctctaagtattcagacaccaaagttagtgctgggatctgaggaaagtaaatttttttttttttaattactgggtttttagggtcaggcagtatcagggattgaagtcatttggggaaaattgaggtggattttgtatgtgggggaaacttcctctttgtgtgttacatatttttcttcaccataccctaactaggcattgcagctgtttgagtcccatgcagggcatcttggcccacagctcttcaacaagtttgcactgccttacatccgtgatgtggccaagcaagtgaaggccaggttgcgggaggcaggcctggcaccagtgcccatgatcatctttgctaaggatgggcattttgccctggaggagctggcccaagctggctatgaggtggttgggcttgactggacagtggccccaaagaaagcccgggagtgtgtggggaagacggtgacattgcagggcaacctggacccctgtgccttgtatgcatctgaggaggagatcgggcagttggtgaagcagatgctggatgactttggaccacatcgctacattgccaacctgggccatgggctttatcctgacatggacccagaacatgtgggcgcctttgtggatgctgtgcataaacactcacgtctgcttcgacagaactgagtgtatacctttaccctcaagtaccactaacacagatgattgatcgtttccaggacaataaaagtttcggagttgaa

SEQ ID NO: 14827 - DNA, 1085 bp, Homo sapiens
gacacattcctgcgagcagcctggggagaggaaacagactacactcccgtttggtgcatgcgccaggcaggccgttacttaccaggtaagagtcagggtctggaaatctagataaaactccggagggagaaaagttttcgaggggcaggggagggctctggagggcctcaaggctgagccctgtcttccctctgtatgcagagtttagggaaacccgggctgcccaggactttttcagcacgtgtcgctctcctgaggcctgctgtgaactgactctgcaggtgaggggtccacaaaagagggaaagatttatgccttcagtctgccacctagcaacctgtctcctgtttcctacagccactgcgtcgcttccctctggatgctgccatcattttctccgacatccttgttgtaccccaggtacccactcaaacctgatcctagaatataatccaaggacgccttgaaaatccttctatcagtccagtcaaggtttacaataagcacttatcctaactggatcgagggaaaaactaaggttgaaagaaatggagtttggcagagttttattctccttttccttcctcctggaatgagctgaacagaacctttcctcctggattccattttgggaacccagatgttttctccccctccaggcactgggcatggaggtgaccatggtacctggcaaaggacccagcttcccagagccattaagagaagagcaggacctagaacgcctacgggatccagaagtggtagcctctgagctaggctatgtgttccaagccatcacccttacccgacaacgactggctggacgtgtgccgctgattggctttgctggtgccccagtaatgtgggacagggcagggactcggggcgcggggagatcactctggaaggtctggggtagacaaaaggaagggtcagtctggcttctgtgacaccatctttctatccttctctagtggaccctgatgacatacatggttgagggtggtggctcaagcaccatggctcaggccaagcgctggctctatcagagacctcaggctagtcaccagctgcttcgcatcctc

SEQ ID NO: 14828 - DNA, 632 bp, Homo sapiens
gacacattcctgcgagcagcctggggagaggaaacagactacactcccgtttggtgcatgcgccaggcaggccgttacttaccagagtttagggaaacccgggctgcccaggactttttcagcacgtgtcgctctcctgaggcctgctgtgaactgactctgcaggtgaggggtccacaaaagagggaaagatttatgccttcagtctgccacctagcaacctgtctcctgtttcctacagccactgcgtcgcttccctctggatgctgccatcattttctccgacatccttgttgtaccccagatgttttctccccctccaggcactgggcatggaggtgaccatggtacctggcaaaggacccagcttcccagagccattaagagaagagcaggacctagaacgcctacgggatccagaagtggtagcctctgagctaggctatgtgttccaagccatcacccttacccgacaacgactggctggacgtgtgccgctgattggctttgctggtgccccatggaccctgatgacatacatggttgagggtggtggctcaagcaccatggctcaggccaagcgctggctctatcagagacctcaggctagtcaccagctgcttcgcatcctc

SEQ ID NO: 14829 - DNA, 2012 bp, Homo sapiens
ggtagatagcggtcctggactgaatcggccttatgaacccgcgctttccccagcctccagcgtagcatactgacacctacccccacccccacctgatcgccagacctcagggttttccggagctgaagaatgacacattcctgcgagcagcctggggagaggaaacagactacactcccgtttggtgcatgcgccaggcaggccgttacttaccaggtaagagtcagggtctggaaatctagataaaactccggagggagaaaagttttcgaggggcaggggagggctctggagggcctcaaggctgagccctgtcttccctctgtatgcagagtttagggaaacccgggctgcccaggactttttcagcacgtgtcgctctcctgaggcctgctgtgaactgactctgcaggtgaggggtccacaaaagagggaaagatttatgccttcagtctgccacctagcaacctgtctcctgtttcctacagccactgcgtcgcttccctctggatgctgccatcattttctccgacatccttgttgtaccccaggtacccactcaaacctgatcctagaatataatccaaggacgccttgaaaatccttctatcagtccagtcaaggtttacaataagcacttatcctaactggatcgagggaaaaactaaggttgaaagaaatggagtttggcagagttttattctccttttccttcctcctggaatgagctgaacagaacctttcctcctggattccattttgggaacccagatgttttctccccctccaggcactgggcatggaggtgaccatggtacctggcaaaggacccagcttcccagagccattaagagaagagcaggacctagaacgcctacgggatccagaagtggtagcctctgagctaggctatgtgttccaagccatcacccttacccgacaacgactggctggacgtgtgccgctgattggctttgctggtgccccagtaatgtgggacagggcagggactcggggcgcggggagatcactctggaaggtctggggtagacaaaaggaagggtcagtctggcttctgtgacaccatctttctatccttctctagtggaccctgatgacatacatggttgagggtggtggctcaagcaccatggctcaggccaagcgctggctctatcagagacctcaggctagtcaccagctgcttcgcatcctcactgatgctctggtcccatatctggtaggacaagtggtggctggtgcccaggtgagtcctgagagagagagaaataggctgggatttggtctgtaaggaccagaagcaagagtgtcctaaacctgagagggcaggggtcttaatgccagggatgaaagaaccttggcctccagtgatctagcggagcagccaagcccatcctgacactgacagtggggcttaatgctctaagtattcagacaccaaagttagtgctgggatctgaggaaagtaaatttttttttttttaattactgggtttttagggtcaggcagtatcagggattgaagtcatttggggaaaattgaggtggattttgtatgtgggggaaacttcctctttgtgtgttacatatttttcttcaccataccctaactaggcattgcagctgtttgagtcccatgcagggcatcttggcccacagctcttcaacaagtttgcactgccttacatccgtgatgtggccaagcaagtgaaggccaggttgcgggaggcaggcctggcaccagtgcccatggtgaggattgggatgggttgagtgaaggtggtcctgtggagctttcaggctaagtcctgcatggactggagtgaccactggagggcagcagaagtacagtcaagaaagattagtggttgtagcaaggccctctgtagcctgagatctgcttttttctagatcatctttgctaaggatgggcattttgccctggaggagctggcccaagctggctatgaggtggttgggcttgactggac

SEQ ID NO: 14830 - DNA, 857 bp, Homo sapiens
ggtagatagcggtcctggactgaatcggccttatgaacccgcgctttccccagcctccagcgtagcatactgacacctacccccacccccacctgatcgccagacctcagggttttccggagctgaagaatgacacattcctgcgagcagcctggggagaggaaacagactacactcccgtttggtgcatgcgccaggcaggccgttacttaccagccactgcgtcgcttccctctggatgctgccatcattttctccgacatccttgttgtaccccaggcactgggcatggaggtgaccatggtacctggcaaaggacccagcttcccagagccattaagagaagagcaggacctagaacgcctacgggatccagaagtggtagcctctgagctaggctatgtgttccaagccatcacccttacccgacaacgactggctggacgtgtgccgctgattggctttgctggtgccccatggaccctgatgacatacatggttgagggtggtggctcaagcaccatggctcaggccaagcgctggctctatcagagacctcaggctagtcaccagctgcttcgcatcctcactgatgctctggtcccatatctggtaggacaagtggtggctggtgcccaggcattgcagctgtttgagtcccatgcagggcatcttggcccacagctcttcaacaagtttgcactgccttacatccgtgatgtggccaagcaagtgaaggccaggttgcgggaggcaggcctggcaccagtgcccatgatcatctttgctaaggatgggcattttgccctggaggagctggcccaagctggctatgaggtggttgggcttgactggac

SEQ ID NO: 14831 - DNA, 2024 bp, Homo sapiens
gggagctggcctggaggaggtagatagcggtcctggactgaatcggccttatgaacccgcgctttccccagcctccagcgtagcatactgacacctacccccacccccacctgatcgccagacctcagggttttccggagctgaagaatgacacattcctgcgagcagcctggggagaggaaacagactacactcccgtttggtgcatgcgccaggcaggccgttacttaccaggtaagagtcagggtctggaaatctagataaaactccggagggagaaaagttttcgaggggcaggggagggctctggagggcctcaaggctgagccctgtcttccctctgtatgcagagtttagggaaacccgggctgcccaggactttttcagcacgtgtcgctctcctgaggcctgctgtgaactgactctgcaggtgaggggtccacaaaagagggaaagatttatgccttcagtctgccacctagcaacctgtctcctgtttcctacagccactgcgtcgcttccctctggatgctgccatcattttctccgacatccttgttgtaccccaggtacccactcaaacctgatcctagaatataatccaaggacgccttgaaaatccttctatcagtccagtcaaggtttacaataagcacttatcctaactggatcgagggaaaaactaaggttgaaagaaatggagtttggcagagttttattctccttttccttcctcctggaatgagctgaacagaacctttcctcctggattccattttgggaacccagatgttttctccccctccaggcactgggcatggaggtgaccatggtacctggcaaaggacccagcttcccagagccattaagagaagagcaggacctagaacgcctacgggatccagaagtggtagcctctgagctaggctatgtgttccaagccatcacccttacccgacaacgactggctggacgtgtgccgctgattggctttgctggtgccccagtaatgtgggacagggcagggactcggggcgcggggagatcactctggaaggtctggggtagacaaaaggaagggtcagtctggcttctgtgacaccatctttctatccttctctagtggaccctgatgacatacatggttgagggtggtggctcaagcaccatggctcaggccaagcgctggctctatcagagacctcaggctagtcaccagctgcttcgcatcctcactgatgctctggtcccatatctggtaggacaagtggtggctggtgcccaggtgagtcctgagagagagagaaataggctgggatttggtctgtaaggaccagaagcaagagtgtcctaaacctgagagggcaggggtcttaatgccagggatgaaagaaccttggcctccagtgatctagcggagcagccaagcccatcctgacactgacagtggggcttaatgctctaagtattcagacaccaaagttagtgctgggatctgaggaaagtaaatttttttttttttaattactgggtttttagggtcaggcagtatcagggattgaagtcatttggggaaaattgaggtggattttgtatgtgggggaaacttcctctttgtgtgttacatatttttcttcaccataccctaactaggcattgcagctgtttgagtcccatgcagggcatcttggcccacagctcttcaacaagtttgcactgccttacatccgtgatgtggccaagcaagtgaaggccaggttgcgggaggcaggcctggcaccagtgcccatggtgaggattgggatgggttgagtgaaggtggtcctgtggagctttcaggctaagtcctgcatggactggagtgaccactggagggcagcagaagtacagtcaagaaagattagtggttgtagcaaggccctctgtagcctgagatctgcttttttctagatcatctttgctaaggatgggcattttgccctggaggagctggcccaagctggctatgaggtggttgggcttga

SEQ ID NO: 14832 - DNA, 968 bp, Homo sapiens
gggagctggcctggaggaggtagatagcggtcctggactgaatcggccttatgaacccgcgctttccccagcctccagcgtagcatactgacacctacccccacccccacctgatcgccagacctcagggttttccggagctgaagaatgacacattcctgcgagcagcctggggagaggaaacagactacactcccgtttggtgcatgcgccaggcaggccgttacttaccagagtttagggaaacccgggctgcccaggactttttcagcacgtgtcgctctcctgaggcctgctgtgaactgactctgcagccactgcgtcgcttccctctggatgctgccatcattttctccgacatccttgttgtaccccagatgttttctccccctccaggcactgggcatggaggtgaccatggtacctggcaaaggacccagcttcccagagccattaagagaagagcaggacctagaacgcctacgggatccagaagtggtagcctctgagctaggctatgtgttccaagccatcacccttacccgacaacgactggctggacgtgtgccgctgattggctttgctggtgccccatggaccctgatgacatacatggttgagggtggtggctcaagcaccatggctcaggccaagcgctggctctatcagagacctcaggctagtcaccagctgcttcgcatcctcactgatgctctggtcccatatctggtaggacaagtggtggctggtgcccaggcattgcagctgtttgagtcccatgcagggcatcttggcccacagctcttcaacaagtttgcactgccttacatccgtgatgtggccaagcaagtgaaggccaggttgcgggaggcaggcctggcaccagtgcccatgatcatctttgctaaggatgggcattttgccctggaggagctggcccaagctggctatgaggtggttgggcttga

SEQ ID NO: 14833 - DNA, 1953 bp, Homo sapiens
ggaagcgaatgggttggggtgagttctccagagcacgcggtgtggctagccgggcttctaatttgagtcttccaactcaggactctatccctctactcccctttccccaccctggagacctcccaacctgaactccgttagctgggatcctgaatcctaaaaccatggatttttgagatgttcatcccagggccttaattcaagggatgcctcaggatttccaaccaggatctctattctgggaccatcaactctgatccctctttatcccccagcctgggtatttctcagcccctgaaccagcccagtgacattcccgtttctgaggctcactagttcgaagacccccaaactatccttagtgggccttcattccctccccccagtccctctggttgcttcgagcttggaagagtagagactaagtggagggaagaggccccagggcgggcccttctggagtttgtgcaccacctgataggcagagaggaggcggaacgggcggaaagccagggtttgggagctggcctggaggaggtagatagcggtcctggactgaatcggccttatgaacccgcgctttccccagcctccagcgtagcatactgacacctacccccacccccacctgatcgccagacctcagggttttccggagctgaagaatgacacattcctgcgagcagcctggggagaggaaacagactacactcccgtttggtgcatgcgccaggcaggccgttacttaccaggtaagagtcagggtctggaaatctagataaaactccggagggagaaaagttttcgaggggcaggggagggctctggagggcctcaaggctgagccctgtcttccctctgtatgcagagtttagggaaacccgggctgcccaggactttttcagcacgtgtcgctctcctgaggcctgctgtgaactgactctgcaggtgaggggtccacaaaagagggaaagatttatgccttcagtctgccacctagcaacctgtctcctgtttcctacagccactgcgtcgcttccctctggatgctgccatcattttctccgacatccttgttgtaccccaggtacccactcaaacctgatcctagaatataatccaaggacgccttgaaaatccttctatcagtccagtcaaggtttacaataagcacttatcctaactggatcgagggaaaaactaaggttgaaagaaatggagtttggcagagttttattctccttttccttcctcctggaatgagctgaacagaacctttcctcctggattccattttgggaacccagatgttttctccccctccaggcactgggcatggaggtgaccatggtacctggcaaaggacccagcttcccagagccattaagagaagagcaggacctagaacgcctacgggatccagaagtggtagcctctgagctaggctatgtgttccaagccatcacccttacccgacaacgactggctggacgtgtgccgctgattggctttgctggtgccccagtaatgtgggacagggcagggactcggggcgcggggagatcactctggaaggtctggggtagacaaaaggaagggtcagtctggcttctgtgacaccatctttctatccttctctagtggaccctgatgacatacatggttgagggtggtggctcaagcaccatggctcaggccaagcgctggctctatcagagacctcaggctagtcaccagctgcttcgcatcctcactgatgctctggtcccatatctggtaggacaagtggtggctggtgcccaggtgagtcctgagagagagagaaataggctgggatttggtctgtaaggaccagaagcaagagtgtcctaaacctgagagggcaggggtcttaatgccagggatgaaagaaccttggcctccagtgatctagcggagcagccaagcccatcc

SEQ ID NO: 14834 - DNA, 860 bp, Homo sapiens
ggaagcgaatgggttgggacctcagggttttccggagctgaagaatgacacattcctgcgagcagcctggggagaggaaacagactacactcccgtttggtgcatgcgccaggcaggccgttacttaccagagtttagggaaacccgggctgcccaggactttttcagcacgtgtcgctctcctgaggcctgctgtgaactgactctgcaggtgaggggtccacaaaagagggaaagatttatgccttcagtctgccacctagcaacctgtctcctgtttcctacagccactgcgtcgcttccctctggatgctgccatcattttctccgacatccttgttgtaccccaggcactgggcatggaggtgaccatggtacctggcaaaggacccagcttcccagagccattaagagaagagcaggacctagaacgcctacgggatccagaagtggtagcctctgagctaggctatgtgttccaagccatcacccttacccgacaacgactggctggacgtgtgccgctgattggctttgctggtgccccatggaccctgatgacatacatggttgagggtggtggctcaagcaccatggctcaggccaagcgctggctctatcagagacctcaggctagtcaccagctgcttcgcatcctcactgatgctctggtcccatatctggtaggacaagtggtggctggtgcccaggtgagtcctgagagagagagaaataggctgggatttggtctgtaaggaccagaagcaagagtgtcctaaacctgagagggcaggggtcttaatgccagggatgaaagaaccttggcctccagtgatctagcggagcagccaagcccatcc

SEQ ID NO: 14835 - DNA, 2352 bp, Homo sapiens
cagattcaggttaaattgtggattgagctcgcagttacagacagctgaccatggaagcgaatgggttggggtgagttctccagagcacgcggtgtggctagccgggcttctaatttgagtcttccaactcaggactctatccctctactcccctttccccaccctggagacctcccaacctgaactccgttagctgggatcctgaatcctaaaaccatggatttttgagatgttcatcccagggccttaattcaagggatgcctcaggatttccaaccaggatctctattctgggaccatcaactctgatccctctttatcccccagcctgggtatttctcagcccctgaaccagcccagtgacattcccgtttctgaggctcactagttcgaagacccccaaactatccttagtgggccttcattccctccccccagtccctctggttgcttcgagcttggaagagtagagactaagtggagggaagaggccccagggcgggcccttctggagtttgtgcaccacctgataggcagagaggaggcggaacgggcggaaagccagggtttgggagctggcctggaggaggtagatagcggtcctggactgaatcggccttatgaacccgcgctttccccagcctccagcgtagcatactgacacctacccccacccccacctgatcgccagacctcagggttttccggagctgaagaatgacacattcctgcgagcagcctggggagaggaaacagactacactcccgtttggtgcatgcgccaggcaggccgttacttaccaggtaagagtcagggtctggaaatctagataaaactccggagggagaaaagttttcgaggggcaggggagggctctggagggcctcaaggctgagccctgtcttccctctgtatgcagagtttagggaaacccgggctgcccaggactttttcagcacgtgtcgctctcctgaggcctgctgtgaactgactctgcaggtgaggggtccacaaaagagggaaagatttatgccttcagtctgccacctagcaacctgtctcctgtttcctacagccactgcgtcgcttccctctggatgctgccatcattttctccgacatccttgttgtaccccaggtacccactcaaacctgatcctagaatataatccaaggacgccttgaaaatccttctatcagtccagtcaaggtttacaataagcacttatcctaactggatcgagggaaaaactaaggttgaaagaaatggagtttggcagagttttattctccttttccttcctcctggaatgagctgaacagaacctttcctcctggattccattttgggaacccagatgttttctccccctccaggcactgggcatggaggtgaccatggtacctggcaaaggacccagcttcccagagccattaagagaagagcaggacctagaacgcctacgggatccagaagtggtagcctctgagctaggctatgtgttccaagccatcacccttacccgacaacgactggctggacgtgtgccgctgattggctttgctggtgccccagtaatgtgggacagggcagggactcggggcgcggggagatcactctggaaggtctggggtagacaaaaggaagggtcagtctggcttctgtgacaccatctttctatccttctctagtggaccctgatgacatacatggttgagggtggtggctcaagcaccatggctcaggccaagcgctggctctatcagagacctcaggctagtcaccagctgcttcgcatcctcactgatgctctggtcccatatctggtaggacaagtggtggctggtgcccaggtgagtcctgagagagagagaaataggctgggatttggtctgtaaggaccagaagcaagagtgtcctaaacctgagagggcaggggtcttaatgccagggatgaaagaaccttggcctccagtgatctagcggagcagccaagcccatcctgacactgacagtggggcttaatgctctaagtattcagacaccaaagttagtgctgggatctgaggaaagtaaatttttttttttttaattactgggtttttagggtcaggcagtatcagggattgaagtcatttggggaaaattgaggtggattttgtatgtgggggaaacttcctctttgtgtgttacatatttttcttcaccataccctaactaggcattgcagctgtttgagtcccatgcagggcatcttggcccacagctcttcaacaagtttgcactgccttacatccgtgatgtggccaagcaagtgaaggccaggttgcgggaggcaggcctggcacca

SEQ ID NO: 14836 - DNA, 884 bp, Homo sapiens
cagattcaggttaaattgtggattgagctcgcagttacagacagctgaccatggaagcgaatgggttgggcctccagcgtagcatactgacacctacccccacccccacctgatcgccagacctcagggttttccggagctgaagaatgacacattcctgcgagcagcctggggagaggaaacagactacactcccgtttggtgcatgcgccaggcaggccgttacttaccagagtttagggaaacccgggctgcccaggactttttcagcacgtgtcgctctcctgaggcctgctgtgaactgactctgcagccactgcgtcgcttccctctggatgctgccatcattttctccgacatccttgttgtaccccagatgttttctccccctccaggcactgggcatggaggtgaccatggtacctggcaaaggacccagcttcccagagccattaagagaagagcaggacctagaacgcctacgggatccagaagtggtagcctctgagctaggctatgtgttccaagccatcacccttacccgacaacgactggctggacgtgtgccgctgattggctttgctggtgccccatggaccctgatgacatacatggttgagggtggtggctcaagcaccatggctcaggccaagcgctggctctatcagagacctcaggctagtcaccagctgcttcgcatcctcactgatgctctggtcccatatctggtaggacaagtggtggctggtgcccaggcattgcagctgtttgagtcccatgcagggcatcttggcccacagctcttcaacaagtttgcactgccttacatccgtgatgtggccaagcaagtgaaggccaggttgcgggaggcaggcctggcacca

SEQ ID NO: 14837 - DNA, 3323 bp, Homo sapiens
agttacagacagctgaccatggaagcgaatgggttggggtgagttctccagagcacgcggtgtggctagccgggcttctaatttgagtcttccaactcaggactctatccctctactcccctttccccaccctggagacctcccaacctgaactccgttagctgggatcctgaatcctaaaaccatggatttttgagatgttcatcccagggccttaattcaagggatgcctcaggatttccaaccaggatctctattctgggaccatcaactctgatccctctttatcccccagcctgggtatttctcagcccctgaaccagcccagtgacattcccgtttctgaggctcactagttcgaagacccccaaactatccttagtgggccttcattccctccccccagtccctctggttgcttcgagcttggaagagtagagactaagtggagggaagaggccccagggcgggcccttctggagtttgtgcaccacctgataggcagagaggaggcggaacgggcggaaagccagggtttgggagctggcctggaggaggtagatagcggtcctggactgaatcggccttatgaacccgcgctttccccagcctccagcgtagcatactgacacctacccccacccccacctgatcgccagacctcagggttttccggagctgaagaatgacacattcctgcgagcagcctggggagaggaaacagactacactcccgtttggtgcatgcgccaggcaggccgttacttaccaggtaagagtcagggtctggaaatctagataaaactccggagggagaaaagttttcgaggggcaggggagggctctggagggcctcaaggctgagccctgtcttccctctgtatgcagagtttagggaaacccgggctgcccaggactttttcagcacgtgtcgctctcctgaggcctgctgtgaactgactctgcaggtgaggggtccacaaaagagggaaagatttatgccttcagtctgccacctagcaacctgtctcctgtttcctacagccactgcgtcgcttccctctggatgctgccatcattttctccgacatccttgttgtaccccaggtacccactcaaacctgatcctagaatataatccaaggacgccttgaaaatccttctatcagtccagtcaaggtttacaataagcacttatcctaactggatcgagggaaaaactaaggttgaaagaaatggagtttggcagagttttattctccttttccttcctcctggaatgagctgaacagaacctttcctcctggattccattttgggaacccagatgttttctccccctccaggcactgggcatggaggtgaccatggtacctggcaaaggacccagcttcccagagccattaagagaagagcaggacctagaacgcctacgggatccagaagtggtagcctctgagctaggctatgtgttccaagccatcacccttacccgacaacgactggctggacgtgtgccgctgattggctttgctggtgccccagtaatgtgggacagggcagggactcggggcgcggggagatcactctggaaggtctggggtagacaaaaggaagggtcagtctggcttctgtgacaccatctttctatccttctctagtggaccctgatgacatacatggttgagggtggtggctcaagcaccatggctcaggccaagcgctggctctatcagagacctcaggctagtcaccagctgcttcgcatcctcactgatgctctggtcccatatctggtaggacaagtggtggctggtgcccaggtgagtcctgagagagagagaaataggctgggatttggtctgtaaggaccagaagcaagagtgtcctaaacctgagagggcaggggtcttaatgccagggatgaaagaaccttggcctccagtgatctagcggagcagccaagcccatcctgacactgacagtggggcttaatgctctaagtattcagacaccaaagttagtgctgggatctgaggaaagtaaatttttttttttttaattactgggtttttagggtcaggcagtatcagggattgaagtcatttggggaaaattgaggtggattttgtatgtgggggaaacttcctctttgtgtgttacatatttttcttcaccataccctaactaggcattgcagctgtttgagtcccatgcagggcatcttggcccacagctcttcaacaagtttgcactgccttacatccgtgatgtggccaagcaagtgaaggccaggttgcgggaggcaggcctggcaccagtgcccatggtgaggattgggatgggttgagtgaaggtggtcctgtggagctttcaggctaagtcctgcatggactggagtgaccactggagggcagcagaagtacagtcaagaaagattagtggttgtagcaaggccctctgtagcctgagatctgcttttttctagatcatctttgctaaggatgggcattttgccctggaggagctggcccaagctggctatgaggtggttgggcttgactggacagtggccccaaagaaagcccggtaagccatggaagggtgaggccttgaggttgaggtgggggtgttggctgggggagctgccatgtatgcagttaccagaacgtggcgctggctttgcttccagggagtgtgtggggaagacggtgacattgcagggcaacctggacccctgtgccttgtatgcatctgaggtaacagccagggcccctctgtgtgtctgttactgtgcactcctgtggctgtggctgtattattctgtgtgcacttgtttttaatgtctgtctgtccttttcttctactctgtacaacataagccctagaaagaccggactttttgttgctgttgttcatttgtgtttatgcttcatgcctgggtccatactagggatctgataaattttattgaatgactgaataacactgagtagaagcatgcctacatatgcgtttgtcactagtatatatagggaggacaaaggcttgctggtcctcctgtagccagtgccctgttggtcccccaggaggagatcgggcagttggtgaagcagatgctggatgactttggaccacatcgctacattgccaacctgggccatgggctttatcctgacatggacccagaacatgtgggcgcctttgtggatgctgtgcataaacactcacgtctgcttcgacagaactgagtgtatacctttaccctcaagtaccactaacacagatgattgatcgtttccaggacaataaaagtttcggag

SEQ ID NO: 14838 - DNA, 1106 bp, Homo sapiens
agttacagacagctgaccatggaagcgaatgggttgggcctccagcgtagcatactgacacctacccccacccccacctgatcgccagacctcagggttttccggagctgaagaatgacacattcctgcgagcagcctggggagaggaaacagactacactcccgtttggtgcatgcgccaggcaggccgttacttaccagagtttagggaaacccgggctgcccaggactttttcagcacgtgtcgctctcctgaggcctgctgtgaactgactctgcagccactgcgtcgcttccctctggatgctgccatcattttctccgacatccttgttgtaccccaggcactgggcatggaggtgaccatggtacctggcaaaggacccagcttcccagagccattaagagaagagcaggacctagaacgcctacgggatccagaagtggtagcctctgagctaggctatgtgttccaagccatcacccttacccgacaacgactggctggacgtgtgccgctgattggctttgctggtgccccatggaccctgatgacatacatggttgagggtggtggctcaagcaccatggctcaggccaagcgctggctctatcagagacctcaggctagtcaccagctgcttcgcatcctcactgatgctctggtcccatatctggtaggacaagtggtggctggtgcccagatcatctttgctaaggatgggcattttgccctggaggagctggcccaagctggctatgaggtggttgggcttgactggacagtggccccaaagaaagcccgggagtgtgtggggaagacggtgacattgcagggcaacctggacccctgtgccttgtatgcatctgaggaggagatcgggcagttggtgaagcagatgctggatgactttggaccacatcgctacattgccaacctgggccatgggctttatcctgacatggacccagaacatgtgggcgcctttgtggatgctgtgcataaacactcacgtctgcttcgacagaactgagtgtatacctttaccctcaagtaccactaacacagatgattgatcgtttccaggacaataaaagtttcggag

SEQ ID NO: 14839 - DNA, 3324 bp, Homo sapiens
acagacagctgaccatggaagcgaatgggttggggtgagttctccagagcacgcggtgtggctagccgggcttctaatttgagtcttccaactcaggactctatccctctactcccctttccccaccctggagacctcccaacctgaactccgttagctgggatcctgaatcctaaaaccatggatttttgagatgttcatcccagggccttaattcaagggatgcctcaggatttccaaccaggatctctattctgggaccatcaactctgatccctctttatcccccagcctgggtatttctcagcccctgaaccagcccagtgacattcccgtttctgaggctcactagttcgaagacccccaaactatccttagtgggccttcattccctccccccagtccctctggttgcttcgagcttggaagagtagagactaagtggagggaagaggccccagggcgggcccttctggagtttgtgcaccacctgataggcagagaggaggcggaacgggcggaaagccagggtttgggagctggcctggaggaggtagatagcggtcctggactgaatcggccttatgaacccgcgctttccccagcctccagcgtagcatactgacacctacccccacccccacctgatcgccagacctcagggttttccggagctgaagaatgacacattcctgcgagcagcctggggagaggaaacagactacactcccgtttggtgcatgcgccaggcaggccgttacttaccaggtaagagtcagggtctggaaatctagataaaactccggagggagaaaagttttcgaggggcaggggagggctctggagggcctcaaggctgagccctgtcttccctctgtatgcagagtttagggaaacccgggctgcccaggactttttcagcacgtgtcgctctcctgaggcctgctgtgaactgactctgcaggtgaggggtccacaaaagagggaaagatttatgccttcagtctgccacctagcaacctgtctcctgtttcctacagccactgcgtcgcttccctctggatgctgccatcattttctccgacatccttgttgtaccccaggtacccactcaaacctgatcctagaatataatccaaggacgccttgaaaatccttctatcagtccagtcaaggtttacaataagcacttatcctaactggatcgagggaaaaactaaggttgaaagaaatggagtttggcagagttttattctccttttccttcctcctggaatgagctgaacagaacctttcctcctggattccattttgggaacccagatgttttctccccctccaggcactgggcatggaggtgaccatggtacctggcaaaggacccagcttcccagagccattaagagaagagcaggacctagaacgcctacgggatccagaagtggtagcctctgagctaggctatgtgttccaagccatcacccttacccgacaacgactggctggacgtgtgccgctgattggctttgctggtgccccagtaatgtgggacagggcagggactcggggcgcggggagatcactctggaaggtctggggtagacaaaaggaagggtcagtctggcttctgtgacaccatctttctatccttctctagtggaccctgatgacatacatggttgagggtggtggctcaagcaccatggctcaggccaagcgctggctctatcagagacctcaggctagtcaccagctgcttcgcatcctcactgatgctctggtcccatatctggtaggacaagtggtggctggtgcccaggtgagtcctgagagagagagaaataggctgggatttggtctgtaaggaccagaagcaagagtgtcctaaacctgagagggcaggggtcttaatgccagggatgaaagaaccttggcctccagtgatctagcggagcagccaagcccatcctgacactgacagtggggcttaatgctctaagtattcagacaccaaagttagtgctgggatctgaggaaagtaaatttttttttttttaattactgggtttttagggtcaggcagtatcagggattgaagtcatttggggaaaattgaggtggattttgtatgtgggggaaacttcctctttgtgtgttacatatttttcttcaccataccctaactaggcattgcagctgtttgagtcccatgcagggcatcttggcccacagctcttcaacaagtttgcactgccttacatccgtgatgtggccaagcaagtgaaggccaggttgcgggaggcaggcctggcaccagtgcccatggtgaggattgggatgggttgagtgaaggtggtcctgtggagctttcaggctaagtcctgcatggactggagtgaccactggagggcagcagaagtacagtcaagaaagattagtggttgtagcaaggccctctgtagcctgagatctgcttttttctagatcatctttgctaaggatgggcattttgccctggaggagctggcccaagctggctatgaggtggttgggcttgactggacagtggccccaaagaaagcccggtaagccatggaagggtgaggccttgaggttgaggtgggggtgttggctgggggagctgccatgtatgcagttaccagaacgtggcgctggctttgcttccagggagtgtgtggggaagacggtgacattgcagggcaacctggacccctgtgccttgtatgcatctgaggtaacagccagggcccctctgtgtgtctgttactgtgcactcctgtggctgtggctgtattattctgtgtgcacttgtttttaatgtctgtctgtccttttcttctactctgtacaacataagccctagaaagaccggactttttgttgctgttgttcatttgtgtttatgcttcatgcctgggtccatactagggatctgataaattttattgaatgactgaataacactgagtagaagcatgcctacatatgcgtttgtcactagtatatatagggaggacaaaggcttgctggtcctcctgtagccagtgccctgttggtcccccaggaggagatcgggcagttggtgaagcagatgctggatgactttggaccacatcgctacattgccaacctgggccatgggctttatcctgacatggacccagaacatgtgggcgcctttgtggatgctgtgcataaacactcacgtctgcttcgacagaactgagtgtatacctttaccctcaagtaccactaacacagatgattgatcgtttccaggacaataaaagtttcggagttgaa

SEQ ID NO: 14840 - DNA, 1848 bp, Homo sapiens
acagacagctgaccatggaagcgaatgggttgggcctccagcgtagcatactgacacctacccccacccccacctgatcgccagacctcagggttttccggagctgaagaatgacacattcctgcgagcagcctggggagaggaaacagactacactcccgtttggtgcatgcgccaggcaggccgttacttaccagagtttagggaaacccgggctgcccaggactttttcagcacgtgtcgctctcctgaggcctgctgtgaactgactctgcaggtgaggggtccacaaaagagggaaagatttatgccttcagtctgccacctagcaacctgtctcctgtttcctacagccactgcgtcgcttccctctggatgctgccatcattttctccgacatccttgttgtaccccaggcactgggcatggaggtgaccatggtacctggcaaaggacccagcttcccagagccattaagagaagagcaggacctagaacgcctacgggatccagaagtggtagcctctgagctaggctatgtgttccaagccatcacccttacccgacaacgactggctggacgtgtgccgctgattggctttgctggtgccccatggaccctgatgacatacatggttgagggtggtggctcaagcaccatggctcaggccaagcgctggctctatcagagacctcaggctagtcaccagctgcttcgcatcctcactgatgctctggtcccatatctggtaggacaagtggtggctggtgcccaggtgagtcctgagagagagagaaataggctgggatttggtctgtaaggaccagaagcaagagtgtcctaaacctgagagggcaggggtcttaatgccagggatgaaagaaccttggcctccagtgatctagcggagcagccaagcccatcctgacactgacagtggggcttaatgctctaagtattcagacaccaaagttagtgctgggatctgaggaaagtaaatttttttttttttaattactgggtttttagggtcaggcagtatcagggattgaagtcatttggggaaaattgaggtggattttgtatgtgggggaaacttcctctttgtgtgttacatatttttcttcaccataccctaactaggcattgcagctgtttgagtcccatgcagggcatcttggcccacagctcttcaacaagtttgcactgccttacatccgtgatgtggccaagcaagtgaaggccaggttgcgggaggcaggcctggcaccagtgcccatggtgaggattgggatgggttgagtgaaggtggtcctgtggagctttcaggctaagtcctgcatggactggagtgaccactggagggcagcagaagtacagtcaagaaagattagtggttgtagcaaggccctctgtagcctgagatctgcttttttctagatcatctttgctaaggatgggcattttgccctggaggagctggcccaagctggctatgaggtggttgggcttgactggacagtggccccaaagaaagcccgggagtgtgtggggaagacggtgacattgcagggcaacctggacccctgtgccttgtatgcatctgaggaggagatcgggcagttggtgaagcagatgctggatgactttggaccacatcgctacattgccaacctgggccatgggctttatcctgacatggacccagaacatgtgggcgcctttgtggatgctgtgcataaacactcacgtctgcttcgacagaactgagtgtatacctttaccctcaagtaccactaacacagatgattgatcgtttccaggacaataaaagtttcggagttgaa

SEQ ID NO: 14841 - DNA, 1231 bp, Homo sapiens
cctcagggttttccggagctgaagaatgacacattcctgcgagcagcctggggagaggaaacagactacactcccgtttggtgcatgcgccaggcaggccgttacttaccaggtaagagtcagggtctggaaatctagataaaactccggagggagaaaagttttcgaggggcaggggagggctctggagggcctcaaggctgagccctgtcttccctctgtatgcagagtttagggaaacccgggctgcccaggactttttcagcacgtgtcgctctcctgaggcctgctgtgaactgactctgcaggtgaggggtccacaaaagagggaaagatttatgccttcagtctgccacctagcaacctgtctcctgtttcctacagccactgcgtcgcttccctctggatgctgccatcattttctccgacatccttgttgtaccccaggtacccactcaaacctgatcctagaatataatccaaggacgccttgaaaatccttctatcagtccagtcaaggtttacaataagcacttatcctaactggatcgagggaaaaactaaggttgaaagaaatggagtttggcagagttttattctccttttccttcctcctggaatgagctgaacagaacctttcctcctggattccattttgggaacccagatgttttctccccctccaggcactgggcatggaggtgaccatggtacctggcaaaggacccagcttcccagagccattaagagaagagcaggacctagaacgcctacgggatccagaagtggtagcctctgagctaggctatgtgttccaagccatcacccttacccgacaacgactggctggacgtgtgccgctgattggctttgctggtgccccagtaatgtgggacagggcagggactcggggcgcggggagatcactctggaaggtctggggtagacaaaaggaagggtcagtctggcttctgtgacaccatctttctatccttctctagtggaccctgatgacatacatggttgagggtggtggctcaagcaccatggctcaggccaagcgctggctctatcagagacctcaggctagtcaccagctgcttcgcatcctcactgatgctctggtcccatatctggtaggacaagtggtggctggtgcccaggtgagtcctgagagagagagaaataggctgggatttggtctgtaaggaccagaagcaagagtgtccta

SEQ ID NO: 14842 - DNA, 800 bp, Homo sapiens
cctcagggttttccggagctgaagaatgacacattcctgcgagcagcctggggagaggaaacagactacactcccgtttggtgcatgcgccaggcaggccgttacttaccagagtttagggaaacccgggctgcccaggactttttcagcacgtgtcgctctcctgaggcctgctgtgaactgactctgcagccactgcgtcgcttccctctggatgctgccatcattttctccgacatccttgttgtaccccaggcactgggcatggaggtgaccatggtacctggcaaaggacccagcttcccagagccattaagagaagagcaggacctagaacgcctacgggatccagaagtggtagcctctgagctaggctatgtgttccaagccatcacccttacccgacaacgactggctggacgtgtgccgctgattggctttgctggtgccccagtaatgtgggacagggcagggactcggggcgcggggagatcactctggaaggtctggggtagacaaaaggaagggtcagtctggcttctgtgacaccatctttctatccttctctagtggaccctgatgacatacatggttgagggtggtggctcaagcaccatggctcaggccaagcgctggctctatcagagacctcaggctagtcaccagctgcttcgcatcctcactgatgctctggtcccatatctggtaggacaagtggtggctggtgcccaggtgagtcctgagagagagagaaataggctgggatttggtctgtaaggaccagaagcaagagtgtccta

SEQ ID NO: 14843 - DNA, 3369 bp, Homo sapiens
gggcaggctcagattcaggttaaattgtggattgagctcgcagttacagacagctgaccatggaagcgaatgggttggggtgagttctccagagcacgcggtgtggctagccgggcttctaatttgagtcttccaactcaggactctatccctctactcccctttccccaccctggagacctcccaacctgaactccgttagctgggatcctgaatcctaaaaccatggatttttgagatgttcatcccagggccttaattcaagggatgcctcaggatttccaaccaggatctctattctgggaccatcaactctgatccctctttatcccccagcctgggtatttctcagcccctgaaccagcccagtgacattcccgtttctgaggctcactagttcgaagacccccaaactatccttagtgggccttcattccctccccccagtccctctggttgcttcgagcttggaagagtagagactaagtggagggaagaggccccagggcgggcccttctggagtttgtgcaccacctgataggcagagaggaggcggaacgggcggaaagccagggtttgggagctggcctggaggaggtagatagcggtcctggactgaatcggccttatgaacccgcgctttccccagcctccagcgtagcatactgacacctacccccacccccacctgatcgccagacctcagggttttccggagctgaagaatgacacattcctgcgagcagcctggggagaggaaacagactacactcccgtttggtgcatgcgccaggcaggccgttacttaccaggtaagagtcagggtctggaaatctagataaaactccggagggagaaaagttttcgaggggcaggggagggctctggagggcctcaaggctgagccctgtcttccctctgtatgcagagtttagggaaacccgggctgcccaggactttttcagcacgtgtcgctctcctgaggcctgctgtgaactgactctgcaggtgaggggtccacaaaagagggaaagatttatgccttcagtctgccacctagcaacctgtctcctgtttcctacagccactgcgtcgcttccctctggatgctgccatcattttctccgacatccttgttgtaccccaggtacccactcaaacctgatcctagaatataatccaaggacgccttgaaaatccttctatcagtccagtcaaggtttacaataagcacttatcctaactggatcgagggaaaaactaaggttgaaagaaatggagtttggcagagttttattctccttttccttcctcctggaatgagctgaacagaacctttcctcctggattccattttgggaacccagatgttttctccccctccaggcactgggcatggaggtgaccatggtacctggcaaaggacccagcttcccagagccattaagagaagagcaggacctagaacgcctacgggatccagaagtggtagcctctgagctaggctatgtgttccaagccatcacccttacccgacaacgactggctggacgtgtgccgctgattggctttgctggtgccccagtaatgtgggacagggcagggactcggggcgcggggagatcactctggaaggtctggggtagacaaaaggaagggtcagtctggcttctgtgacaccatctttctatccttctctagtggaccctgatgacatacatggttgagggtggtggctcaagcaccatggctcaggccaagcgctggctctatcagagacctcaggctagtcaccagctgcttcgcatcctcactgatgctctggtcccatatctggtaggacaagtggtggctggtgcccaggtgagtcctgagagagagagaaataggctgggatttggtctgtaaggaccagaagcaagagtgtcctaaacctgagagggcaggggtcttaatgccagggatgaaagaaccttggcctccagtgatctagcggagcagccaagcccatcctgacactgacagtggggcttaatgctctaagtattcagacaccaaagttagtgctgggatctgaggaaagtaaatttttttttttttaattactgggtttttagggtcaggcagtatcagggattgaagtcatttggggaaaattgaggtggattttgtatgtgggggaaacttcctctttgtgtgttacatatttttcttcaccataccctaactaggcattgcagctgtttgagtcccatgcagggcatcttggcccacagctcttcaacaagtttgcactgccttacatccgtgatgtggccaagcaagtgaaggccaggttgcgggaggcaggcctggcaccagtgcccatggtgaggattgggatgggttgagtgaaggtggtcctgtggagctttcaggctaagtcctgcatggactggagtgaccactggagggcagcagaagtacagtcaagaaagattagtggttgtagcaaggccctctgtagcctgagatctgcttttttctagatcatctttgctaaggatgggcattttgccctggaggagctggcccaagctggctatgaggtggttgggcttgactggacagtggccccaaagaaagcccggtaagccatggaagggtgaggccttgaggttgaggtgggggtgttggctgggggagctgccatgtatgcagttaccagaacgtggcgctggctttgcttccagggagtgtgtggggaagacggtgacattgcagggcaacctggacccctgtgccttgtatgcatctgaggtaacagccagggcccctctgtgtgtctgttactgtgcactcctgtggctgtggctgtattattctgtgtgcacttgtttttaatgtctgtctgtccttttcttctactctgtacaacataagccctagaaagaccggactttttgttgctgttgttcatttgtgtttatgcttcatgcctgggtccatactagggatctgataaattttattgaatgactgaataacactgagtagaagcatgcctacatatgcgtttgtcactagtatatatagggaggacaaaggcttgctggtcctcctgtagccagtgccctgttggtcccccaggaggagatcgggcagttggtgaagcagatgctggatgactttggaccacatcgctacattgccaacctgggccatgggctttatcctgacatggacccagaacatgtgggcgcctttgtggatgctgtgcataaacactcacgtctgcttcgacagaactgagtgtatacctttaccctcaagtaccactaacacagatgattgatcgtttccaggacaataaaagtttcggagttgaa

SEQ ID NO: 14844 - DNA, 1102 bp, Homo sapiens
gggcaggctcagattcaggttaaattgtggattgagctcgcagttacagacagctgaccatggaagcgaatgggttgggacctcagggttttccggagctgaagaatgacacattcctgcgagcagcctggggagaggaaacagactacactcccgtttggtgcatgcgccaggcaggccgttacttaccagagtttagggaaacccgggctgcccaggactttttcagcacgtgtcgctctcctgaggcctgctgtgaactgactctgcagccactgcgtcgcttccctctggatgctgccatcattttctccgacatccttgttgtaccccaggcactgggcatggaggtgaccatggtacctggcaaaggacccagcttcccagagccattaagagaagagcaggacctagaacgcctacgggatccagaagtggtagcctctgagctaggctatgtgttccaagccatcacccttacccgacaacgactggctggacgtgtgccgctgattggctttgctggtgccccatggaccctgatgacatacatggttgagggtggtggctcaagcaccatggctcaggccaagcgctggctctatcagagacctcaggctagtcaccagctgcttcgcatcctcactgatgctctggtcccatatctggtaggacaagtggtggctggtgcccagatcatctttgctaaggatgggcattttgccctggaggagctggcccaagctggctatgaggtggttgggcttgactggacagtggccccaaagaaagcccgggagtgtgtggggaagacggtgacattgcagggcaacctggacccctgtgccttgtatgcatctgaggaggagatcgggcagttggtgaagcagatgctggatgactttggaccacatcgctacattgccaacctgggccatgggctttatcctgacatggacccagaacatgtgggcgcctttgtggatgctgtgcataaacactcacgtctgcttcgacagaactgagtgtatacctttaccctcaagtaccactaacacagatgattgatcgtttccaggacaataaaagtttcggagttgaa

SEQ ID NO: 14845 - DNA, 3369 bp, Homo sapiens; identical to SEQ ID NO: 14843

SEQ ID NO: 14846 - DNA, 1173 bp, Homo sapiens
gggcaggctcagattcaggttaaattgtggattgagctcgcagttacagacagctgaccatggaagcgaatgggttgggacctcagggttttccggagctgaagaatgacacattcctgcgagcagcctggggagaggaaacagactacactcccgtttggtgcatgcgccaggcaggccgttacttaccagagtttagggaaacccgggctgcccaggactttttcagcacgtgtcgctctcctgaggcctgctgtgaactgactctgcagccactgcgtcgcttccctctggatgctgccatcattttctccgacatccttgttgtaccccaggcactgggcatggaggtgaccatggtacctggcaaaggacccagcttcccagagccattaagagaagagcaggacctagaacgcctacgggatccagaagtggtagcctctgagctaggctatgtgttccaagccatcacccttacccgacaacgactggctggacgtgtgccgctgattggctttgctggtgccccatggaccctgatgacatacatggttgagggtggtggctcaagcaccatggctcaggccaagcgctggctctatcagagacctcaggctagtcaccagctgcttcgcatcctcactgatgctctggtcccatatctggtaggacaagtggtggctggtgcccaggcattgcagctgtttgagtcccatgcagggcatcttggcccacagctcttcaacaagtttgcactgccttacatccgtgatgtggccaagcaagtgaaggccaggttgcgggaggcaggcctggcaccagtgcccatgatcatctttgctaaggatgggcattttgccctggaggagctggcccaagctggctatgaggtggttgggcttgactggacagtggccccaaagaaagcccggaggagatcgggcagttggtgaagcagatgctggatgactttggaccacatcgctacattgccaacctgggccatgggctttatcctgacatggacccagaacatgtgggcgcctttgtggatgctgtgcataaacactcacgtctgcttcgacagaactgagtgtatacctttaccctcaagtaccactaacacagatgattgatcgtttccaggacaataaaagtttcggagttgaa

SEQ ID NO: 14847 - DNA, 1788 bp, Homo sapiens
ggctggataagactgttggtatcatgagtgggacttgcgccaagcctccggatacccagactgtcagatgagaacaaattcctcatgtcaccgtaagatacatttacagcggagttttcttttgggcctttgttgttgcgtcgctacagcaaactttacggtgaaaaaaggtaggggtcctacgggcagcagccagggcagccctggagctgtcgctggagtccgatcatgtgatcttcaacatggcgacgctcttggttccctacagaaaggggcggagcctggactggggggcaggctcagattcaggttaaattgtggattgagctcgcagttacagacagctgaccatggaagcgaatgggttggggtgagttctccagagcacgcggtgtggctagccgggcttctaatttgagtcttccaactcaggactctatccctctactcccctttccccaccctggagacctcccaacctgaactccgttagctgggatcctgaatcctaaaaccatggatttttgagatgttcatcccagggccttaattcaagggatgcctcaggatttccaaccaggatctctattctgggaccatcaactctgatccctctttatcccccagcctgggtatttctcagcccctgaaccagcccagtgacattcccgtttctgaggctcactagttcgaagacccccaaactatccttagtgggccttcattccctccccccagtccctctggttgcttcgagcttggaagagtagagactaagtggagggaagaggccccagggcgggcccttctggagtttgtgcaccacctgataggcagagaggaggcggaacgggcggaaagccagggtttgggagctggcctggaggaggtagatagcggtcctggactgaatcggccttatgaacccgcgctttccccagcctccagcgtagcatactgacacctacccccacccccacctgatcgccagacctcagggttttccggagctgaagaatgacacattcctgcgagcagcctggggagaggaaacagactacactcccgtttggtgcatgcgccaggcaggccgttacttaccaggtaagagtcagggtctggaaatctagataaaactccggagggagaaaagttttcgaggggcaggggagggctctggagggcctcaaggctgagccctgtcttccctctgtatgcagagtttagggaaacccgggctgcccaggactttttcagcacgtgtcgctctcctgaggcctgctgtgaactgactctgcaggtgaggggtccacaaaagagggaaagatttatgccttcagtctgccacctagcaacctgtctcctgtttcctacagccactgcgtcgcttccctctggatgctgccatcattttctccgacatccttgttgtaccccaggtacccactcaaacctgatcctagaatataatccaaggacgccttgaaaatccttctatcagtccagtcaaggtttacaataagcacttatcctaactggatcgagggaaaaactaaggttgaaagaaatggagtttggcagagttttattctccttttccttcctcctggaatgagctgaacagaacctttcctcctggattccattttgggaacccagatgttttctccccctccaggcactgggcatggaggtgaccatggtacctggcaaaggacccagcttcccagagccattaagagaagagcaggacctagaacgcctacgggatccagaagtggtagcctc

SEQ ID NO: 14848 - DNA, 536 bp, Homo sapiens
ggctggataagactgttggtatcatgagtgggacttgcgccaagcctccggatacccagactgtcagatgagaacaaattcctcatgtcaccgtaagatacatttacagcggagttttcttttgggcctttgttgttgcgtcgctacagcaaactttacggtgaaaaaagacctcagggttttccggagctgaagaatgacacattcctgcgagcagcctggggagaggaaacagactacactcccgtttggtgcatgcgccaggcaggccgttacttaccagagtttagggaaacccgggctgcccaggactttttcagcacgtgtcgctctcctgaggcctgctgtgaactgactctgcagccactgcgtcgcttccctctggatgctgccatcattttctccgacatccttgttgtaccccaggcactgggcatggaggtgaccatggtacctggcaaaggacccagcttcccagagccattaagagaagagcaggacctagaacgcctacgggatccagaagtggtagcctc

SEQ ID NO: 14849 - DNA, 3414 bp, Homo sapiens
cgacgctcttggttccctacagaaaggggcggagcctggactggggggcaggctcagattcaggttaaattgtggattgagctcgcagttacagacagctgaccatggaagcgaatgggttggggtgagttctccagagcacgcggtgtggctagccgggcttctaatttgagtcttccaactcaggactctatccctctactcccctttccccaccctggagacctcccaacctgaactccgttagctgggatcctgaatcctaaaaccatggatttttgagatgttcatcccagggccttaattcaagggatgcctcaggatttccaaccaggatctctattctgggaccatcaactctgatccctctttatcccccagcctgggtatttctcagcccctgaaccagcccagtgacattcccgtttctgaggctcactagttcgaagacccccaaactatccttagtgggccttcattccctccccccagtccctctggttgcttcgagcttggaagagtagagactaagtggagggaagaggccccagggcgggcccttctggagtttgtgcaccacctgataggcagagaggaggcggaacgggcggaaagccagggtttgggagctggcctggaggaggtagatagcggtcctggactgaatcggccttatgaacccgcgctttccccagcctccagcgtagcatactgacacctacccccacccccacctgatcgccagacctcagggttttccggagctgaagaatgacacattcctgcgagcagcctggggagaggaaacagactacactcccgtttggtgcatgcgccaggcaggccgttacttaccaggtaagagtcagggtctggaaatctagataaaactccggagggagaaaagttttcgaggggcaggggagggctctggagggcctcaaggctgagccctgtcttccctctgtatgcagagtttagggaaacccgggctgcccaggactttttcagcacgtgtcgctctcctgaggcctgctgtgaactgactctgcaggtgaggggtccacaaaagagggaaagatttatgccttcagtctgccacctagcaacctgtctcctgtttcctacagccactgcgtcgcttccctctggatgctgccatcattttctccgacatccttgttgtaccccaggtacccactcaaacctgatcctagaatataatccaaggacgccttgaaaatccttctatcagtccagtcaaggtttacaataagcacttatcctaactggatcgagggaaaaactaaggttgaaagaaatggagtttggcagagttttattctccttttccttcctcctggaatgagctgaacagaacctttcctcctggattccattttgggaacccagatgttttctccccctccaggcactgggcatggaggtgaccatggtacctggcaaaggacccagcttcccagagccattaagagaagagcaggacctagaacgcctacgggatccagaagtggtagcctctgagctaggctatgtgttccaagccatcacccttacccgacaacgactggctggacgtgtgccgctgattggctttgctggtgccccagtaatgtgggacagggcagggactcggggcgcggggagatcactctggaaggtctggggtagacaaaaggaagggtcagtctggcttctgtgacaccatctttctatccttctctagtggaccctgatgacatacatggttgagggtggtggctcaagcaccatggctcaggccaagcgctggctctatcagagacctcaggctagtcaccagctgcttcgcatcctcactgatgctctggtcccatatctggtaggacaagtggtggctggtgcccaggtgagtcctgagagagagagaaataggctgggatttggtctgtaaggaccagaagcaagagtgtcctaaacctgagagggcaggggtcttaatgccagggatgaaagaaccttggcctccagtgatctagcggagcagccaagcccatcctgacactgacagtggggcttaatgctctaagtattcagacaccaaagttagtgctgggatctgaggaaagtaaatttttttttttttaattactgggtttttagggtcaggcagtatcagggattgaagtcatttggggaaaattgaggtggattttgtatgtgggggaaacttcctctttgtgtgttacatatttttcttcaccataccctaactaggcattgcagctgtttgagtcccatgcagggcatcttggcccacagctcttcaacaagtttgcactgccttacatccgtgatgtggccaagcaagtgaaggccaggttgcgggaggcaggcctggcaccagtgcccatggtgaggattgggatgggttgagtgaaggtggtcctgtggagctttcaggctaagtcctgcatggactggagtgaccactggagggcagcagaagtacagtcaagaaagattagtggttgtagcaaggccctctgtagcctgagatctgcttttttctagatcatctttgctaaggatgggcattttgccctggaggagctggcccaagctggctatgaggtggttgggcttgactggacagtggccccaaagaaagcccggtaagccatggaagggtgaggccttgaggttgaggtgggggtgttggctgggggagctgccatgtatgcagttaccagaacgtggcgctggctttgcttccagggagtgtgtggggaagacggtgacattgcagggcaacctggacccctgtgccttgtatgcatctgaggtaacagccagggcccctctgtgtgtctgttactgtgcactcctgtggctgtggctgtattattctgtgtgcacttgtttttaatgtctgtctgtccttttcttctactctgtacaacataagccctagaaagaccggactttttgttgctgttgttcatttgtgtttatgcttcatgcctgggtccatactagggatctgataaattttattgaatgactgaataacactgagtagaagcatgcctacatatgcgtttgtcactagtatatatagggaggacaaaggcttgctggtcctcctgtagccagtgccctgttggtcccccaggaggagatcgggcagttggtgaagcagatgctggatgactttggaccacatcgctacattgccaacctgggccatgggctttatcctgacatggacccagaacatgtgggcgcctttgtggatgctgtgcataaacactcacgtctgcttcgacagaactgagtgtatacctttaccctcaagtaccactaacacagatgattgatcgtttccaggacaataaaagtttcggagttgaa

SEQ ID NO: 14850 - DNA, 1335 bp, Homo sapiens
cgacgctcttggttccctacagaaaggggcggagcctggactggggggcaggctcagattcaggttaaattgtggattgagctcgcagttacagacagctgaccatggaagcgaatgggttgggcctccagcgtagcatactgacacctacccccacccccacctgatcgccagacctcagggttttccggagctgaagaatgacacattcctgcgagcagcctggggagaggaaacagactacactcccgtttggtgcatgcgccaggcaggccgttacttaccagagtttagggaaacccgggctgcccaggactttttcagcacgtgtcgctctcctgaggcctgctgtgaactgactctgcagccactgcgtcgcttccctctggatgctgccatcattttctccgacatccttgttgtaccccaggcactgggcatggaggtgaccatggtacctggcaaaggacccagcttcccagagccattaagagaagagcaggacctagaacgcctacgggatccagaagtggtagcctctgagctaggctatgtgttccaagccatcacccttacccgacaacgactggctggacgtgtgccgctgattggctttgctggtgccccatggaccctgatgacatacatggttgagggtggtggctcaagcaccatggctcaggccaagcgctggctctatcagagacctcaggctagtcaccagctgcttcgcatcctcactgatgctctggtcccatatctggtaggacaagtggtggctggtgcccaggcattgcagctgtttgagtcccatgcagggcatcttggcccacagctcttcaacaagtttgcactgccttacatccgtgatgtggccaagcaagtgaaggccaggttgcgggaggcaggcctggcaccagtgcccatgatcatctttgctaaggatgggcattttgccctggaggagctggcccaagctggctatgaggtggttgggcttgactggacagtggccccaaagaaagcccgggagtgtgtggggaagacggtgacattgcagggcaacctggacccctgtgccttgtatgcatctgaggaggagatcgggcagttggtgaagcagatgctggatgactttggaccacatcgctacattgccaacctgggccatgggctttatcctgacatggacccagaacatgtgggcgcctttgtggatgctgtgcataaacactcacgtctgcttcgacagaactgagtgtatacctttaccctcaagtaccactaacacagatgattgatcgtttccaggacaataaaagtttcggagttgaa

SEQ ID NO: 14851 - DNA, 4555 bp, Homo sapiens
caggcgccgcgccggagctcaatgctgtcgcgggcggcgcggaggggcccggagccggtaccgggggctgggcctgcggcgcccacacgcagccccaggccctctgcctcccacaccggcagaagcacgcgcgacggtcccgctgggtccttgtaaagcttgtagagcacctctcgcggcacgaaagccagcgctgctggcagcggccgcccggcgcggaggctccgcgctgcctctgccaagaagcgcacgcggcccagcagctgccggggggactccagcaccgcgcccgggccaggacccgccatggcgaagtggcggaggtgagcacctagaggcgaccctgcccggggaacagctggcgcgaccgcggacagagcttcccaccacgcccttccccgcctttggccagcctttgccgtatgttctggactaagcgcaccccagctctcactgtattggactgtgtactcccacactcaaccatattacttatctctgtgccaccctaacccagccgaccaaacccaagattggtgattgctacctgatcaatctccctctctccatttccttgtgactaccattttatctctactgctactaccctcattcaagtcaccattctagctagcctgggtcattgccaacagtcatttttctggttcttcggcctgctgtttttcctcccactcccagcgaatctgctggactccctatcctatgggtggtgtgattaaagtgtttgagacaatggccccttcccctgccactgacaggagtcttgagtcattagggttgattctgtttgtcactcctaatcccaaggacactggagatcattattcattttaatgtgattgctgatttctgtttccccagtcttgtagctccttaaaggctggggctgtcttgagcagagctaacctctgcacctactataggtccaggctatagtatggacctggctggataagactgttggtatcatgagtgggacttgcgccaagcctccggatacccagactgtcagatgagaacaaattcctcatgtcaccgtaagatacatttacagcggagttttcttttgggcctttgttgttgcgtcgctacagcaaactttacggtgaaaaaaggtaggggtcctacgggcagcagccagggcagccctggagctgtcgctggagtccgatcatgtgatcttcaacatggcgacgctcttggttccctacagaaaggggcggagcctggactggggggcaggctcagattcaggttaaattgtggattgagctcgcagttacagacagctgaccatggaagcgaatgggttggggtgagttctccagagcacgcggtgtggctagccgggcttctaatttgagtcttccaactcaggactctatccctctactcccctttccccaccctggagacctcccaacctgaactccgttagctgggatcctgaatcctaaaaccatggatttttgagatgttcatcccagggccttaattcaagggatgcctcaggatttccaaccaggatctctattctgggaccatcaactctgatccctctttatcccccagcctgggtatttctcagcccctgaaccagcccagtgacattcccgtttctgaggctcactagttcgaagacccccaaactatccttagtgggccttcattccctccccccagtccctctggttgcttcgagcttggaagagtagagactaagtggagggaagaggccccagggcgggcccttctggagtttgtgcaccacctgataggcagagaggaggcggaacgggcggaaagccagggtttgggagctggcctggaggaggtagatagcggtcctggactgaatcggccttatgaacccgcgctttccccagcctccagcgtagcatactgacacctacccccacccccacctgatcgccagacctcagggttttccggagctgaagaatgacacattcctgcgagcagcctggggagaggaaacagactacactcccgtttggtgcatgcgccaggcaggccgttacttaccaggtaagagtcagggtctggaaatctagataaaactccggagggagaaaagttttcgaggggcaggggagggctctggagggcctcaaggctgagccctgtcttccctctgtatgcagagtttagggaaacccgggctgcccaggactttttcagcacgtgtcgctctcctgaggcctgctgtgaactgactctgcaggtgaggggtccacaaaagagggaaagatttatgccttcagtctgccacctagcaacctgtctcctgtttcctacagccactgcgtcgcttccctctggatgctgccatcattttctccgacatccttgttgtaccccaggtacccactcaaacctgatcctagaatataatccaaggacgccttgaaaatccttctatcagtccagtcaaggtttacaataagcacttatcctaactggatcgagggaaaaactaaggttgaaagaaatggagtttggcagagttttattctccttttccttcctcctggaatgagctgaacagaacctttcctcctggattccattttgggaacccagatgttttctccccctccaggcactgggcatggaggtgaccatggtacctggcaaaggacccagcttcccagagccattaagagaagagcaggacctagaacgcctacgggatccagaagtggtagcctctgagctaggctatgtgttccaagccatcacccttacccgacaacgactggctggacgtgtgccgctgattggctttgctggtgccccagtaatgtgggacagggcagggactcggggcgcggggagatcactctggaaggtctggggtagacaaaaggaagggtcagtctggcttctgtgacaccatctttctatccttctctagtggaccctgatgacatacatggttgagggtggtggctcaagcaccatggctcaggccaagcgctggctctatcagagacctcaggctagtcaccagctgcttcgcatcctcactgatgctctggtcccatatctggtaggacaagtggtggctggtgcccaggtgagtcctgagagagagagaaataggctgggatttggtctgtaaggaccagaagcaagagtgtcctaaacctgagagggcaggggtcttaatgccagggatgaaagaaccttggcctccagtgatctagcggagcagccaagcccatcctgacactgacagtggggcttaatgctctaagtattcagacaccaaagttagtgctgggatctgaggaaagtaaatttttttttttttaattactgggtttttagggtcaggcagtatcagggattgaagtcatttggggaaaattgaggtggattttgtatgtgggggaaacttcctctttgtgtgttacatatttttcttcaccataccctaactaggcattgcagctgtttgagtcccatgcagggcatcttggcccacagctcttcaacaagtttgcactgccttacatccgtgatgtggccaagcaagtgaaggccaggttgcgggaggcaggcctggcaccagtgcccatggtgaggattgggatgggttgagtgaaggtggtcctgtggagctttcaggctaagtcctgcatggactggagtgaccactggagggcagcagaagtacagtcaagaaagattagtggttgtagcaaggccctctgtagcctgagatctgcttttttctagatcatctttgctaaggatgggcattttgccctggaggagctggcccaagctggctatgaggtggttgggcttgactggacagtggccccaaagaaagcccggtaagccatggaagggtgaggccttgaggttgaggtgggggtgttggctgggggagctgccatgtatgcagttaccagaacgtggcgctggctttgcttccagggagtgtgtggggaagacggtgacattgcagggcaacctggacccctgtgccttgtatgcatctgaggtaacagccagggcccctctgtgtgtctgttactgtgcactcctgtggctgtggctgtattattctgtgtgcacttgtttttaatgtctgtctgtccttttcttctactctgtacaacataagccctagaaagaccggactttttgttgctgttgttcatttgtgtttatgcttcatgcctgggtccatactagggatctgataaattttattgaatgactgaataacactgagtagaagcatgcctacatatgcgtttgtcactagtatatatagggaggacaaaggcttgctggtcctcctgtagccagtgccctgttggtcccccaggaggagatcgggcagttggtgaagcagatgctggatgactttggaccacatcgctacattgccaacctgggccatgggctttatcctgacatggacccagaacatgtgggcgcctttgtggatgctgtgcataaacactcacgtctgcttcgacagaactgagtgtat

SEQ ID NO: 14852 - DNA, 2138 bp, Homo sapiens
caggcgccgcgccggagctcaatgctgtcgcgggcggcgcggaggggcccggagccggtaccgggggctgggcctgcggcgcccacacgcagccccaggccctctgcctcccacaccggcagaagcacgcgcgacggtcccgctgggtccttgtaaagcttgtagagcacctctcgcggcacgaaagccagcgctgctggcagcggccgcccggcgcggaggctccgcgctgcctctgccaagaagcgcacgcggcccagcagctgccggggggactccagcaccgcgcccgggccaggacccgccatggcgaagtggcggaggtgagcacctagaggcgaccctgcccggggaacagctggcgcgaccgcggacagagcttcccaccacgcccttccccgcctttggccagcctttgccgtatgttctggactaagcgcaccccagctctcactgtattggactgtgtactcccacactcaaccatattacttatctctgtgccaccctaacccagccgaccaaacccaagattggtgattgctacctgatcaatctccctctctccatttccttgtgactaccattttatctctactgctactaccctcattcaagtcaccattctagctagcctgggtcattgccaacagtcatttttctggttcttcggcctgctgtttttcctcccactcccagcgaatctgctggactccctatcctatgggtggtgtgattaaagtgtttgagacaatggccccttcccctgccactgacaggagtcttgagtcattagggttgattctgtttgtcactcctaatcccaaggacactggagatcattattcattttaatgtgattgctgatttctgtttccccagtcttgtagctccttaaaggctggggctgtcttgagcagagctaacctctgcacctactataggtccaggctatagtatggacctggctggataagactgttggtatcatgagtgggacttgcgccaagcctccggatacccagactgtcagatgagaacaaattcctcatgtcaccgtaagatacatttacagcggagttttcttttgggcctttgttgttgcgtcgctacagcaaactttacggtgaaaaaagcctccagcgtagcatactgacacctacccccacccccacctgatcgccagacctcagggttttccggagctgaagaatgacacattcctgcgagcagcctggggagaggaaacagactacactcccgtttggtgcatgcgccaggcaggccgttacttaccagagtttagggaaacccgggctgcccaggactttttcagcacgtgtcgctctcctgaggcctgctgtgaactgactctgcagccactgcgtcgcttccctctggatgctgccatcattttctccgacatccttgttgtaccccaggcactgggcatggaggtgaccatggtacctggcaaaggacccagcttcccagagccattaagagaagagcaggacctagaacgcctacgggatccagaagtggtagcctctgagctaggctatgtgttccaagccatcacccttacccgacaacgactggctggacgtgtgccgctgattggctttgctggtgccccatggaccctgatgacatacatggttgagggtggtggctcaagcaccatggctcaggccaagcgctggctctatcagagacctcaggctagtcaccagctgcttcgcatcctcactgatgctctggtcccatatctggtaggacaagtggtggctggtgcccagatcatctttgctaaggatgggcattttgccctggaggagctggcccaagctggctatgaggtggttgggcttgactggacagtggccccaaagaaagcccgggagtgtgtggggaagacggtgacattgcagggcaacctggacccctgtgccttgtatgcatctgaggaggagatcgggcagttggtgaagcagatgctggatgactttggaccacatcgctacattgccaacctgggccatgggctttatcctgacatggacccagaacatgtgggcgcctttgtggatgctgtgcataaacactcacgtctgcttcgacagaactgagtgtat

SEQ ID NO: 14853 - DNA, 3369 bp, Homo sapiens; identical to SEQ ID NO: 14843

SEQ ID NO: 14854 - DNA, 1177 bp, Homo sapiens
gggcaggctcagattcaggttaaattgtggattgagctcgcagttacagacagctgaccatggaagcgaatgggttgggacctcagggttttccggagctgaagaatgacacattcctgcgagcagcctggggagaggaaacagactacactcccgtttggtgcatgcgccaggcaggccgttacttaccagagtttagggaaacccgggctgcccaggactttttcagcacgtgtcgctctcctgaggcctgctgtgaactgactctgcaggcactgggcatggaggtgaccatggtacctggcaaaggacccagcttcccagagccattaagagaagagcaggacctagaacgcctacgggatccagaagtggtagcctctgagctaggctatgtgttccaagccatcacccttacccgacaacgactggctggacgtgtgccgctgattggctttgctggtgccccatggaccctgatgacatacatggttgagggtggtggctcaagcaccatggctcaggccaagcgctggctctatcagagacctcaggctagtcaccagctgcttcgcatcctcactgatgctctggtcccatatctggtaggacaagtggtggctggtgcccaggcattgcagctgtttgagtcccatgcagggcatcttggcccacagctcttcaacaagtttgcactgccttacatccgtgatgtggccaagcaagtgaaggccaggttgcgggaggcaggcctggcaccagtgcccatgatcatctttgctaaggatgggcattttgccctggaggagctggcccaagctggctatgaggtggttgggcttgactggacagtggccccaaagaaagcccgggagtgtgtggggaagacggtgacattgcagggcaacctggacccctgtgccttgtatgcatctgaggaggagatcgggcagttggtgaagcagatgctggatgactttggaccacatcgctacattgccaacctgggccatgggctttatcctgacatggacccagaacatgtgggcgcctttgtggatgctgtgcataaacactcacgtctgcttcgacagaactgagtgtatacctttaccctcaagtaccactaacacagatgattgatcgtttccaggacaataaaagtttcggagttgaa

SEQ ID NO: 14855 - DNA, 2641 bp, Homo sapiens
gacacattcctgcgagcagcctggggagaggaaacagactacactcccgtttggtgcatgcgccaggcaggccgttacttaccaggtaagagtcagggtctggaaatctagataaaactccggagggagaaaagttttcgaggggcaggggagggctctggagggcctcaaggctgagccctgtcttccctctgtatgcagagtttagggaaacccgggctgcccaggactttttcagcacgtgtcgctctcctgaggcctgctgtgaactgactctgcaggtgaggggtccacaaaagagggaaagatttatgccttcagtctgccacctagcaacctgtctcctgtttcctacagccactgcgtcgcttccctctggatgctgccatcattttctccgacatccttgttgtaccccaggtacccactcaaacctgatcctagaatataatccaaggacgccttgaaaatccttctatcagtccagtcaaggtttacaataagcacttatcctaactggatcgagggaaaaactaaggttgaaagaaatggagtttggcagagttttattctccttttccttcctcctggaatgagctgaacagaacctttcctcctggattccattttgggaacccagatgttttctccccctccaggcactgggcatggaggtgaccatggtacctggcaaaggacccagcttcccagagccattaagagaagagcaggacctagaacgcctacgggatccagaagtggtagcctctgagctaggctatgtgttccaagccatcacccttacccgacaacgactggctggacgtgtgccgctgattggctttgctggtgccccagtaatgtgggacagggcagggactcggggcgcggggagatcactctggaaggtctggggtagacaaaaggaagggtcagtctggcttctgtgacaccatctttctatccttctctagtggaccctgatgacatacatggttgagggtggtggctcaagcaccatggctcaggccaagcgctggctctatcagagacctcaggctagtcaccagctgcttcgcatcctcactgatgctctggtcccatatctggtaggacaagtggtggctggtgcccaggtgagtcctgagagagagagaaataggctgggatttggtctgtaaggaccagaagcaagagtgtcctaaacctgagagggcaggggtcttaatgccagggatgaaagaaccttggcctccagtgatctagcggagcagccaagcccatcctgacactgacagtggggcttaatgctctaagtattcagacaccaaagttagtgctgggatctgaggaaagtaaatttttttttttttaattactgggtttttagggtcaggcagtatcagggattgaagtcatttggggaaaattgaggtggattttgtatgtgggggaaacttcctctttgtgtgttacatatttttcttcaccataccctaactaggcattgcagctgtttgagtcccatgcagggcatcttggcccacagctcttcaacaagtttgcactgccttacatccgtgatgtggccaagcaagtgaaggccaggttgcgggaggcaggcctggcaccagtgcccatggtgaggattgggatgggttgagtgaaggtggtcctgtggagctttcaggctaagtcctgcatggactggagtgaccactggagggcagcagaagtacagtcaagaaagattagtggttgtagcaaggccctctgtagcctgagatctgcttttttctagatcatctttgctaaggatgggcattttgccctggaggagctggcccaagctggctatgaggtggttgggcttgactggacagtggccccaaagaaagcccggtaagccatggaagggtgaggccttgaggttgaggtgggggtgttggctgggggagctgccatgtatgcagttaccagaacgtggcgctggctttgcttccagggagtgtgtggggaagacggtgacattgcagggcaacctggacccctgtgccttgtatgcatctgaggtaacagccagggcccctctgtgtgtctgttactgtgcactcctgtggctgtggctgtattattctgtgtgcacttgtttttaatgtctgtctgtccttttcttctactctgtacaacataagccctagaaagaccggactttttgttgctgttgttcatttgtgtttatgcttcatgcctgggtccatactagggatctgataaattttattgaatgactgaataacactgagtagaagcatgcctacatatgcgtttgtcactagtatatatagggaggacaaaggcttgctggtcctcctgtagccagtgccctgttggtcccccaggaggagatcgggcagttggtgaagcagatgctggatgactttggaccacatcgctacattgccaacctgggccatgggctttatcctgacatggacccagaacatgtgggcgcctttgtggatgctgtgcataaacactcacgtctgcttcgacagaactgagtgtatacctttaccctcaagtaccactaacacagatgattgatcgtttccaggacaataaaagtttcggagttgaa

SEQ ID NO: 14856 - DNA, 1142 bp, Homo sapiens
gacacattcctgcgagcagcctggggagaggaaacagactacactcccgtttggtgcatgcgccaggcaggccgttacttaccagagtttagggaaacccgggctgcccaggactttttcagcacgtgtcgctctcctgaggcctgctgtgaactgactctgcaggtacccactcaaacctgatcctagaatataatccaaggacgccttgaaaatccttctatcagtccagtcaaggcactgggcatggaggtgaccatggtacctggcaaaggacccagcttcccagagccattaagagaagagcaggacctagaacgcctacgggatccagaagtggtagcctctgagctaggctatgtgttccaagccatcacccttacccgacaacgactggctggacgtgtgccgctgattggctttgctggtgccccatggaccctgatgacatacatggttgagggtggtggctcaagcaccatggctcaggccaagcgctggctctatcagagacctcaggctagtcaccagctgcttcgcatcctcactgatgctctggtcccatatctggtaggacaagtggtggctggtgcccaggcattgcagctgtttgagtcccatgcagggcatcttggcccacagctcttcaacaagtttgcactgccttacatccgtgatgtggccaagcaagtgaaggccaggttgcgggaggcaggcctggcaccagtgcccatgatcatctttgctaaggatgggcattttgccctggaggagctggcccaagctggctatgaggtggttgggcttgactggacagtggccccaaagaaagcccgggagtgtgtggggaagacggtgacattgcagggcaacctggacccctgtgccttgtatgcatctgaggaggagatcgggcagttggtgaagcagatgctggatgactttggaccacatcgctacattgccaacctgggccatgggctttatcctgacatggacccagaacatgtgggcgcctttgtggatgctgtgcataaacactcacgtctgcttcgacagaactgagtgtatacctttaccctcaagtaccactaacacagatgattgatcgtttccaggacaataaaagtttcggagttgaa

SEQ ID NO: 14857 - DNA, 4545 bp, Homo sapiens
acagtgtccgccgcttcctggttgcgggtcagcgcccaggtcctgggctggccgccgggatgttgccctacacagtgaacttcaaggtgtcggcgcgcaccctcacgggggccctcaacgcccacaacaaggcggcggtggactggggctggcaaggtttaattgcttatggatgtcattcacttgtggtagtgattgattccattactgcccaaactcttcaagttttagaaaagcataaagctgatgttgtaaaggttaaatgggccagggaaaactatcaccataacattggctcaccatattgcttacggttagcttctgctgatgtcaatgggaagatcatcgtctgggatgtagcagcaggagtagctcagtgtgagatccaagagcatgccaagcctatccaggatgttcagtggttgtggaatcaagatgcttcccgcgatttactgcttgctatccacccgccaaattacattgtgctctggaatgccgacactggcaccaaactatggaagaagagctatgcagataacattctttctttttcttttgacccttttgatccctcacatttaactttgcttaccagcgagggtattgttttcatctcagacttctccccatccaagcctccctcaggccctgggaaaaaagtttacatatccagcccacactctagcccagctcataacaagctggccacagccacaggtgccaagaaagctctaaataaagtaaaaattttaatcactcaagagaaacctagtgctgaattcataactctcaatgattgccttcagttggcatacctgccttcaaaaaggaatcacatgttgttgctctatcctcgagagattttaatccttgaccttgaggtgaatcagacggtgggtgtgattgcaatagaacgcacaggagttccatttttacaggtaataccctgctttcagcgtgatggtttattttgtctacatgaaaatggttgtataactttacgtgttcgaagatcttataataacatttttaccacttcaaatgaggaaccagatccagatccagttcaggagcttacctatgatttacgaagccagtgtgatgcaatcagggtgacaaaaaccgtccgtcccttcagtatggtgtgctgtcctgtcaatgagaatgcagccgccctcgtagtgagtgatggcagggtcatgatatgggaactcaagtctgcagtttgtaatcgaaattcacggaacagtagttctggtgtgtcacctttatattcaccagtgtctttctgtggaattcctgtaggagtgctacagaataaactcccagacctttccttagataacatgattgggcaaagtgcaattgctggggaagaacatcccagaggttcaattctgcgggaagtgcacctcaagttcctgctgacgggactgctttcaggactgcccgcaccacagtttgctattcgtatgtgtccaccgttgaccacaaaaaacatcaagatgtatcagccactgctggctgttggtacaagtaatggttctgtcctggtgtaccatctcaccagtggtctgctacacaaagagttaagcatccactcatgtgaagtcaagggtattgaatggacaagtttgactagttttctttcttttgctacctcaacaccaaacaatatgggattagtgagaaatgaacttcaactggttgatcttccaacaggtaggagcattgcttttcgtggtgaaagaggcaatgatgaatctgccatcgaaatgattaaagtatctcatttgaagcagtatttggcagtcgtattcagagataaacccctggagctatgggatgttaggacttgtacccttcttagagagatgtccaaaaacttccctacaataactgctttggagtggtcaccatctcacaacttgaagagcctgagaaagaagcaacttgcaactcgagaggccatggcccgccagaccgtagtctcagacacagagctgagtattgttgaatcatctgtgatcagcttgctgcaggaggcagaaagtaaatctgaacttagtcagaacatctctgcccgggaacattttgtatttaccgatattgatggccaagtgtatcatctcactgttgaaggaaactcagtaaaagacagtgctcggattccaccagatggaagtatgggtagtattacctgcatcgcttggaaaggtgatacattagtgcttggagatatggatggaaatttaaatttctgggacttgaaaggcagagtatccagaggaatacccacacaccgaagttgggtgaggaagattcgttttgctcctggtaaaggaaatcaaaaattaatagcaatgtacaatgatggagctgaagtgtgggatactaaagaggttcagatggtgagcagtttaagaagtggcagaaatgtgacctttcgtatattggatgtggactggtgtacgtcagataaagtgatcttggcctcagatgatgggtgcatcagagtcctagagatgtctatgaagtctgcgtgctttagaatggatgaacaagagttaaccgagcctgtgtggtgcccctatctccttgttccaagggcctctcttgccttgaaagccttcttattacaccagccttggaatggacagtattctttggacatttctcatgttgactatccagaaaatgaagaaataaagaatctcctccaagaacagttgaattcattgtctaatgacataaagaaactgttgcttgatccagaattcactctcttgcagaggtgcctgcttgtttcaaggctctatggtgatgaatcggagctgcacttctggactgtcgctgcccactacctgcacagcttatcccaggaaaagtcagccagcacaacagctcctaaagaagctgctcctcgagacaaactgagcaacccactggatatatgctatgacgtgctctgtgaaaatgcctactttcagaaatttcagctagaaagggttaatctgcaggaagtgaaacggtcaacttatgatcatacaaggaaatgtacagaccagctactgctcttgggtcaaacagacagagctgtgcagttgctgttggaaacaagtgcagataaccagcattattactgtgattcactgaaagcctgtttagtcactactgtcacctcgtcaggcccctctcagagcaccattaagttggtggcaacgaatatgattgccaatggcaaattggcagagggcgttcagttgctctgcctgatagataaggctgcagacgcctgccgctacctgcagacatacggcgagtggaatcgggctgcatggctggcaaaagtccgtttgaatcctgaggagtgtgccgatgttttaaggcggtgggttgaccacctttgttctccacaagtcaatcagaaatcaaaggctctcctggttctcctctctctgggctgcttttttagcgtggcagagacgcttcacagcatgagatactttgatagagcagccttatttgtggaagcttgcctcaagtatggagcatttgaagtcactgaggacacagagaaactcatcactgctatatatgcagattatgcccggagtttgaagaacctcggttttaagcagggagcagttctctttgcttcaaaagccggagcagctggcaaagacttattgaatgagcttgagtcccccaaggaagaacccattgaagagtgacagcttaataaatgccagggaatctgacctggaaggcagatgggagggggctggtctggctgtggccaccgtcacagtccaggatgaagaggagtacagggtcctgtgagctgtttgaccactgttctaagactatgtgtgcccaaaagcacataagcatctatgttgagagtaagtttgtatcctgcgttggtctcagaaagaacgtgaatgcttaagattttgaaagtacataatattttatactttgggagagagctttaagagtccctggaaatactttttaatttttttaacttaaaattcaagagactgaatcacttttctcattgattaaatgtaaagattattgagaaacctatagtaaatgaaatttgtgagatgttttctcaaatatatgctgtgcctgtacttatatacagtctttcaagagagatacaaacaaggcagaaacatttaaactagtattaaaggtagtttaccaaagcattttttgttttcttaccttgaaaacacagaaccgttaattccttggtttaagcagttgctaagttttgtaattttaggctcagaggaccataggaggttttaagatttatgtttagtccgataggtgaggtctttgatattttgaattttaactccttttatgatacatcacagtaacctcatttttgaagtctttctttgtactttaatgttctctctgttctaatagttgaagtatgagatgtaactattataaactgttgctgaaaacataaatgtctgtaacttacaaacatgataaataaattaaaaattccatcca

SEQ ID NO: 14858 - DNA, 2742 bp, Homo sapiens
ttatttagaagaacaaacacttgttctttctgccaataaccttatgttatctttttaatataagacataatatagaatgccaagcttggaggcctctgatgaattgtaatggaccacctgtttctcttcaacttagagaacattcccattatgttatgaatgcataacattgccagttatatattattaaaattatcactatattgctctcaaaattgtattggaataaaactgtatgctaaacttcattaaactttaatcagagttttgcttttctcaatatagtgcttaccagcgagggtattgttttcatctcagacttctccccatccaagcctccctcaggccctgggaaaaaagtttacatatccagcccacactctagcccagctcataacaagctggccacagccacaggtgccaagaaagctctaaataaagtaaaaattttaatcactcaagagaaacctaggtaagttacaagtgtaaaattaacattcatctacttatctggtatgaaagcatcatttttggagatgtacaaagactgatgtttttcttcatctcactttttctcatttctaattttgaatttattagaggaaaaaaatatttatttttgtcccctgccctaagaggagattcagcatttaacattgcctttgtttccactagctgtgctaaacttccccactgacttttatagattaaaatttttgaattctgatttttacttgtgaaaatcgcaatgatcctaaagttcaggcaattgaatgcattaaaaatttgggcacaaaagctggatactcattttaaatacattttcctgacttaggtgctgtgcattctcattcagcagtaaaatcggagtgtttttcttatgcaggtgaagatgtctcccatcctggttaagagccaaggctccgggggaagctttagctatgagactgagaaacttctttaatcttactcaaatttctctctcccagtctctaaaataaggctttaaagtatttcatagggttgttttaaagatcaatagatccaataatgtaagtaaagcatgtaatgtcattgatacatagtaatttatttagaagatgtcggctgttattaagaaattacaactgaataaaagtttattttaagtaatttgatgtattcaaaataggtttctttctttttcctatagcaataatctgtatattattgctttggcaggcttttttgtttgttttggcattcattttcagatagcctttatttttaatatgccaagattactctctctaggcttggtgagtaactacttgaaaaatatgtggtaaaaatataaattgctctacaaatacattttgcacttgtgtgtaagtatcacttctatatattaagccataggctggttaagttcactagttaatttatctctcaccctgtgccaaaatgacttaagattacttcttaagtatcttaagagaactttctattttttatgtattccctctcataaacaagaaattatttggcagtctgaatagttttataagttatgttttatatttcttaagttttctctcatatgaattatatgtatatcttgagtattggggaaatacattatttcttcaagtagaaccgctctgggtgctttcacatctattaattcctggactcttactacaattctggcagtagtaatattcccattttacaaataaggaaaactgagtcccacaccaatttaaataaagttactcaagctcacccaactaggacatggcagtcgggattttaatgcaataaaaattcctctttctagtcttgtgaactaactttattttaaatttcaaagccttttaataaaattatgtttgtaaaatgaaatgtaaaatgaaaatagtacataattgtatgtctattcctattgaaatatatttaatatagaaaaggtcattgaatgtatgcaacaatcacaaattattaaaatgatttttcagaccctaacaatctcttaaaatccttatagtttcacctgttttatttacacacaagaaaatgctgcaatataagtgaaactttgtttcaaaaaagatttaagacagcttaaaagtgaatgaaggcagccaaggggaagttacttgcccaaagccatacagatagtccagtaactcctggtccaggggccctaattaccctaaatgttgatgtttttcatcctgagtcttgattttaacagtttgcctagtacttttaatgacaaagtaaaagtaaaataaaactgtcttatgcatgccagctattattatattatcatttaccatgtcttgtgtaatattaataacttaatattctactacttaatatttcaaaaacttagaaacactgacatttctacccatcctatacaatattattagcatttggattttggtacatagtagagatctaagttttggatgccaacccatgttggtcacttcagggaatagttgtacatttttattgtcaatttttatgtgtaaagtacaaaattaaatcttttattaggtctgatataaatgaagtctttgacccaagtgaatgtttacttttttcagtgctgaattcataactctcaatgattgccttcagttggcatacctgccttcaaaaaggaatcacatgttgttgctctatcctcgagagattttaatccttgaccttgaggtgaatcagacggtgggtgtgattgcaatagaacgc

SEQ ID NO: 14859 - DNA, 617 bp, Homo sapiens
ttatttagaagaacaaacacttgttctttctgccaataaccttatgttatctttttaatataagacataatatagaatgccaagcttggaggcctctgatgaattgtaatggaccacctgtttctcttcaacttagagaacattcccattatgttatgaatgcataacattgccagttatatattattaaaattatcactatattgctctcaaaattgtattggaataaaactgtatgctaaacttcattaaactttaatcagagttttgcttttctcaatatagtgcttaccagcgagggtattgttttcatctcagacttctccccatccaagcctccctcaggccctgggaaaaaagtttacatatccagcccacactctagcccagctcataacaagctggccacagccacaggtgccaagaaagctctaaataaagtaaaaattttaatcactcaagagaaacctagtgctgaattcataactctcaatgattgccttcagttggcatacctgccttcaaaaaggaatcacatgttgttgctctatcctcgagagattttaatccttgaccttgaggtgaatcagacggtgggtgtgattgcaatagaacgc

SEQ ID NO: 14860 - DNA, 7016 bp, Homo sapiens
cctctctcttttcctctcctccagcttccaggcttctctctctccaccattaattccctgtgcactttctctttcccatcctgtcttttctttttcgttgtcttgtattcctgttgtctttcaacaatgtgccagaccctgtgctaggcgcctgttctttcacctgtccttttcacctcttttcgggctcctcctgtgtagaacattcctgccttcaacaggtcgtctttattactctctcctttcactataaattactactgcagctctgaaaactactcattagacaaatgtaaagcaaaattctgtggctgtgggatgttgttaggaggactgaaacgtcttgtgcagtgtttgtcgttttatttagttggaaggactaggattagtcgcagtatccccaggcacattgtggatactaaggattagaaatcggataagcgaaagacgtatgcctacaagaacagtcagagggcacaagttcctttttatgtcctcgggtctctattttcatatcttttagaactttttttatccgaatgaaaagtgaatttcaacaagcattttaagcttagccagatcttttatttaagtgggataatgataaatactggcctttgggtttaaatgattttattaatggtggtacatatgaattagacttatcatttatttaggcttggcaagaaagaagtcgtcctgctttgttctgtacttaaactttaacattactgttttgctaggggctggcaaggtttaattgcttatggatgtcattcacttgtggtagtgattgattccattactgcccaaactcttcaagttttagaaaagcataaagctgatgttgtaaaggtaagtaaaatcccactttgacgctaacatgttgtctagtctaaagtttaatactgtgtatcactaagctctcattaagtcttacgtgtaagtgttgaatagcttttaaatataacaacctatttggggtagcctagaattttcatatatatgacttaatgtcaatacagggtgagttattaaatgctagttgttagatcattttaaggcagatgaaagttctaccatttacaagaccactcagtcattccttagttttgagcacttaccatatgctatggatatggagatgaaagccctcagataattctccatcttataaggaagactcacagcgtgatagtgtgataagtgagacttgcgtaacacgctgtgagaaaacagaggagctgcatattgcctggttgtgaggagagtcacagaagtctacagtttcaagactagtagacagtagttagccaagtaaaaaattgacaaggagcattgcagggaaaagcaagaatatacacagaagtaagtagcgtgccataaagatggctaaagatgggacacttgtaggagtgatgaaataagaggcagccagagagattcagctgtctgtcctgaagttttgtaagattacgaaggagtttggattttttttttttttagacagaatctcactctgtcgcccaggctggagtgcagtggcatgatctcggctcactgtaagctccacatcctgggttcacgccattctcctgcctcagcctcctgagtagctgggactacaggcacccaccaccatgcccagctaattttttgtatttttagtagagaccgggtttcaccatgttagccaggatggtctcgagctcctgacctcgtgatccacccgccttggcctcccaaagtgctgggattacaggtgtgagtcaccgcgcccagcaggaatttggatttttgagtaggagattgatgtgaccatattcgcgtcttagaaaaactctggcagcagtggaggatctgctgaagaaatgcaagactggaggcagtaagatcatttaggagatttctgcagtaattttggtgggaaattctaagggcctaaaataaagctggggcatggagaagtcatgtttaagagcagcaaagaggtaaacctgatagcctttatagtgatcagtataaaggagagtaagagaatagagtgactccaaggtttcttttggtgtaattgaatgacagtgtttccagttatcagaggtaagcatctgtgaagtcagtgaatttttaagttttcaacatgcaaaatctgagatgcctgtaatatattgcattatagtgatccgggctttaggagataggtcaggattagagatagagatttggagtctttttcttttttaaataatagctttattgagatactcataccataaaatgtactgacttaaaatgcacaattctgtggcttttagtatatccacagttaatgcagccacaattacaatgaacttttttacctcaaaaagaaaccctatatccactagcagtcatattccatttcccccatttccctcatcctttggcaaccactgacctactttctgtgtctgtagactggcccattctggggattttatataaattgaatcatataatttgtggtcttttgtgcatgacttctttcacttaggataatgttttcatggttcatctgcgttgtagcatatatcaatactctgttactgatgaataatattccactgtaaggatgtatcacatttattttattgatggacatttggatattttgtactttttgcctgttacgaataatgctgctttgcacattcatgtgcaagttttgtgtgaacctgtgttttcatttcccttgagtatgtttctaggggtggaattactgactcatatggtaactctgtttaactttttgaggaactgctggactgttttccaaattaacattctcattagtagtgtatgaggagtctaatttgtccaaatcctcaccaacgcttgctgttctctgttcttttgattataaccatcctaatgggtatgaattgattctcattgtggctttggtttgcatttccctgatggctaaaggtgtggagtatcttttcatgtgcttattggccatttgtatatcttctttggagaaatgtctatgcaggtcctttgcccattttaaaattgtattatttatctttttataattgagtcgtaagatttctttgtatacagtagtcctcccttatccagaagggaaatgttccaagaccccagtggaagcctgaaaccctggatagtactgaaccctatatatattgtgctttttctcatacatacttacttatgataaagtttataaaccaaaccctgtatatactgttttgtctcatacatacttacctatgatcaagtttataaattaggcataataagagattaacaacaataactaataataataaaggagaacaattataacaatacatcagcattactactcttgcactttgggggcattataaagtaaaataagggttacttgaacatagcactgagatatcacaacagttgatctgataatcagtatggctactgagggcaggtggtgtatacagcatggatgttctggacaaagggatgatttatgattaaggcaggatggaacaggacagtgggagatttcatcatgctattcagaaaagcgcataatttatgaattgtttatttttagacttttttgtgtcatatgtttggattgatacatgatttgcaaatattttctctcaatttgtgggttgtctttttactttcttggtggtgtcttttgaagaacaaaactttttcattttgatgtagtccaatttattattttgtattgttgttgcttgtactttttgtgccatatccaagaaaccattgctttctccaatatcaagaagatatatacctttgtttttttcttagaattttagagctttagcttttaatccattttgagttaatttttatatatgatgtgaaatagggaaaaatactattaatttttgtttattgatcatatcctgtaatctagctaacttcacttagtagatctatttaatagtaattttgggtaaattttttttaagtagacagtcatgtcactgcaagtgactgcagtttaatgttttcattgataatctgtgtgtcttctatttttcttgccatgttgcattggctaggacctctactacaatgaatgggagagtagtgagaggatactcttgtcctgttcctgagcttagggggaaagtattcagtctttcatcaagtctgatgtaaggtatagggtgttttgggaaaaatatatttaccttctctttccctctctgtttcctttcccctacactgccccttggcatttctggagcttttatttctttatgtaggtccaagtttcagtctggtattatattcccatcgactgaagaatttactgtaagttcttaaagtgcctgtctaatattggttgattctcttagcttttatttctctgagaaagtatttcacctttgttttcgaaagataattttcaaaggatatagaattctgggtttataatttttttttctagtagtactttacaaatatcattccattggccaggcatggtggctcacacctgtaatcccaacactctgggaggccgaggtggatggatcacctggggtcaggagtttgagactagcctggccaacaaggcaaaacctcatctctactaaaaatacaaaaattagccaggcgtggtggtacacacctgtaatcccagctacttgggaggctgaggcaggagaacagcttaaacctgggaggtggaggttgcagtgagctgagatagtgccactgcactccagcctcggcaacagaataagactctgtctccaaaaaaaaaaaaaaaaaaaaatccctccactatcttcaagcttacatagtttctgatgaaaaatttttgtttttgtttctctgcattatatcttttttcctccgattatcttcaagatttccttaaccttggttttcaatagtttgattattaaaatatatatatatatggcttggagtttacctaaatggaattcaacatatacatatacaaatatatacacatatacaaacatatatatacacatagagacagtcaattcttgttatttgtggtagctatattctgtaaagttgttgtatacactgaattagtgaatactgaaactttgtttgctcctaggggttaggttcttgtgaggctctggtcacaacattttcatcaactgatcaatagataaccttgctttatatgtgtttccgtttaaagacatattaatatgtcagttgatctattaacattgaactcatagccaacaacacatgcctgagcaaagattatcacatatatatatatgtatgtattttttgcaagacacatcacaacttctcatacttagaaacggtaggcagtatgcttggggacctatttaaacagtgaagtcaccagcaaaaggaacaaaaatgtgaaaaatgtggtactaaataaatcatgagatgaacacttgttttgccattggaaaagctaaagcaagaattcttgtttgacttcagctgggaacacacatgtatgttcggtgacatttttttcaccattctgcacttgtccacaaaagcactgcaagtattgattttgaggttgcaaattatagtgagtaggtaaattgacaaatacagaatctataaataactagaatggactgtgtacacatatatacactatacatattctattcatacacattctatacctatgaacttaaacatatacacatacaaatatgcatacacacatacatatgcatatatacacatacctcatttaaaaatttttgcctgagcaaaagatctattacaggaaaaccttaaggcctgttcacgctcattttcagaaaacgttgtttccatctttttcatgaatactactgcaattggttggcttactttcctaccttagcattatatatgagtgtatttatatctgtacacatatataggtatatacatttatatgtatttatagatttgtggtatttaaatctacttattaaacagaccttggacactgtactaagtctgagaatagaaatgcaaacaaagaccacatggtgtgccctatggaacttacagttgatggactcatgaataggcaaaaagaatgtaaataaaataagtacaaattgtgtagtagtaaatgctttgaagaaaataagcaggatactgagaagagaggggtggtagtgaccagggaaggcctgactcctagtgaggactatgaaatttttcccttattctgtcagtattcattgttcaagaatttaatcagatttgccctggagttcatgtgttttttattttaaaaattctattgttaatcatgttgctataggcatgaagcatttttttttttttagagaaaaacttaatgttttgtgaaagagagagacagctagagttttttgtttgactttgccttctcctgactttccctctgcaaggtttttgtgtttctaagttgtcttcttttagttaggagactagaatacagaaaaacattctgctaaatatgattttaggtattttgtcataaattagatcttaggaaaactgattttcaaggcatcctggggttttaacctaaatttcccaaaatattaaggctgtgaatcatttttcatcacaggatctttgtgatgtgtcaaagaaaacaattttgtaactgcagttaaagatatctaccaaagtaacacaaatgctgccttcaaaatgaaaaccagttttctgtttattcttgctaaatgtttatgtaatataaatgtagtatgggttctggttgatgttttgtgaaaattatgttctgtttcatccagcgcaagtatttacttgatctgatttcttcttgatacaggttaaatgggccagggaaaactatcaccataacattggctcaccatattgcttacggttagcttctgctgatgtcaatgggaagatcatcgtctgggatgtagcagcaggagtagctcagtgtgagatccaagagcatgccaagcctatccagg

SEQ ID NO: 14861 - DNA, 1009 bp, Homo sapiens
cctctctcttttcctctcctccagcttccaggcttctctctctccaccattaattccctgtgcactttctctttcccatcctgtcttttctttttcgttgtcttgtattcctgttgtctttcaacaatgtgccagaccctgtgctaggcgcctgttctttcacctgtccttttcacctcttttcgggctcctcctgtgtagaacattcctgccttcaacaggtcgtctttattactctctcctttcactataaattactactgcagctctgaaaactactcattagacaaatgtaaagcaaaattctgtggctgtgggatgttgttaggaggactgaaacgtcttgtgcagtgtttgtcgttttatttagttggaaggactaggattagtcgcagtatccccaggcacattgtggatactaaggattagaaatcggataagcgaaagacgtatgcctacaagaacagtcagagggcacaagttcctttttatgtcctcgggtctctattttcatatcttttagaactttttttatccgaatgaaaagtgaatttcaacaagcattttaagcttagccagatcttttatttaagtgggataatgataaatactggcctttgggtttaaatgattttattaatggtggtacatatgaattagacttatcatttatttaggcttggcaagaaagaagtcgtcctgctttgttctgtacttaaactttaacattactgttttgctaggggctggcaaggtttaattgcttatggatgtcattcacttgtggtagtgattgattccattactgcccaaactcttcaagttttagaaaagcataaagctgatgttgtaaaggttaaatgggccagggaaaactatcaccataacattggctcaccatattgcttacggttagcttctgctgatgtcaatgggaagatcatcgtctgggatgtagcagcaggagtagctcagtgtgagatccaagagcatgccaagcctatccagg

SEQ ID NO: 14862 - DNA, 17358 bp, Homo sapiens
cgagaggccatggcccgccagaccgtagtctcagacacagagctgagtattgttgaatcatctgtgatcaggtacagtacagtgtttcttgacactgtcatttgtgccattagcatcatgtctgggaagttgacaagtatcatcggaaggtgtctatggtagcaagttggactctgcttttgaacatacttagtttcatctttcagtacatacccagattactaaaaagataattttatcatttttagtattgtactatactgtttgttataactaataacatatgcagtaatattcacccatcagcatctagtagtaaatgtgctcattccgagtgcccttctactccatacacttcagcttctgaaattcaaatgaacatagcatagacatacagatagatcatattatcatttatacacaccaaagaaaatgtgttgggaatcctaaatttgtgtatcatccccatccataccaatcttacagataaaaggcttcagagataatgttgggtcactgtacagcctcccttctgttgagcacagttctatagccaaaatctctatgaattttatttttcttgtgttaagtttagatcaccatttctctctgtgcagggtaaacttcctctgatgttgtggctgttaaggagtgattcatgtttacccataattagctgggcaaatattagtttcagacttttaaaaaaatagttttggacctcctcttaatgcgtctgtactttgggcaagttaattaattatgagtatcactctaggggaaaaaaaaacatctttatcatatgtttcactatcccaaagcttgctgcaggaggcagaaagtaaatctgaacttagtcagaacatctctgcccgggaacattttgtatttaccgatattgatggccaagtgtatcatctcactgttgaaggaaactcagtaaaagacagtgctcggattccaccagatgtgagtacaaccttgattaaatcttcatcaagaagattttgttttgttggttccatatccagtgaaggcatagttaagttggaaacttcagaaaagcctaatgtaaataaactttatttaaggagatattatcgattaaacttgttccatactgctagagaataacgctgtaactattttgattaaatgtttactgtgtgctactcatttttatccctgtaataatccatgaggagttatctccattttacccataacaaaactgtgggagaataagtaactttcccaaagttatccagcttactcatatggcagagcagtgttttaaactcaggcctgtctgacttcagtatctgtcttctttccatttcaggcattaccctgaaggatttgacttacaatctagtattatttttggataatagtaatcaggttgtaagtgtaatagtattattaacatttactaacttacatatattcttatggccttgtggaatctgtaactaaagttttgccattaatcatttgtgtcagcatgcatctcatagatagtttttaatagatggatcatgaaaatgtttatgttaattaatgcaggctattataatggttaaatgaaggcatgaggggattttttaaaataggtatatttattttaaattgctatctaaaaatggaatgctctagtagaatgccaacccccataattttataggtggctttggggtctcataaagttacaatctagatgttggctgtggctacagtcttttgaagtgtaatgggacagaaggatctatttccaagttggctgcctcacaggctattgcacattaatgctggctgttgacgagggaccttagttcttcatgtcgatctttccataaggctgcttgagtgtcctcacgacatgacaactggcctcccctagagtaagtgatctgataaagcaagaaggaagttgcagagtctattatgacctggtttcagaagtctcttcaaaggcaacttcttaattaaacattctattttatggctaggaaagtagatatcttaaaatgttgcttcatattatatacagaatttcatttctttaatatttttttttattaatggactttattataatattgatttttaaatccagtttttgttttgtttcttgactattaccagagtttttacggtattcagtgtgtgtgctagtccactaatggtcaattattcaaaccactagagttttcttactttttaccatggataccatttgaatttttatgttgtacaataaatgcaaaaataaaatttcttttaataaatagagaagtaattgagcagtaatattatttaatagctaacatgtattgactatttactgcatggcaggcattgctttaaggcctttgcctttataaatttattaatactagcaacaactcaagtttcatgaacttaccctactttatggacaataaatccaagacagaaaggttaagtaaacatgcctcaaatcacataccagtttcaagctgggattcaagcccaggcagtgtgactgcagagcccaggctgctgagccctccatgataccacctctgagcatctattagaactgcaagttcctttcttcctccaagttagattgactacagcagcatttcattcttatgttgtgcttctatatgtaacttctgagcaaagctttctgtgaatttaaactgcatatgcctttagtaaacagcatctcttcaccttcatgattccacaatgttccaaaacgtgtcagtgaagctctggatccttttttcaatagaaaaatcacggcacaattagttataaaagagctttaagtttcccttggaatggatttagttatccttttgcagtgagagataagtttgagttggctctctggaaaaccttccctttacttctctgtttttcttactttaatttcccccttttttttttgaggtatttgttcctcaaaagacatcccctctctttaaatctagttccagtaactacttaatgtctatgaagttgaaatctcctatttcttcatagttgaaattgataggcaatgtagctctttgttagtgtctaaagtctgttttaggatttgatgactaaaagcatactaaagcacagccctttaaattaagttttattaaaatatttattataatgtcttatacagcatagtgaaatttatatttgtttgttgctgttgttttctagggaagtatgggtagtattacctgcatcgcttggaaaggtgatacattagtgcttggagatatggatggaaatttaaatttctgggacttgaaaggcagagtatccaggtataagccaagaatgaaatcttgttatttcattaaaaaaaagaaatgaaatctttttgttttgttttgttgagatggtgtcttgctctgtcgcccaggctggagtgcagtggtgcaatctcggctcactgcaagctctgactcccgggttcatgccattctcctgcctcagccacccgagtagctgggactacaggcacccaccaccacgcccggctaatttttttgtatttttttagtagagacgggatttcaccatgttagccaggatggtctcgatctcctgacctcgtgatccgcccacctcggcctcccaaagtgctgggattacaggcaggagccagcacacccggccaaaaaatgacatcttgatatggttccattagaggcttgtgacttggcaagaaggatcagtaaactcgtggaggtgtagcttggacccttgggtcccttcacctaaacttgggaggatgggccttgagccaagcattcttaggagatagttatctgcaagtggcccctgcagaagtcttagctgaccttaaagggcaggccctttctgtcagatgtggcccccagtcccagcaagtaaagggttctcccatcatcagacctgttagaaatggaaatagtgagagatgttagacatagcttctggtgaccagatctcactctacattgtattgatgtttttgtttctttgtcttcagaggaatacccacacaccgaagttgggtgaggaagattcgttttgctcctggtaaaggaaatcaaaaattaatagcaatgtacaatgatggagctgaagtgtgggatactaaagaggtaggccctctccatgaggataaaacgtaaataaattgttagccataggaactgtgctttgttaaaaaacttctttctgatttagaaatgaaaagtacttaatgagttcgtcaagtttcccataacaaattattttctttactttacagtatttgtgttctaaaggtaacaactcaagatttatttatttatttatttatttatttttattttttattttgatatggagtttcactcttgtcgcccaggctggagtgcaatggcgcgatctcgacttattgcagcctccacctcctgggttcaagtgactctcctgcctcagcctccctagtagctgggattataggcatgtgccaccacgcccggctaatgttttgtatttttagtagagacagggtttcgccatgttgggcaggctggtctcaaactcctgacctgaggtgatctgcccgcctcagcctcctaaagtcctgggattataggcgtcagccaccgcgcccagccgatttatttattttttaatattatcactgtctctgagacctttaaaatgctgcctatttgtggaagatagattgccagaggctgttcagttctaaacttgaactgggcctttgccacagactgtcttccttgaccatttaatctagaataataaagatcttccttttctgtctggaagtgatgcccaaattcactcttgaaggttcagatggtgagcagtttaagaagtggcagaaatgtgacctttcgtatattggatgtggactggtgtacgtcagataaagtgatcttggcctcagatgatgggtgcatcagagtcctagagatgtctatgaagtctgcgtgctttagaatggatgaacaagagttaaccggtatggaatcctaatgatagggggctttgaaacctgtctttactttgccacaagctcttgtattttggggagagagctgctgcttctgtttcatttcagtcttattttcttagaatctgagtttaagaaaatatattaacttgaagcttgagtgtttttactgctgagatgctgcaatctttgtaactatagatgtcaatcattctcaattcaggttttttaagtgccccttttgactcttttctttggtttgttaacaagataaaagatgtttatgtttataaaaatggcttactcagaatttaggcaaactcatcagaggacataaatctagtgataaggctgctggctttttaataatggccttatgtcttttgcaaccatatatcattgaaaagtcactttagaaagtgttctgagtattatgaattttgatgccaatctgtgactagtaaaatgaccagtcaagcaaattagcagattgcagtatcttgctctgttttgtatggttgttttgacattgctttttaccagaataaaaagcattttagtagaatatactccatatatgacttctaaaaaaaaaaagaatgggacaattgtgaatgcatccatttatcagtttaaaaggcagcttttggctgatgcaatacagtgttcatccttggaagatacttgatcctacttggagtggaggagggaacttcttgcctgagtattctcccagcaaaactttggtgcacactctaggctgatatgtagaaaatttcatgagacttttctgaacctttgtagagtcaatatttggcacttcagacacagtaaggttttaaaaacctggtttttcactttgtgttcatgcttgaggcactactgagttgctgctaatgttagcagggctgcctttaacttagttaggtatgctttggtttttgtcactgcccacccctgcccactgcatttgggcaccaccacttcttactatgtaactgactgccatcaggtgaagccagaattcaagacctacattcccatgtctgtccttgtgtcgtttgccagctctggggaagcaccaggatggcctcctaggaaagggcaagcattggtattcattttaaacctaaaggtattgaggacattgaaggaacttcaagggtggtttttgaaaaaattggttactaattctagataaagaagtgtggaactgctatctaaatgtttgaagagcttttccttcacttttaatataaaatttgaatctaaaaagctccaaagtcaaggtgtagcttgttcttaaattaaactgactacagaaatggagtccattgtattaacccatgttcaataccatacttgaacatctggcctgtggccagattttagatcacatgtttcttttaaaatttttctgatttttttttatattcttttcaatctctaatgttacagcctcagccagaaagagaaaactaaatagcaattgggaaaggtcatgcaattgtgtattcattccacaaattgaacttcaaattcagaacaacccttaataaatgttaaagaatgaaaactatggtagtgtaaatgtggagtgaggaaaaagacatctgtgtgttcacctccagattcatggccgatttggtcttgaggaaaaaaagtttgaggtagtatatttctattctgaggaattagaagtatatttggggcttactgacatgggataaaaataaaataggtcctaacattggtgtttcctatgttttcttcaattctccttgaaaacaagtagagaacgtaaaatattgattcacatctgtacattttcttagagcagcttagataggccacttcttcctccaataaagagggggcagtcagacaaattagaagattagaattcctgtttttgagttggagaacctttcttatcggctgcctaatatgtcagggacacaaagagccatcaaaataaatcttaatagtctttttagcagcatctaaaaggaatgcaagaatatgagactgtttaatagcattctggtatcatgcagtttccacaccctttaaatagtattgacttgatatcagggactgttcaacctaatttcctccccagtgttttttttttttaattttattattattatactttaagttttagggtacatgtgcacaacgtgcaggtttgttacatatgtatacatgtgccatgttggtgtgctgcacccattaactcatcatttagcattaggtatatctcctaatgctatccctcccccctccctccaccccacaacagtcccaggtgtgtgatgttccccttcctgtgtccatgtgttctcattgttcaattcccatctgtgagtgagaacatgcggtgtttggttttttgtccttttgatagtttgctgagaatgatgatttccagcttcatccatgtccctacaaatgacatgaactcatcattctttatggctgcatagtattccatggtgtatatgtgccacattttcttaatccagtctatgattgttggacatttaggttggttccaagtctttgctattgtgaatagtgccgtaataaacatacatgtgcatgtgtctttatagtagcatgatttataatcctttgggtatatacccagtaatgggatggctgggtcaaatggtatttctagttctagatccctgaggaatcgccacactgacttccacaatggttgaactagtttacagtcccaccaacagtgtaaaagtgttcctatttctccacatcctctccagcacctgttgtttcctgactttttaatgattgccattctaactggtgtgagatggtatctcactgtggttttgagttgcatttctctgatggccagtgatgatgagcattttttcatgtgttttttggctgcataaatgtcttcttttgagaagtgtctgttcatatccttcgcccactttttgatggggttgtttgtttttttcttgtaaatttgtttgagttcattgtagattctggatattagcccttcgtcagatgagtaggttgcaaaatttttctcccattctgtaggttgcctgttcactctgatggtagtttcttttgctgtgcagaagctctttagtttaattagatcccatttgtcaattttggcttttgttgccattgcttttggtgttttagacatgaagtccttgcccatgcctatgtcctgaatggtattgcctaggttttcttctagggtttttatggttttaggtctaacatgtaagtctttaatccatcttgaatgaatttttgtataaggtgtaaggaagggatccagtttcagctttctacatatggctagccagttttcccctccccagtgttaaaggccactgctaagcacatttttcctaagtaagcatatatagaaagaagctttctgaaatcagatttctgcacaaacctttcctcttcatctgccacagctttccacagtcattttcggtaatcttggggcattcagaaatgtctcacaatgacttgccgatgtggggaggtctggggatgctaaacaacctggaacgatctggcgcaatgaagaattgtcctgccccaaacgccagtagtgttccttagctctctttttcaccgttcattgaatcacactgaacaaaatcacaaaatatggtcctttccttcccagacttccagctcaccttaatgttgccatttccaagtggtggaggaataacttttttctactgattttcttcttggctctttgcttactgattttctgcattcctgtcatgtaggtagctaaaaacctgggtgttatgattcatacctcacataactttagcccagatggagcagaatccgtgacaaacagcaatgatgctaactgcttttgcattctaattgtgtaattttcagaggtgaatgagctcttgcatgtgagtttctccagatgtgagatgatctcctattactttttcatggctgatctttacctttcagaagaaagatttcaattcatttgagggagggaagtagttaagggtcactttcagtttgttcatgctcattgggatgctgtcaacaatattttgcttttggagaaataacatatttgttttaaaaaataaggtatttccctccttttattcagacttggtaaatgttgtcttgcttgcatgatgtaaacactcgatgctgccttctacgtggattctcttgtatcttttcgtttgttcattgattaagaaattaccacacagcatgagaactttccctgaaccattccaagattattatgtatagttaatttttttccctgacatttaccatttccaaacatactgtgatataataccaacaactatctacatgaatctacctaaaacatatacatatgctatctaaaatatgaatggggctgacttgagaattatatagattgtcgtctatgaaggatgaatagaaagaaagttaagtaagctagccacctgcatccctttcagtgttaagtgttcagtgcttctgtaggtagttagataagcctcatttttccaagatgcaatccttcctttatagcccagatgtaaaagaaaagatgactaagtggaaattaaaaaaaaaaattcaaagcaaaagaaaatctttaataagaataaacgaaagtgttcaataagcaaagccaaatacaaatgattacctggaggaaagtaattcacaagtcacagactgtctacagaggggcaaaacagataaacaaatgatgcttcaacatatgaaatgatactcaactttatttataataagaaaaatatttgacctcctactggtaaggataaaagaagaaaataattttaaaaagtaaatttttaaaaagagaaaaatacaaattaaaattgtttcttacctatcagattcaaaagcttgaaaatatactctgttggcaaggctatgaggaaacaagcactctcatccattgctaacagtaagatccctataggaaggaatttggcaatatctaacagagctacatgcacatttacctttttacccagcaatcccagcgctaagaatttatcttaagatgtacattcataccctgtgaccaaaatgcacacaaagttattcatagcaaaattttgaaaaaagccgaactgcttagccgtaggagattggttgaataaatctggggacatctgcagaatggagtaatctatgcagctgtaaaatagtgaggaatagctctgtgacctgatgtagagtgatatccaggatatgtgtaagtgaaaaatgcaagtgtaaaagagcacgtatagcctgcttgtgtacaaaggcggattttatacataggttcatgcacacgtttgcttactaaaacacacaccacacatacacagaataatccagaaaccaatgagaatagttagaagatgtagatggaaaaatggagagtatggggatagcagtgaaacttctctatctttgttatacagtttcaagttttgaaccatttatatattttatatattaaaaatacacagtgaaaacaagagtgaagaaaaagcaaaccctaaaattgaatgcaagacacagttgaaccaaactgtgtaacaacaatattggtaacataaccacacacacacacaaaaacagttcaaataactaaaacacagaacttcccattcactgcacacctttagtggtttatattctaaggacagaattgctaaggaatgttgaactttaccggggtagttgatggtgacactagtaattctgaagctgttttgtgcatgttgtagtctggaacacattagtaaccaaattgcagttttggggagccaagatctgtgctgatagaaagggagatatggatgggaaatggcggtggtgggaagaaacattccaggggtggatttgggttggtaaaaaatcatgacttcttgaacatgtatgttccctggctctgctcacagagagttttcttgcaatgacactcaatggcagtgagcgcacatagcacccagattttactttgcaagttccatttccaggctaaaaggagccagagctctttggacaaaaagtttatttcaggacagaggcacaaaaggtgcaagatgggtctggggcatcttgtggtgccagaattcaagtaaggaattgaaaaaccaaggaggacctgacataagaggcttctcctgtcaaactgggggtagtctgagcatcacgaaaactaatggtggtattgatgtaagtgcagaataccaaagaaaccctcactccatagtaatagtcacagtaaggaaacgggaagtgggcaagaagcaaaagctcaggtggacagaagaatgccagctgacaaatgcggaaagaataagattagaaaatcaccactttgcagccccgatacaataattaattgtatacacaagcaaggatcacttgtggatgtcaaatcactgagtaaaaggatgtttgagaataggaaattcaatctgacaatatttcctccacatattacttactaattaattatacagtggagaaggtgccctgataagagctctggtgaataccccttatctagatgatcagatttagtgtttcctgtaaccagacagctaacatgttccttctgatgcaatgcagtgaaaagtacacagcatcctttgttcagactctgtcaaaaatgtttaacccgaatctgataatcagaaaacagacaagttagaacgtagggcattctccacagcagctgaccaggactcttcaaaaatgaaaaggtcacataaggccaaaaccaaaaaggaagaggaccattctagattggaatagactaaagagacatgacaatgcagtgtaccagccttgactggacccgatttttaaaaataatacagctgccaggacatttggggaataacaagggacttttgaatttggactgcattttaagtgattttactgaatcaatattaaaattcttgggtgtaaaaaaaaagtattattaaaaatatttccaatcactttctggcttttaaattgaaaaatccacataaaatattttgtgtataatttaatttttatttaactacatagaataaagttttctaaagcagagttttccaatagaaacataatgtgagccacataggtaagcttaaattctagtatccacattttaaaaagtaaaaagagatgaaattgattttaattaaaattttatttaagccaatatatccaaagttttatttcaacatataatcagtattaaaagttactagtgagacattttacttttttaaaattattcattcttcaaaattctgtcagtattttacatttattgtaaaatgaattgccctcaaaatttataggacaaattttcagcacaaacagttaagctctatttagattttataaaattttcagttgaaaaagtaggcatgtattcaagttgtttcaaacatatttaaaagttatccaatgactgaatcaataatcactttttaagtttaaattagacaaacattcatttccttcattatactagccatatgttaagtgactatcatattggatatcatactggataattgcacagtccagagttgatgtggatcactgatacgatttggctctgtgtctccacccaaatctcatgtcaaattgtaatctccacaggtcaggggaggcagctggtagggggtgattggatcatgggggcagatttcccccttactgttctcacgatagtaagtgagttcttaggagatctgatggcttaaaagtgtggcacttgccccctcgctggctctctcctgctgccatgtaagatgtgccttgcttccccttcaccttctgccatgattgtaagtttgcctccccagccatacggaactgttgagtcaattaaacctcttctctttataaattaccctgtctcaggtagttctttacagcagcatgaaaacagacaaatacagtcacttaaataagccaacaccatgtataagtttgtgtcattttacataattgtgtctattcaagggatccatggataaagcctcttcaggattctggaggggagttggtagtaaggccaagttgtaaaagccagggcacccctagaaatttggagctaaggtcgagtccgatagagtgtagggtggtcagagcagagctgctgggcattgcagcctttaggtcttctgcttctttgcactgaaacatgttgacaactaggcaaatcttgcttgttagtgttctaagtaagccagctgctggatgtgggggatgctagggcctagagtctaagaagatagcccctgtgttcaacagctacctttataagtgagacctgggaatgctagtgatcacaggtggcatgatcccttcagtgacatactcaaggttgataggccatgttagttgaatagtctcggaaaaacaaaagtacatacaggtaaatatatttatttttaatatttaaaaataatgaactttgttgctatttgttgaatcattgcattgaatcctttattcaagtagtaccagagttgtataccacacaggatacttaaattttaaaggggaaaagaaggccgggtgtggtagctcatgcctataatcccaggactttgggaggccaaggtgggcagatcacctgaggtcaggagtttgagaccagtctggccaacatggtgaaaccccatctctactaaaaatgcaaaaattagccaggcatggtggcaggtgcttgtaatcccagttacttcggaggctgaggcaggagaatcgcttgaacccgggaggcggaggttgctgtgagccgagatcgcaccaccgcactccagcctaggtgacagagcgaggctttgtctcaaaaaaaaaataaaataaaaaatcaaaaaagggggaaaagaaaaatatgttaatcagatttgaatgcagagactctctctgctcttggcttgtgtttcctaagcggtgactacattgaatatactctcagttgttccagatttacctgttgctctctgctgactgctctgtaaatggtttatagctgaagcttcactgtagtataaaacttcattttatttttaaaaacctttctttgttgtctagagcctgtgtggtgcccctatctccttgttccaagggcctctcttgccttgaaagccttcttattacaccagccttggaatggacagtattctttggacatttctcatgtgtaagtttttcacttttctttttctttcataatttacttggggttgaaagacacccatgaaagtcagccatggcctgtactccagcatttaaagggaatggagcctttaaagccgagagaaggcagagacactacagaattgccaggctgcctctgggttctcgggcctttgtggaagtgtgggtcagtgaggagctgtgagggcgtgtattgctctcaggtggctgtgtgcttgtcttatggtctgaacatggatgtgtcgtgatgatgaaaaggatgcgtgtgaagagggcaatggaaggcaggagaatttggagccgggcacgttctttttaaaagcagcatcattagcttcagggatatactgtgtcttaaaaatctcaatatttgcctcattgcaaaaaaatattcacagaaactattagtgtttattaattaaattcacaaatattactgaactcctgccatgtgcagcacggatggaggatttaaaaataatgccaggaagtgtctgttctccaagcactgtctcctcagaatattcattctgcagagctctaaatgagcagattcctttagtaacattgttaagttcttcattaaaaggaatctaaacctgatagattttaaagcctgcttataaatttcctggtttcttgaaagccaaggagactttctttactcattttcttgtttttgactcaataagataaaagcagatattaaagttgattggtggggtcctgagtagattgttgttattttggtctataaccaggtttctaaccaagaactacgaagaaggttatctctatattaacacaacttttttcaggtgaagaaatacgtggttttaagtgaagagataatgaactcattcaaaattttttctttacagtgactatccagaaaatgaagaaataaagaatctcctccaagaacagttgaattcattgtctaagtaagcactccatgtttcattagaagataggaatatgagaaagaaaaatgcaattcaactttaaatgcaattcaaaattaaaataagttacgttttagaaaatattagtggcccaagaagagaccattctgtttagaggtttgcttcccgttagagtctgtgttttgcagaaaaagtacttattcagtagttacagtgacagagcatctgtcttcaccaagttcatgagcaccagctgctctgatctcacatcaaggcaggactagatgcatagtgggagcatccttgtagctcagcttgcctctactacaaacctccatgaagcctcacagcgggagacgaatcgcagggtgattctgggtctgcttcccgcttctaaaatgagttctctgtgtcaggtgctggtgtgcacaggtctggctaagaaattaatgtgctccctagagccaagggcatttaacagaatgtactgggaataagaaaggaaaaaatatgggtctacaaggagttcttggggaaagcgtaacacatttttgcaatctagaatctgttacatataattatagtatttaacaaattaagcatgatattttattgacggaaaattcaaaataattagttttttctatgcaaagattaacatttatgtttaaatgggaaactatagatttaaagaatgtcttcctttctgatttgtgaatattcagtattttactattttagaaatacgaacttataaaagcacaagccattcttccttagatactttatttttggaatagtttcagaataaattacgaatgtcatcttctttaaagtatttactgttcttgatgattttttcaacaatggcattcttgttccagtagttaggcagctaatactttcaaaaactgttgtaagcctataaaccagaaatgagagcgctgcagctccctgtggtggctgaaagctgctgcttctccaagccttgagaacactctcagcccccttcaacttttataatttcagggtcatggtaaagtaccttgtcttgtgtaaattctaaacatgttatttgactggaatttttcatttcaagagtatattgatcaacccccatgctttattgtttgattgaaaacttttgtctcacttttgtccggatttcttccacagtgacataaagaaactgttgcttgatccagaattcactctcttgcagaggtgcctgcttgtttcaaggtaatattgtttgatgtattctgtataagagacaggatttcaagttaactcatttcttttaagggtttttagttagaaacacttagattttagaaaaatgtatcagttcatcctttagatttaacttaaaataattttgacagtagtaataacaaatagggaaaaatcaaattgcattttaaatgtgagatctaggccttctctctggaaagcacttcctcctacagctttttaaaatatgtgttttaaaatatcagatacaggtatatttaaatataccaataaattatatttagaagcgataacctctatatcctgacttacagtagagtttgtcacttataaaaaagactcctctccccacagaataaatagcacattactttcataccttatctagccagttatcccagaggaacttcttcctaatgtgaatcaatggcccacattgaaaggtgtgctaatggcaaaccaggtaaataattgttcttaacacagaacagaaagatgctggagtctgaaggggtcctgtgcagtcaggcccccgtattgttgaaggcccagtagcagggcaggagaacttgctgcctccccctttcaccctgtcaggccccatgccagtatcccagtggatatgtgacaacactcccttccagtccctcagtctactctaggaagccatccaggccaggtgtgctgagtgcagtcaaaactttgcttcatccttgccaggctctatggtgatgaatcggagctgcacttctggactgtcgctgcccactacctgcacagcttatcccaggaaaagtcagccagcacaacagctcctaaagaagctgctcctcgagacaaactgagcaacccactggatatatgctatgacgtgctctgtgaaaatgccta

SEQ ID NO: 14863 - DNA, 850 bp, Homo sapiens
cgagaggccatggcccgccagaccgtagtctcagacacagagctgagtattgttgaatcatctgtgatcagcttgctgcaggaggcagaaagtaaatctgaacttagtcagaacatctctgcccgggaacattttgtatttaccgatattgatggccaagtgtatcatctcactgttgaaggaaactcagtaaaagacagtgctcggattccaccagatggaagtatgggtagtattacctgcatcgcttggaaaggtgatacattagtgcttggagatatggatggaaatttaaatttctgggacttgaaaggcagagtatccagaggaatacccacacaccgaagttgggtgaggaagattcgttttgctcctggtaaaggaaatcaaaaattaatagcaatgtacaatgatggagctgaagtgtgggatactaaagagagcctgtgtggtgcccctatctccttgttccaagggcctctcttgccttgaaagccttcttattacaccagccttggaatggacagtattctttggacatttctcatgttgactatccagaaaatgaagaaataaagaatctcctccaagaacagttgaattcattgtctaatgacataaagaaactgttgcttgatccagaattcactctcttgcagaggtgcctgcttgtttcaaggctctatggtgatgaatcggagctgcacttctggactgtcgctgcccactacctgcacagcttatcccaggaaaagtcagccagcacaacagctcctaaagaagctgctcctcgagacaaactgagcaacccactggatatatgctatgacgtgctctgtgaaaatgccta

SEQ ID NO: 14864 - DNA, 4954 bp, Homo sapiens
ataaagctgatgttgtaaaggttaaatgggccagggaaaactatcaccataacattggctcaccatattgcttacggttagcttctgctgatgtcaatgggaagatcatcgtctgggatgtagcagcaggagtagctcagtgtgagatccaagagcatgccaagcctatccaggatgttcagtggttgtggaatcaagatgcttcccgcgatttactgcttgctatccacccgccaaattacattgtgctctggaatgccgacactggcaccaaactatggaagaagagctatgcagataacattctttctttttcttttgacccttttgatccctcacatttaactttgcttaccagcgagggtattgttttcatctcagacttctccccatccaagcctccctcaggccctgggaaaaaagtttacatatccagcccacactctagcccagctcataacaagctggccacagccacaggtgccaagaaagctctaaataaagtaaaaattttaatcactcaagagaaacctagtgctgaattcataactctcaatgattgccttcagttggcatacctgccttcaaaaaggaatcacatgttgttgctctatcctcgagagattttaatccttgaccttgaggtgaatcagacggtgggtgtgattgcaatagaacgcacaggagttccatttttacaggtaataccctgctttcagcgtgatggtttattttgtctacatgaaaatggttgtataactttacgtgttcgaagatcttataataacatttttaccacttcaaatgaggaaccagatccagatccagttcaggagcttacctatgatttacgaagccagtgtgatgcaatcagggtgacaaaaaccgtccgtcccttcagtatggtgtgctgtcctgtcaatgagaatgcagccgccctcgtagtgagtgatggcagggtcatgatatgggaactcaagtctgcagtttgtaatcgaaattcacggaacagggcaaagtgcaattgctggggaagaacatcccagaggttcaattctgcgggaagtgcacctcaagttcctgctgacgggactgctttcaggactgcccgcaccacagtttgctattcgtatgtgtccaccgttgaccacaaaaaacatcaagatgtatcagccactgctggctgttggtacaagtaatggttctgtcctggtgtaccatctcaccagtggtctgctacacaaagagttaagcatccactcatgtgaagtcaagggtattgaatggacaagtttgactagttttctttcttttgctacctcaacaccaaacaatatgggattagtgagaaatgaacttcaactggttgatcttccaacaggtaggagcattgcttttcgtggtgaaagaggcaatgatgaatctgccatcgaaatgattaaagtatctcatttgaagcagtatttggcagtcgtattcagagataaacccctggagctatgggatgttaggacttgtacccttcttagagagatgtccaaaaacttccctacaataactgctttggagtggtcaccatctcacaacttgaagagcctgagaaagaagcaacttgcaactcgagaggccatggcccgccagaccgtagtctcagacacagagctgagtattgttgaatcatctgtgatcagcttgctgcaggaggcagaaagtaaatctgaacttagtcagaacatctctgcccgggaacattttgtatttaccgatattgatggccaagtgtatcatctcactgttgaaggaaactcagtaaaagacagtgctcggattccaccagatggaagtatgggtagtattacctgcatcgcttggaaaggtgatacattagtgcttggagatatggatggaaatttaaatttctgggacttgaaaggcagagtatccagaggaatacccacacaccgaagttgggtgaggaagattcgttttgctcctggtaaaggaaatcaaaaattaatagcaatgtacaatgatggagctgaagtgtgggatactaaagaggttcagatggtgagcagtttaagaagtggcagaaatgtgacctttcgtatattggatgtggactggtgtacgtcagataaagtgatcttggcctcagatgatgggtgcatcagagtcctagagatgtctatgaagtctgcgtgctttagaatggatgaacaagagttaaccgagcctgtgtggtgcccctatctccttgttccaagggcctctcttgccttgaaagccttcttattacaccagccttggaatggacagtattctttggacatttctcatgttgactatccagaaaatgaagaaataaagaatctcctccaagaacagttgaattcattgtctaatgacataaagaaactgttgcttgatccagaattcactctcttgcagaggtgcctgcttgtttcaaggctctatggtgatgaatcggagctgcacttctggactgtcgctgcccactacctgcacagcttatcccaggaaaagtcagccagcacaacagctcctaaagaagctgctcctcgagacaaactgagcaacccactggatatatgctatgacgtgctctgtgaaaatgcctactttcagaaatttcagctagaaagggttaatctgcaggaagtgaaacggtcaacttatgatcatacaaggaaatgtacagaccagctactgctcttgggtcaaacagacagagctgtgcagttgctgttggaaacaagtgcagataaccagcattattactgtgattcactgaaagcctgtttagtcactactgtcacctcgtcaggcccctctcagagcaccattaagttggtggcaacgaatatgattgccaatggcaaattggcagagggcgttcagttgctctgcctgatagataaggctgcagacgcctgccgctacctgcagacatacggcgagtggaatcgggctgcatggctggcaaaagtccgtttgaatcctgaggagtgtgccgatgttttaaggcggtgggttgaccacctttgttctccacaagtcaatcagaaatcaaaggctctcctggttctcctctctctgggctgcttttttagcgtggcagagacgcttcacaggtaaaccgagagttcacatgggctgctcaggcctgcccgtgagcagtcacttcatgttctctcgcggttctagcaggtcatggtactcgatgtgtaaagtgaaaggagaagtatacatttcaggtttgtcaaaaaacccaaaggagaatggaactgtccgtattcattacatcttcattcggtctaggagctatgctagtttcctactaatatgctgatcagacttaacaggcacctagtaaaagggaatttaaaagtcttcagagaattggggtccattcagctttgactagagcaactgagaggaggcccagagagcagggggagaggcgacagaaggcatggtgaggtggagacatcccgtctgaaaatctggaagaggaacaaccatcactaattgtggagcatttcatttattcaaaactaagggaggtagattacggaaatatgacaaaagattacttgtcaactctggacaggggtacatgggcacttgtcatatctctgtagatttttgtgtatttaaactatttcacaattttttaaagtattaattttaaaaagcttgtgtttggagatgtgagtattcttccctccttttttcaacaaactagggcttagaaaagtgcttgtatcttaatgcagtatgcaggtttccagggaaaatgtgtaaatgtctttatacccttcgatgctgctgcccaccagtgatgtaaatcacaaagcataactcttgttttgttctgttgagcagcatgagatactttgatagagcagccttatttgtggaagcttgcctcaagtatggagcatttgaagtcactgaggacacagagaaactcatcactgctatatatgcagattatgcccggagtttgaagaacctcggttttaagcagggagcagttctctttgcttcaaaagccggagcagctggcaaagacttattgaatgagcttgagtcccccaaggaagaacccattgaagagtgacagcttaataaatgccagggaatctgacctggaaggcagatgggagggggctggtctggctgtggccaccgtcacagtccaggatgaagaggagtacagggtcctgtgagctgtttgaccactgttctaagactatgtgtgcccaaaagcacataagcatctatgttgagagtaagtttgtatcctgcgttggtctcagaaagaacgtgaatgcttaagattttgaaagtacataatattttatactttgggagagagctttaagagtccctggaaatactttttaatttttttaacttaaaattcaagagactgaatcacttttctcattgattaaatgtaaagattattgagaaacctatagtaaatgaaatttgtgagatgttttctcaaatatatgctgtgcctgtacttatatacagtctttcaagagagatacaaacaaggcagaaacatttaaactagtattaaaggtagtttaccaaagcattttttgttttcttaccttgaaaacacagaaccgttaattccttggtttaagcagttgctaagttttgtaattttaggctcagaggaccataggaggttttaagatttatgtttagtccgataggtgaggtctttgatattttgaattttaactccttttatgatacatcacagtaacctcatttttgaagtctttctttgtactttaatgttctctctgttctaatagttgaagtatgagatgtaactattataaactgttgctgaaaacataaatgtctgtaacttacaaacatgataaataaattaaaaattcca

SEQ ID NO: 14865 - DNA, 1592 bp, Homo sapiens
gttaatctgcaggaagtgaaacggtcaacttatgatcatacaaggaaatgtacagaccagctactgctcttgggtcaagtatgtcagtttttataactctacatgcttcattaaattgctagttaattcgtatttcagagcaatatatctgtatgtatatatttcataatattttccccttgtatgtacctccttccctgtagacagtttaggctttctttcaaaataataccaataaacctcatgagaaaaaacatatggttaaccagcttgtaatttagacttccataatgcccagtggagcccagctatttgttttgttttgtttttgtgtctgaattgactggtacaaagctaaaataggcaattactcgagcacctagatacaccagcctctggctttatgtttgtctcaaaaaagtagtgtagcacctctgtttaatgtttgtatttgtaaacaaaatattcaattgcattttttgaaaatgagtgttttcctttagttttctaccttatgaattttaaaaagttatgttggaggaaaatgttctcataattagaaaaaccgtttctcttactagacagacagagctgtgcagttgctgttggaaacaagtgcagataaccagcattattactgtgattcactgaaagcctgtttagtcactactgtcacctcgtcaggcccctctcagagcaccattaagttggtggcaacgaatatgattgccaatggcaaattggcaggtaaggcacacttgatatgtttgtcatctctctgaaaaatgagaccttgttcccagcaaagtatctgattagtagggacatttctttctcttttacatatgctgaagaaaaatagaaaaattattgctacctataaatcagatgaatataattgtctaaaccagaattaattgtttacacttttcagagtgaaagggggcactgttaataattgctgagataataggcataaatccaacaatcctaggcaaatcagaacaataaaacctgtgagagaactatgctctccctacttattctccagactgtattgtgcttcctaccctggttacttgagtaataacagtaaaactcttaatattatgtttcagaatttaaatcaagaatgtcttcagtaggtataaaatgggcacgactagataaggtcaaatggggatttaactttttaatgacttctcaaagaaggagctgcagtgtcacttaaggggatgcgcttttgtctttcagagggcgttcagttgctctgcctgatagataaggctgcagacgcctgccgctacctgcagacatacggcgagtggaatcgggctgcatggctggcaaaagtaggtggttccaagtttcaataggtgccctcaacattcgggatagaaagctcagtcctgaactttggacttatgacttagaaacattttttggcctgcaaagctgctttgcaaatactgtcttggaacctttatccttttcctattctttatgagtgtaaattgcattacttatttaaaaatggatcttgcattggtagcaattaagtaaaagcagctgcctcctctttctcccagagt

SEQ ID NO: 14866 - DNA, 582 bp, Homo sapiens
gttaatctgcaggaagtgaaacggtcaacttatgatcatacaaggaaatgtacagaccagctactgctcttgggtcaaacagacagagctgtgcagttgctgttggaaacaagtgcagataaccagcattattactgtgattcactgaaagcctgtttagtcactactgtcacctcgtcaggcccctctcagagcaccattaagttggtggcaacgaatatgattgccaatggcaaattggcagagggcgttcagttgctctgcctgatagataaggctgcagacgcctgccgctacctgcagacatacggcgagtggaatcgggctgcatggctggcaaaagtaggtggttccaagtttcaataggtgccctcaacattcgggatagaaagctcagtcctgaactttggacttatgacttagaaacattttttggcctgcaaagctgctttgcaaatactgtcttggaacctttatccttttcctattctttatgagtgtaaattgcattacttatttaaaaatggatcttgcattggtagcaattaagtaaaagcagctgcctcctctttctcccagagt

SEQ ID NO: 14867 - DNA, 15143 bp, Homo sapiens
acacaatggaagagcccaagtgtgacccgggtaatcctggctccagagcctgctccttagcaatggcctccagtcctgacagctccactgtcatcttgggtaagaccatcattcatctctaggcctcagttttttcacgatttctgccagttatgaaatccttttgttcagtgatacttactattatatctaaaattatttctctccactatctattctaccagacataaatccatatgaggaagcctggacacatgttttgcaaaatttattttatcagtaacacaattttttgagttaattcaccttgtctactcttaatatgaaaacttaaagtgaaaagaattataaacacacacaagaacagcactaatcagttatatggagcccataggagtttgaaattttatgctgtttaggtatctaagtgatataaattacaggttttttttttttttttttttttgagacggagtcttgctctgtcgcccaggctggaatgcagtggcgcgatctcggctcactgcaagctccgcctcccgggttcacgccattctcctgcctcagcctcccgcgtagctgggactacaggcgcccgccaccacgcccggctaatttttttgtgtttttttagtagagacggggtttcactgtgttagccaggatggtctcgatctcctgacctcgtgatccgcccgcctcggcctcccaaagtgctgggattacaggcgtgagccaccgcgcccggccaaattacagtttttaagagacaaatggatacggattgtatagcagttcttgacaatgtagttgattttaaagtgttaaataaagcttcgtacttgaaaacattttaatttaaacttttaattaaacttttaatttgaaattcactgtgttcttagtgaaaattcaaagcaattcaggtaaataaagaggctgatttatattcactggataaatgctgatacttattaaggcctaatttgccctacattgtgaattgcctcttatgaaaaatacttgaagaaaaatgtggcattccctggatgtcaactcaaagccaacatatgtatgtgtggcacttacatgttaagcttcccattccttcatatttcatcttttttattttattttattttttttgagatggagtctcgctctgtcaccaggctggagtgcggtggcgcaatctcggctcattgcaacctccacctcccgagttcaagcgattctcctgcctcagccccatgagtagctgggattacaggtgtgcgccaccacacccagctaatttttgtatttttagtagagacagggtttcaccatgttgaccaggatggtctcaatcttctgacctcgtgatccggttgcctcggcctcccaaagttctgggattacaggcgtgagccaccacactcggcctccatctttttttaaccaaagttatgtagagagattgatattgagtatgtggctaatcctaagggatcattttaataggattaaaatgctattttttctatatattttgtggattttaaaataacattattaaaacaactttacagcttcaaaaggttgtatttatcacccactcttagtaattatttatacttttcctttcacactatatacatgtttgtgtttatgtgtgtgtagacatgtatgtatatactcatgcatattctttctatttttggcaagttaatcccaatattctgtagtggtttataggaaggaaatttgtatacctttttaatgaacagtcttgatttcattgtactgtttagatttagcttttgttagaatgatttttattggagtcatctttttagtttgagacttgctaacctaagtacgaatggtatatgtgaaaataatgccattgaagtcttaactattgacagtgatggtgtatatattatacacgtgatttatgaatatatatatttgtatttgttttatatttacttataaaacattttgtaattacactgacacattaaggtttcttattagaaattatgaataagttatttaaatctgtttttcatgaataccaattttgtatgtactttacagagtacatcagattgaaaagtaaccctttcaaaaggcagtaaaatgagaaaaatgtggtacagtagttcactctgcagaaactgttctctaatgcaagttctcttgctttgttctgaagcctgtgtagtgctttaataccaggaacattgactgaaacagtgtttcttagaagacataggtccctgcattctggatagcaggactcgggagtaatctatcctttgaggtgttagttgatgcaatttaagtcctatagccaggtacagagtcattgtgtccttaataactacagccactaaagtactacattaactacattatacttttagacctgaagagcatttctactgaaaattttctttagctttttaagatcagcatacactgtagttaatatatttgttatttttattacaaatcagggcaaagtgcaattgctggggaagaacatcccagaggttcaattctgcgggaagtgcacctcaagttcctgctgacgggactgctttcaggactgcccgcaccacagtttgctattcgtatgtgtccaccgttgaccacaaaaaacatcaagatgtatcagccactgctggctgttggtgagtatttgacctggtctttttttttttaactcactttataagatgtttaggttttctagtttctagaagatcctttattctttttgaggatgctttaaaaggagatagagactaagtgaaactgtaaatactcatcctggaacttaaaaaaaaaaaaatttctgtccttttattccaactgtcttatattgaattggaatgctgagtcttcatccacctgagactggacagtcgagtctctgacgctgtccattcatctcggaaataccaggaggctcatccctgcagtgctgaatcccaggctccttgtctgtaattggaccaccccagtctttatgtcatgtcagttttcgttgggtctttattgactaaaaatatagtcagggttaatagcttaataatagcagggttcttcttttgccaagagttatatattaaatattatttaaagtggctatggtccctataaattaagatttgccttttggtgtgaaattgtgtatttgtatgttataggtagaaaaatttatctgggttccaacttgctgtcacattgatttcatagtaatgtgatgaacctaattttctttacagcatagagaaaaaaacaaaatttagtttgctattaagtacacattattaaaatacatttctccaaaacttctgaaaaacagtgtatttgtttgaaactcaacatttcttcttaagatgctatcggctggcttctggctttctcccccagtctattaacatgtgatttgtggtgaaaacctcaccatatttattctgtggccaacatggctgacttctcagtgttaaagactcatttgggtattactgtttggtagtacccttctgtttttttctgtgcctatcttttgaaagcgatttgatttttatgattcaattgtctatatatgtgtcccgatttatataatgcagataaatgtttaatttttgctttagaaactgttgattaatatttcaccactaatagattttaattaggattcatcagtgtgcttcatatgtgcatgtatgtattatgtcagtgttcctgatttgtcagttaggattttgtcaatttcttggggaaaactacttcttgggatagctatgtaataagagctatggcaaggtctgagctttccattgtagaataagctgtattggtatgtagtgaatatcatttactgaatttagtataacaaagtaaaaatataagtacctaaaagtttgtctagaggtgtcactaagaaagataaataagagttcagctatggaattaattctccttgtggtgcccctagtgcattagatcataggttcagcattgttaaaactttcagattgcagaaatcattggattattatgaagttctgttaattgaaaaattttagtaatttagttattttctcagtgccaaaaggtattattatgaaatagatgataaatgtaaacaactgtacaatgtgtttttctagaatagttttgcaaaagatttctggagttttattcagcaaataagataatattggaatttgcccagcatttttacttccactctgttgctttgcatgaattcattaatctttaaatcatgtgcagtgcaaaagtgattgtccatatagactgttcacttttcttgcttaacttataaaaacactatagagactgaagctttactttctcatgtatgtccgtgtcctttacatttaaactttagacatactacctgagaccatgaaaagctttagaataatacctgtaaactattaattatagtgatgacagaatactaatagttaaccaagtgcttactttgtgccaattactgtgcttagtgctttatgtttccccatttaatctccaacaactagattttctactcttcccattttaaagagatgaaaacacagatttagtgtgggcaagtaattcatccaagagtataaggaagagccagggcttaagcccaggtttctttaattgcagaaaccacagttaaccattatactttactctcttgtcaggatttatttaataaaagagacaaaacaaaaagaaaactttggaaagaaaaatggataaccctggttagtgagctctgctagattgcttatttgaggaccagctataataaaccttctgagtctcaaaaagtataaattcccatgtgtataaaagcttaggaaagtgtttcttcaaattgtatgtgtattaatgtaagttttaaggtctttctgtgaaaaatctattcctggaattaggcaaggcttttgagcacgtgaggttaggcccattttttttataaggaagtggaccagagaaattcattcttctttgtgtgtttgtttaaacacatagtttgggtttcttttataaaagataaatgtgttaagtgattaaagtcttgagaaaagacttttcttgcaaagtgctggaactcccactgaattaatgctcttccatgatgtcattttgaaaggtacaagtaatggttctgtcctggtgtaccatctcaccagtggtctgctacacaaagagttaagcatccactcatgtgaagtcaagtaagtatgtcattgtgatgatgacatcacaaacatcatatcagaaaaaaaattctcatagacttttctacattgagtactctgtaatatctgcagtggtgattatttgaaaagtttgaataatattcatgtccaactaatggctatgttaatcaaggatgataactaattctttgctgtgtaaagaacataagcagtagagaatgttttctcttttattaggttggtgcaaaagtaattgcggtttttgcagttttttttttttttttgttgttgttgttgttgtttgttttgttttgttttgttttttttaaatggcaaaaaacacagctatttttgtaccaactaatattgttgcacctcatttatttctcctaagggccaggctgttttctcactggatatccttacgttgccttgttcaggtttattttatttatttattttgctcaaaattattattttttattattttaaaattttttttactttaagttcctggatacatgtgcagaatgcgtgcatttgttacatagttatacatgtgccttggtggtttgctgcacctgtcaacccatcacctaggttttaagctccacatgcattagctatttgtcctgatgctctccctcccctcacatgcccccgccaacaggccctagtgtgtgttgttcccctccctgtgtccatgtgttctcattgttcaactcccacttatgagtgagaacatacagtgtttggtttttctgttcctgtgttagtttgctgaggatgatggcttccagctccatccatatccctgcaaaggacatgatctccctttttatgactgcatagtattccatggtgtgtatgtaccacatttcctctttctttttttttctttaattttactttaagttctgggatacatgtgcagaatgtgcaggtttgttacatagatatacatgtgccttggtggtttgctgcacctgtcaacccgtcatctaggttttaagccccacatgcattaggtatttctcctaatgctctccctccccttgcccctcaatccccgataggccccagtgtgtgatgttcctctcgctgtgtctatgtgttctcatcgttcaactcccacttatgagtgagaacatgcagtgtttggttttctgttcctctgttagtctgctgagaatgatggcttccagtttcatccatgtccctgcaaaggacatgaactcattcttttttatggctgcgtatttttcatttctataacgatccatcagtaggactgcttatgacaaattcaaataaagtcattttaattgttaatttgtcttatttattctttgtttaaacatcatcagaacgctgcatagcatttatttgatttttaggacatgatctgcttatgagttctgtgtatgcagagctgtccgagggaaagctaaattgacggaaaagtgcttcttgctttctgttccaaaatgcctacctgtgctgtccatagcattatttcgctgaatgcaaggctattttccttttgtgtcctatcagtgatagatcgtagagttacatatataaaatatgaatttccacttttttgtttgttttttgatacagtcttactctgtcacccaggctagagtgcaatggcgcgatctcagctcactacaatctccgcctcctggtttcaggtgattcttatgcctcagcctcttgagtagctaggactacaggcacgtgccaccatgcccagctaaattttgtatttttagtagagacggggtttcaccatgttggccaggctgatgttgaactcctcacctcaagtgatccatccacctcagcctcccaaagtgctgggattacaggcatgagccaccacccccagccagtttccagtttttttttatgatctttcagtgaaagcataagaagtcattttctgttttctgtacattaaataattgtaggtcttgtgtataaaaattctcagtgaacccttagcaaacacattatcctgagtacatgcattttcttaatggagaagggttaaccttttttttctttttttttttttttttgagttggagtttcgctcttgttgcccaggctagagtggaatggcgctatcttagctcactgcaacctctgtctcccgggttcaagcaattctcctgcctcatcctcccaagtagctgggattacaggtgtatgccaccacgcccagctaatttttgtattttttagtagagacaagatttcaccatgttggtcaggccggtcttgaattcctgacctcagatgatctacctgcctctgcctcccaaagtgctgggattacaggcgtgagccaccgcgccaggccaggttaaccttttaagtatcacagcttctgattgtgatggaaatctctgaaaagtttgcattgtcttactgtttcaagtgcattgttgtgtggtgcagcccaggtgactgtttattgccaccttacgctgttcctatacagcatctccccagatacatttacgtggaataataatgtctttaaaagctttgggcttttgaggtgcagtgacacaggtatctgtttggactctttcaggctgttattcatctcttctcttctgttgcagtgtctgtagcttgccattctggcacttctagtagtctctgcttacactgctgaatcttctctctctctctttcccatctcctcttctctcgacatttcctttcaccctgccttgtgtgtctggtgtttccttttatggtcagcactaaccaatcgaaactctccatttaatcactacttattctagggattatgttaactattaatacttcacacgtatcatttcattgaatccccactacaatcgtatggggcaggtattgtatttccagtctacagagtaagaaactgaaaattacagagtaatctgtgaaggagctagatggaattcactctgggcctttgaagcctcagaacctgaactcttcacttatacttacagtgcatgtgctgcatctcctgctaaaatacgcacataggttagtaggaatcatgttggcagtaaaattaaaatgttggctgagccaagatttgtgctaagaatttcacacatgcttctgaaaaatcaaacatgttgtcttttcaaacacagaaagttttaatagctaattaatcagagaggtattaattttaagtaaggtttattatcctggattagtcaggttatagatgtcactaaatacttgacttatacatgttaagataatatttatggttgagtaacattgaaattgattataagtgttacttgggatactaactctgagggatatactacttatcagataaatgtgaatgatcatacaaagatactccatttttatatgaatttttcctcttcattgccattttgaaaataatttgtattttatattcagagatactgcccaagagaacactaaaatcctgctttgtgtttcagttaatgcaattttagtattataatcaaaagccattaagaaaatttcacagaaatacaaaaattagctgggcgtggtagcatacacctgtaggctcagccatttgggagcctgaggtgggaggatctcttgaacctgggaggcagaggttgcagtaagttgagattgtgtcactgcactccagcttgggtgacagtgagaccctgtctcaaaaaacacaaaacaaaacaaaacaaaactttcacgatgtattataaaaatgtctgaatttattagcagtaaactcaaaacattttagattttcatgtccaaataaggttaacttttagaaagttgtttttctaccttttattaagtgtgtttttaaaaaatcataatctaaagcacttgaaggttgtatatactgtgccggggactcatgacagcagatagcacaaagtgtgtgtgtttttaaaaccatgatgttttaacttgtgatgctttatgaatatctgttgaatatcttctctatgcttataaacagagaaagcctttgaagcttataatgcaatggaagatacttagaagtaaacaaaatagagaggtatatgtagattttcttaggtcattagtttgtgtctttgtctggtaggctgaaactactgtcatatgactctctccctggccagattttaatagtcatactaatactgatgtgaatcctgataattaaactatcttgtcattacatttgtagataaagttttggttagaaatgattttgtatgtgttaggtatggtaatacagtctcaaataaaaggtcatgttaagataaaaggtcatgcttactttttaattaatttgtgtaataaaatttaggtctttggaaaacttatttttcaaataaatgaacctttcaaataaaaaagagaattagtttaacctttatctcatttcctattataggggtattgaatggacaagtttgactagttttctttcttttgctacctcaacaccaaacaatatgggattagtgagaaatgaacttcaactggttgatcttccaacaggtttgtttttaaagatccaaataggtttgtcatattgaataaacatgttgccatttataaaacatgtttgaaagtacttctttcaccttggaatttttttttatatttcatgcttatatatttattcttttattctctaataattgccctagaaaggcctcatcattgtttacatggaaatgttgttggcacaaatacatggtaaaatggaggaccattagcctgaacagacagattcattaaaaaataggataccggttctacttttaagtgcattgttatatgtaaccaactttaaaagatcgatttaaaaataactctgtcaatggactttattagagtctgtgctggaaattttggcttttataggaaacacttagaaaatttataggttaaggattgtttttaaatgctcaaatttaaaacttgtaatagtctctggctgaatgaatagagaaacttaatttgggattttgaagattctacagtaggaaacgtcccaataaggtaactttttcagaattgaaagcctaaacccagtgaatttcaaaataaagaatttgaaaatataataaggaaagagtttcaaattattttctggtgtatgcagtagtttcaaagaggtttttttaaaaataaaattgtgatgagtttctttaaaatggtatagcaacacgaatcatatgtagatgatcttaaccaatgagagcatgtgtatgtatgtgtaaaatgaattaaatcaaataaatggttgtaaatcaagtaagttgtaaataaatgaagtacatggttgcttttttatgttctccatatgtattttcaagctctcaaagatccagttgttcttacttctcagggtatgttgctgaacttccaggaatcattcccgtctttagtccagtgttgctgctctagtctcattggaagtgacctgtccactgactctcatccccaagttcctaatttgccagcagaatggtactggccctgtgtctagtgatcccagggataaaatgctgttgtctagtatcattgacttaaaaaaaagaaaaaaaatccctgttttatttgttttggtcagctcaagttcaggactgttagataacttaaaatctgctttgcacagatgtatttttaaggaacaaacatctacagtaacagttacagatttccttaagtgggatatttgagttcatagatggtagacttttatagcctgggcttctaaggagggcagcagactagtgcagtcaggacaggacatgggctgtttggggtataataatagtgagtatagtgagattccacatgatggaatctcaacaaagagtaggaaggcgtttaggccttcagttgtccttgaattgagtatgttctctcttttgtttaatgtagataaaaatctaacacaagatactaaaacatacaaggtagaatttatactttttttattcacagaaaatcatgtaacttcctttgcgggtaactcattctttcacagcatacatgaacaccgtagttattccctagtttccagtttataaagatgttttgagaggaacatgttcaaaatatttaactagtattttgcacatgggacaagaagatcttaaatacatgtttcaagagtttttcccccactagttagtatttggaaacatgggaatgtttgtattaaatattactttaaataagtagttttcgcaccagacaattgctgtaccataaatatcttaaaacttaacattgtttttttaaatttctaaaattgaattatagaattcaagaaactgtgtgacaaatgaaaatgcctttttacaaaataaatatctgaatatgtgatatattattgatcattagtttgtaacacttttaagaatattctttgaacttacattattagaaacagcttagaaggaactgggcgccgtggctcacacctgtaatcccagtgctttgggaggctgaggcagatggatcactagaggttaggagatcgagaccagcctggccaacatggtgaaaccccatctctactaggagtacaaaaatgagctggcgtggtggcgagcgcctgtaatcccagctactcgggatgctaaggcaagaaaatcacttgaacctgggaggcggaggttgcagtgagccaagattgcgccattgcactccagcctgggtaacaaagtgagaccatctcaaaaaaaaaaacccgaaaaaacagaaacagattagaagcaaatggaagaatgaataggagaacagagggtaggatgggtaggactgatcaaattacattggcgtggcttcttgtttttcatacatgttttatgcactgttctcacttttttaaatatttgcaattaaaggtaggagcattgcttttcgtggtgaaagaggcaatgatgaatctgccatcgaaatgattaaagtatctcatttgaagtaagtgtcaacctaaaaaaaaatctatggtgttatcacaatgaaatctcgtggatttttttaatctttaagaaaatgggaatgtgctggaatgcatatggaatctttttagtgatagcaaatggtgatatgcagcccaaagaaaatattttgattacaaaattaagttgctatcacttttaattctctacttctaaaaagatgaagtaacttttgcatgaatcgttatttactttcggataaagttcttatgtacttctatctaagcatggagttactgagtgaaagaactcattttctttatgtataatttaaactcattttgcttccagaaattgagtttttttgtttcaggggaaaataacatgtaaagcagtattattaaaaatagaaactgaatgaaaatcaatcaaaattacaaagaaagagtaagctttctaaagtagttttcaaacttgttttggcttttctaagatctttgcatttccatataaattttagaatcagactatcagttttatcaaaaaatcttcctgagattttgattgggattgcattgaacccatcaatcagtgaggggaagaattggtatcttaacaagttttgtaactcatgaacatggtatgtctctccacttatttaggtcttttaaaatttcagcaatattttgtagttttcagtgtgtaagtcttacatattatttgtttattttgtgttttctttgatgcttttataaatgacatttttaaatttcaattatttattatttgtatattaaaatacagttaattttctgatattgaccttgtgccttgtgaccatgctaagcttagttattacttctagtataggtgcttttgttaattctttaggattttctatagagacagtctcgtttgctagtaaagacatctttacatcttttcgatctataggccttctttttgcttgcactaattaggacctcctgtatagtgttgattagaactgagatgtcagctacgagctgacatctttgctctgatcctggaccttatggagaaagcattcagtctttcaacattaagtatgatactagctgtagattttttgtatatttcctttatcaagttgaaaaagttttattcctagtttgctgagcctttgtattatgagtaggtgttgaatttatcaaatgctttttctgtattcattgatatcatcatatggtgtgtgtgtgttattttgtttttctttttgaagttcactaatatggtgaattacattgattgattttcagatgttaagccaacatgacattcccggaataaactctagttggtcgtgatgtattactgttttgacatattgctggatttgatttattgatatattattaagagttttatgatatattattaagagtttttatatctatgttcatgaaggatattggtgtcgtttttatgtaatatcctttgttttggtatcagggtaatactgaccttgcagaacgtgttgtaaagtattctctctcctttttttttgaatgagtttgtgtagaattgatattattcttactaaatgggaaaaatttattaggaaacccatctgaacctaaaattttctttgtggcaaagtttttaaatacaaattcagttttgtttttttttttcataaatataggactatttagattctctttttttgagctttggtaattggtgtcttccaagtaatctgtccattttgttgaagttgctgagtttattaatttattgaaataagcttgttcatcatggatctatgatcagtgattatctttcccactcctaatatcagtaaattatatcaaccaattttatttattgatcttttccaagaaactacttttgattcatttgattcttctctatgatttttccattttcaatttcattgtctgtcatgcttatcttttgttcttctgcttactttttaaatatgctctcctttttttacatagttttctaaaatagaaacttagataattgaattaagttgattctctaaaatgtaatgtaaacagttaatgctatatgagcaccagttttcctgtatcctacaatttttgttatggttatatgttttcattttaattcacattataatctttaaaaatttccatggggtgttattcagaggtatattttttaacttcaaactatttgggtgttttgccaggtatctttctgtaaatttctactttctgttggggtcacacatggtcctgagtggaagaatctcagtcctttgatacagggagtacagggatcttcctactctgtcacatttcctctatgtcagccatcatttgctgataatattttagttcctcataatgcttattgagtaatcagtgctcaaattatatttgttgaattgcactcgttgatgtcattcagtacttctttcaggcttaacagaaagtgaataaagtggcatttgttgaataccaactgtagtagaatgatagaaactttacatactttttcattgaatgtttaccataatctgtatatcaattaattgaggtacatgatgagattctcctgtcatgtgtgagaagttgagcctcaggagggttaacataagttgtggcatcagggtttgaatctatgccactctttcttccaagttggactccttgcctaattgtgtgagactgtatgttctcttacaggtcacttagagctttaccttcttatgactgttaatcatggtgctaaatggtagtttaaattgtctatatttagaatgcgtcagctgagtttttcaatttactgaactttttatttgctctaattcatggtgaaatttttgcaaaaaggggcttatttagtaattttgtttattttaggcagtatttggcagtcgtattcagag

SEQ ID NO: 14868 - DNA, 570 bp, Homo sapiens
acacaatggaagagcccaagtgtgacccgggtaatcctggctccagagcctgctccttagcaatggcctccagtcctgacagctccactgtcatcttggggcaaagtgcaattgctggggaagaacatcccagaggttcaattctgcgggaagtgcacctcaagttcctgctgacgggactgctttcaggactgcccgcaccacagtttgctattcgtatgtgtccaccgttgaccacaaaaaacatcaagatgtatcagccactgctggctgttggtacaagtaatggttctgtcctggtgtaccatctcaccagtggtctgctacacaaagagttaagcatccactcatgtgaagtcaagggtattgaatggacaagtttgactagttttctttcttttgctacctcaacaccaaacaatatgggattagtgagaaatgaacttcaactggttgatcttccaacaggtaggagcattgcttttcgtggtgaaagaggcaatgatgaatctgccatcgaaatgattaaagtatctcatttgaagcagtatttggcagtcgtattcagag

SEQ ID NO: 14869 - DNA, 4901 bp, Homo sapiens
ttcaaaataaagaatttgaaaatataataaggaaagagtttcaaattattttctggtgtatgcagtagtttcaaagaggtttttttaaaaataaaattgtgatgagtttctttaaaatggtatagcaacacgaatcatatgtagatgatcttaaccaatgagagcatgtgtatgtatgtgtaaaatgaattaaatcaaataaatggttgtaaatcaagtaagttgtaaataaatgaagtacatggttgcttttttatgttctccatatgtattttcaagctctcaaagatccagttgttcttacttctcagggtatgttgctgaacttccaggaatcattcccgtctttagtccagtgttgctgctctagtctcattggaagtgacctgtccactgactctcatccccaagttcctaatttgccagcagaatggtactggccctgtgtctagtgatcccagggataaaatgctgttgtctagtatcattgacttaaaaaaaagaaaaaaaatccctgttttatttgttttggtcagctcaagttcaggactgttagataacttaaaatctgctttgcacagatgtatttttaaggaacaaacatctacagtaacagttacagatttccttaagtgggatatttgagttcatagatggtagacttttatagcctgggcttctaaggagggcagcagactagtgcagtcaggacaggacatgggctgtttggggtataataatagtgagtatagtgagattccacatgatggaatctcaacaaagagtaggaaggcgtttaggccttcagttgtccttgaattgagtatgttctctcttttgtttaatgtagataaaaatctaacacaagatactaaaacatacaaggtagaatttatactttttttattcacagaaaatcatgtaacttcctttgcgggtaactcattctttcacagcatacatgaacaccgtagttattccctagtttccagtttataaagatgttttgagaggaacatgttcaaaatatttaactagtattttgcacatgggacaagaagatcttaaatacatgtttcaagagtttttcccccactagttagtatttggaaacatgggaatgtttgtattaaatattactttaaataagtagttttcgcaccagacaattgctgtaccataaatatcttaaaacttaacattgtttttttaaatttctaaaattgaattatagaattcaagaaactgtgtgacaaatgaaaatgcctttttacaaaataaatatctgaatatgtgatatattattgatcattagtttgtaacacttttaagaatattctttgaacttacattattagaaacagcttagaaggaactgggcgccgtggctcacacctgtaatcccagtgctttgggaggctgaggcagatggatcactagaggttaggagatcgagaccagcctggccaacatggtgaaaccccatctctactaggagtacaaaaatgagctggcgtggtggcgagcgcctgtaatcccagctactcgggatgctaaggtaggagcattgcttttcgtggtgaaagaggcaatgatgaatctgccatcgaaatgattaaagtatctcatttgaagcagtatttggcagtcgtattcagagataaacccctggagctatgggatgttaggacttgtacccttcttagagagatgtccaaaaacttccctacaataactgctttggagtggtcaccatctcacaacttgaagagcctgagaaagaagcaacttgcaactcgagaggccatggcccgccagaccgtagtctcagacacagagctgagtattgttgaatcatctgtgatcagcttgctgcaggaggcagaaagtaaatctgaacttagtcagaacatctctgcccgggaacattttgtatttaccgatattgatggccaagtgtatcatctcactgttgaaggaaactcagtaaaagacagtgctcggattccaccagatggaagtatgggtagtattacctgcatcgcttggaaaggtgatacattagtgcttggagatatggatggaaatttaaatttctgggacttgaaaggcagagtatccaggtataagccaagaatgaaatcttgttatttcattaaaaaaaagaaatgaaatctttttgttttgttttgttgagatggtgtcttgctctgtcgcccaggctggagtgcagtggtgcaatctcggctcactgcaagctctgactcccgggttcatgccattctcctgcctcagccacccgagtagctgggactacaggcacccaccaccacgcccggctaatttttttgtatttttttagtagagacgggatttcaccatgttagccaggatggtctcgatctcctgacctcgtgatccgcccacctcggcctcccaaagtgctgggattacaggcaggagccagcacacccggccaaaaaatgacatcttgatatggttccattagaggcttgtgacttggcaagaaggatcagtaaactcgtggaggtgtagcttggacccttgggtcccttcacctaaacttgggaggatgggccttgagccaagcattcttaggagatagttatctgcaagtggcccctgcagaagtcttagctgaccttaaagggcaggccctttctgtcagatgtggcccccagtcccagcaagtaaagggttctcccatcatcagacctgttagaaatggaaatagtgagagatgttagacatagcttctggtgaccagatctcactctacattgtattgatgtttttgtttctttgtcttcagaggaatacccacacaccgaagttgggtgaggaagattcgttttgctcctggtaaaggaaatcaaaaattaatagcaatgtacaatgatggagctgaagtgtgggatactaaagagagcctgtgtggtgcccctatctccttgttccaagggcctctcttgccttgaaagccttcttattacaccagccttggaatggacagtattctttggacatttctcatgttgactatccagaaaatgaagaaataaagaatctcctccaagaacagttgaattcattgtctaatgacataaagaaactgttgcttgatccagaattcactctcttgcagaggtgcctgcttgtttcaaggctctatggtgatgaatcggagctgcacttctggactgtcgctgcccactacctgcacagcttatcccaggaaaagtcagccagcacaacagctcctaaagaagctgctcctcgagacaaactgagcaacccactggatatatgctatgacgtgctctgtgaaaatgcctactttcagaaatttcagctagaaagggttaatctgcaggaagtgaaacggtcaacttatgatcatacaaggaaatgtacagaccagctactgctcttgggtcaaacagagctgtgcagttgctgttggaaacaagtgcagataaccagcattattactgtgattcactgaaagcctgtttagtcactactgtcacctcgtcaggcccctctcagagcaccattaagttggtggcaacgaatatgattgccaatggcaaattggcagagggcgttcagttgctctgcctgatagataaggctgcagacgcctgccgctacctgcagacatacggcgagtggaatcgggctgcatggctggcaaaagtccgtttgaatcctgaggagtgtgccgatgttttaaggcggtgggttgaccacctttgttctccacaagtcaatcagaaatcaaaggctctcctggttctcctctctctgggctgcttttttagcgtggcagagacgcttcacagcatgagatactttgatagagcagccttatttgtggaagcttgcctcaagtatggagcatttgaagtcactgaggacacagagaaactcatcactgctatatatgcagattatgcccggagtttgaagaacctcggttttaagcagggagcagttctctttgcttcaaaagccggagcagctggcaaagacttattgaatgagcttgagtcccccaaggaagaacccattgaagagtgacagcttaataaatgccagggaatctgacctggaaggcagatgggagggggctggtctggctgtggccaccgtcacagtccaggatgaagaggagtacagggtcctgtgagctgtttgaccactgttctaagactatgtgtgcccaaaagcacataagcatctatgttgagagtaagtttgtatcctgcgttggtctcagaaagaacgtgaatgcttaagattttgaaagtacataatattttatactttgggagagagctttaagagtccctggaaatactttttaatttttttaacttaaaattcaagagactgaatcacttttctcattgattaaatgtaaagattattgagaaacctatagtaaatgaaatttgtgagatgttttctcaaatatatgctgtgcctgtacttatatacagtctttcaagagagatacaaacaaggcagaaacatttaaactagtattaaaggtagtttaccaaagcattttttgttttcttaccttgaaaacacagaaccgttaattccttggtttaagcagttgctaagttttgtaattttaggctcagaggaccataggaggttttaagatttatgtttagtccgataggtgaggtctttgatattttgaattttaactccttttatgatacatcacagtaacctcatttttgaagtctttctttgtactttaatgttctctctgttctaatagttgaagtatgagatgtaactattataaactgttgctgaaaacataaatgtctgtaacttacaaacatgataaataaatt

SEQ ID NO: 14870 - DNA, 29389 bp, Homo sapiens
aacaaggcggcggtggactggtgaggacgccgagcttccaggtcgccaggatcggccaggaatgtgtgagggggaagggggaaggacaagaggtttcaccccctggttagtttggcctcgctaaggcagggagccgccctcacgcaatgagcttgctttcagttggtggatttttgttgttacaaaagtgataatagccccgtgtgggaaattcccccatgcaaatacatttcccctctttctcgcgtatttctctgctgttttctctgcacctcgcccttttgccgttccattcctctctcttttcctctcctccagcttccaggcttctctctctccaccattaattccctgtgcactttctctttcccatcctgtcttttctttttcgttgtcttgtattcctgttgtctttcaacaatgtgccagaccctgtgctaggcgcctgttctttcacctgtccttttcacctcttttcgggctcctcctgtgtagaacattcctgccttcaacaggtcgtctttattactctctcctttcactataaattactactgcagctctgaaaactactcattagacaaatgtaaagcaaaattctgtggctgtgggatgttgttaggaggactgaaacgtcttgtgcagtgtttgtcgttttatttagttggaaggactaggattagtcgcagtatccccaggcacattgtggatactaaggattagaaatcggataagcgaaagacgtatgcctacaagaacagtcagagggcacaagttcctttttatgtcctcgggtctctattttcatatcttttagaactttttttatccgaatgaaaagtgaatttcaacaagcattttaagcttagccagatcttttatttaagtgggataatgataaatactggcctttgggtttaaatgattttattaatggtggtacatatgaattagacttatcatttatttaggcttggcaagaaagaagtcgtcctgctttgttctgtacttaaactttaacattactgttttgctaggggctggcaaggtttaattgcttatggatgtcattcacttgtggtagtgattgattccattactgcccaaactcttcaagttttagaaaagcataaagctgatgttgtaaaggtaagtaaaatcccactttgacgctaacatgttgtctagtctaaagtttaatactgtgtatcactaagctctcattaagtcttacgtgtaagtgttgaatagcttttaaatataacaacctatttggggtagcctagaattttcatatatatgacttaatgtcaatacagggtgagttattaaatgctagttgttagatcattttaaggcagatgaaagttctaccatttacaagaccactcagtcattccttagttttgagcacttaccatatgctatggatatggagatgaaagccctcagataattctccatcttataaggaagactcacagcgtgatagtgtgataagtgagacttgcgtaacacgctgtgagaaaacagaggagctgcatattgcctggttgtgaggagagtcacagaagtctacagtttcaagactagtagacagtagttagccaagtaaaaaattgacaaggagcattgcagggaaaagcaagaatatacacagaagtaagtagcgtgccataaagatggctaaagatgggacacttgtaggagtgatgaaataagaggcagccagagagattcagctgtctgtcctgaagttttgtaagattacgaaggagtttggattttttttttttttagacagaatctcactctgtcgcccaggctggagtgcagtggcatgatctcggctcactgtaagctccacatcctgggttcacgccattctcctgcctcagcctcctgagtagctgggactacaggcacccaccaccatgcccagctaattttttgtatttttagtagagaccgggtttcaccatgttagccaggatggtctcgagctcctgacctcgtgatccacccgccttggcctcccaaagtgctgggattacaggtgtgagtcaccgcgcccagcaggaatttggatttttgagtaggagattgatgtgaccatattcgcgtcttagaaaaactctggcagcagtggaggatctgctgaagaaatgcaagactggaggcagtaagatcatttaggagatttctgcagtaattttggtgggaaattctaagggcctaaaataaagctggggcatggagaagtcatgtttaagagcagcaaagaggtaaacctgatagcctttatagtgatcagtataaaggagagtaagagaatagagtgactccaaggtttcttttggtgtaattgaatgacagtgtttccagttatcagaggtaagcatctgtgaagtcagtgaatttttaagttttcaacatgcaaaatctgagatgcctgtaatatattgcattatagtgatccgggctttaggagataggtcaggattagagatagagatttggagtctttttcttttttaaataatagctttattgagatactcataccataaaatgtactgacttaaaatgcacaattctgtggcttttagtatatccacagttaatgcagccacaattacaatgaacttttttacctcaaaaagaaaccctatatccactagcagtcatattccatttcccccatttccctcatcctttggcaaccactgacctactttctgtgtctgtagactggcccattctggggattttatataaattgaatcatataatttgtggtcttttgtgcatgacttctttcacttaggataatgttttcatggttcatctgcgttgtagcatatatcaatactctgttactgatgaataatattccactgtaaggatgtatcacatttattttattgatggacatttggatattttgtactttttgcctgttacgaataatgctgctttgcacattcatgtgcaagttttgtgtgaacctgtgttttcatttcccttgagtatgtttctaggggtggaattactgactcatatggtaactctgtttaactttttgaggaactgctggactgttttccaaattaacattctcattagtagtgtatgaggagtctaatttgtccaaatcctcaccaacgcttgctgttctctgttcttttgattataaccatcctaatgggtatgaattgattctcattgtggctttggtttgcatttccctgatggctaaaggtgtggagtatcttttcatgtgcttattggccatttgtatatcttctttggagaaatgtctatgcaggtcctttgcccattttaaaattgtattatttatctttttataattgagtcgtaagatttctttgtatacagtagtcctcccttatccagaagggaaatgttccaagaccccagtggaagcctgaaaccctggatagtactgaaccctatatatattgtgctttttctcatacatacttacttatgataaagtttataaaccaaaccctgtatatactgttttgtctcatacatacttacctatgatcaagtttataaattaggcataataagagattaacaacaataactaataataataaaggagaacaattataacaatacatcagcattactactcttgcactttgggggcattataaagtaaaataagggttacttgaacatagcactgagatatcacaacagttgatctgataatcagtatggctactgagggcaggtggtgtatacagcatggatgttctggacaaagggatgatttatgattaaggcaggatggaacaggacagtgggagatttcatcatgctattcagaaaagcgcataatttatgaattgtttatttttagacttttttgtgtcatatgtttggattgatacatgatttgcaaatattttctctcaatttgtgggttgtctttttactttcttggtggtgtcttttgaagaacaaaactttttcattttgatgtagtccaatttattattttgtattgttgttgcttgtactttttgtgccatatccaagaaaccattgctttctccaatatcaagaagatatatacctttgtttttttcttagaattttagagctttagcttttaatccattttgagttaatttttatatatgatgtgaaatagggaaaaatactattaatttttgtttattgatcatatcctgtaatctagctaacttcacttagtagatctatttaatagtaattttgggtaaattttttttaagtagacagtcatgtcactgcaagtgactgcagtttaatgttttcattgataatctgtgtgtcttctatttttcttgccatgttgcattggctaggacctctactacaatgaatgggagagtagtgagaggatactcttgtcctgttcctgagcttagggggaaagtattcagtctttcatcaagtctgatgtaaggtatagggtgttttgggaaaaatatatttaccttctctttccctctctgtttcctttcccctacactgccccttggcatttctggagcttttatttctttatgtaggtccaagtttcagtctggtattatattcccatcgactgaagaatttactgtaagttcttaaagtgcctgtctaatattggttgattctcttagcttttatttctctgagaaagtatttcacctttgttttcgaaagataattttcaaaggatatagaattctgggtttataatttttttttctagtagtactttacaaatatcattccattggccaggcatggtggctcacacctgtaatcccaacactctgggaggccgaggtggatggatcacctggggtcaggagtttgagactagcctggccaacaaggcaaaacctcatctctactaaaaatacaaaaattagccaggcgtggtggtacacacctgtaatcccagctacttgggaggctgaggcaggagaacagcttaaacctgggaggtggaggttgcagtgagctgagatagtgccactgcactccagcctcggcaacagaataagactctgtctccaaaaaaaaaaaaaaaaaaaaatccctccactatcttcaagcttacatagtttctgatgaaaaatttttgtttttgtttctctgcattatatcttttttcctccgattatcttcaagatttccttaaccttggttttcaatagtttgattattaaaatatatatatatatggcttggagtttacctaaatggaattcaacatatacatatacaaatatatacacatatacaaacatatatatacacatagagacagtcaattcttgttatttgtggtagctatattctgtaaagttgttgtatacactgaattagtgaatactgaaactttgtttgctcctaggggttaggttcttgtgaggctctggtcacaacattttcatcaactgatcaatagataaccttgctttatatgtgtttccgtttaaagacatattaatatgtcagttgatctattaacattgaactcatagccaacaacacatgcctgagcaaagattatcacatatatatatatgtatgtattttttgcaagacacatcacaacttctcatacttagaaacggtaggcagtatgcttggggacctatttaaacagtgaagtcaccagcaaaaggaacaaaaatgtgaaaaatgtggtactaaataaatcatgagatgaacacttgttttgccattggaaaagctaaagcaagaattcttgtttgacttcagctgggaacacacatgtatgttcggtgacatttttttcaccattctgcacttgtccacaaaagcactgcaagtattgattttgaggttgcaaattatagtgagtaggtaaattgacaaatacagaatctataaataactagaatggactgtgtacacatatatacactatacatattctattcatacacattctatacctatgaacttaaacatatacacatacaaatatgcatacacacatacatatgcatatatacacatacctcatttaaaaatttttgcctgagcaaaagatctattacaggaaaaccttaaggcctgttcacgctcattttcagaaaacgttgtttccatctttttcatgaatactactgcaattggttggcttactttcctaccttagcattatatatgagtgtatttatatctgtacacatatataggtatatacatttatatgtatttatagatttgtggtatttaaatctacttattaaacagaccttggacactgtactaagtctgagaatagaaatgcaaacaaagaccacatggtgtgccctatggaacttacagttgatggactcatgaataggcaaaaagaatgtaaataaaataagtacaaattgtgtagtagtaaatgctttgaagaaaataagcaggatactgagaagagaggggtggtagtgaccagggaaggcctgactcctagtgaggactatgaaatttttcccttattctgtcagtattcattgttcaagaatttaatcagatttgccctggagttcatgtgttttttattttaaaaattctattgttaatcatgttgctataggcatgaagcatttttttttttttagagaaaaacttaatgttttgtgaaagagagagacagctagagttttttgtttgactttgccttctcctgactttccctctgcaaggtttttgtgtttctaagttgtcttcttttagttaggagactagaatacagaaaaacattctgctaaatatgattttaggtattttgtcataaattagatcttaggaaaactgattttcaaggcatcctggggttttaacctaaatttcccaaaatattaaggctgtgaatcatttttcatcacaggatctttgtgatgtgtcaaagaaaacaattttgtaactgcagttaaagatatctaccaaagtaacacaaatgctgccttcaaaatgaaaaccagttttctgtttattcttgctaaatgtttatgtaatataaatgtagtatgggttctggttgatgttttgtgaaaattatgttctgtttcatccagcgcaagtatttacttgatctgatttcttcttgatacaggttaaatgggccagggaaaactatcaccataacattggctcaccatattgcttacggttagcttctgctgatgtcaatgggaagatcatcgtctgggatgtagcagcaggagtagctcagtgtgagatccaagagcatgccaagcctatccagggtgaggaaagtctgctcagctaagtgtgtatattgatacacttactcttggagtggttttttggttttgggggttttcccccattcatttaattttatcaattccaagttagctcttgattgtgttttgcctattctgctgatctaaatctggctttctgtccttactaatacacttctaggcatatttcttcaaatctcaactgatttgtgctttggtaaaactcattaattgcaatatcagcctcattcaagcatgataagaaaaagtaagtggtacaatcttgtaatctaagctacaatataaggaaaattggccactgctgttaggaactagccatcagtgcttactctacattaagtaatttgttcattatcagagatgaacaaaattttattctcattttcatatagattgcttgtttgttcgtttcatgttactgacctaaaaccagtacggtattctttttttttttctttttttttttttgagatggagtgtcgctctgttgcccaggctggagtacagtggcgctatctcggctcactgcaaactctgcctcctgggttcacgccattctcctgcctcagcctcccgagtagctgggaccacaggcacacaccaccacacccagctaattttttgtatttttagtagagacggggttttaccatgttagccaggatggtctcgatctcctgacttcgtgatccacctgcctcgtcctcccaaagtgctgggattacaggcgtgaaccactgcgccctgcccagtacagtattctttagacttaagtcctccagtggctctcttgactgaatgaattttttaaatgactatttaaaaaatatttattaaatacttactgtgtactaggtactgaactagatctttgcatattctgtttattttttgaaaaaccatgaagaactgtaaagttccattaagtaattccacagaaacattaggaaagtctgacatcttggttgtggctaagagagtttcatattgattttatagttttaagtaatgattagggcaaattgccttttattttctttgaagtaatatttcagattacttcaaaatttttaccttgagagtttaaccagacaacttatttttatatagaattagttttttctctggaatattgatacacacacacacacacacacacacgtcacatttggggctggtggttaagtttttaaagattatattttaaaaactaaatatcaaggacaagttagccaaggactttggagagtgtggtttctgaattttgcctttctttatcgggtctttccagatgttcagtggttgtggaatcaagatgcttcccgcgatttactgcttgctatccacccgccaaattacattgtgctctggaatgccgacactggcaccaaactatggaagaagagctatgcagataacattctttctttttcttttgacccttttgatccctcacatttaacttgtgagtaacagttgcttgtggaaaatgagttaagtgagatatttataatatagtaatgctatgtgcatgagatatacacacacattatacatctataatgttaaaatgactgagcgaagtggagaagcatgtctagtccatatatctgcagctcctaatacacatactcaatcataagttcatatcattgcaaatatgataaaaaattaaatcagcaagctacaccttcactgtgttgaatttgtgaatagtattagactagccagggacagagagttactttgacactccagacttaattagttcttctaagaacatttaaataacttgaatcaagggtttcattcagtctgtggccaagttaagttcttgctttttaataaattgtcctaattcacgccattcattttgagtgccataaacagatgcatgtaaagaagaaataagcctaagcaagttttttcttgcagagatagtttttgctaatatgcttttaatgttttcctgagctaatgatctaaaaatgagatgtgctttaggtatttttgtggctaaattgtttagaaactatttaatcatccaacagatatttcttgagctattgctactcttctgggaaccaagatgtctcagaacccaaaaggcaggagccttcacagagtttgcattctagtgagaagaagtcatatcataaactgtgaccacaatgaattaataaattctagtgtagtaagaggtgacaggtgatataaaggcaggataaaggggatgcagaagaatgggggatgagggcatgcaagttgtatgagataaagtggtcaaagtaggcttcactttgataatgatcagaaatgtgaaggaggtaagggaattagctatggtaaggaatgtttttcctggatttgaatgactcaaaattgttttacccatcaacttttattgaggggtgtgtgtgtgtctgcacgtgttaaaggaggaagagaaaggcagacaaaattgaaattataataacatgggaaatgtggctgtgtaaatacactacagggtgcttaggcttttatgtatgtaaatgtttgtatatggacgtgtgcatacatacactcacttggtcaccagtttacttactcacataggtgcagtgctggggaaacacctaggagggctggcccagttggcagagtcagggaaggagggcatcacaaaagaaggaagcaaaggggaccttgaaggatgagttctggaacctgaaaaggcaacaaggctttcagctaacttgattgcatcagctctttacatctctgtaatttggttgatgaaagcattgtgtgttccagagtgtcagttgacctaacatctttgatttactcatattgaatgtgctagggttgtcataactcttgaatgcatcctttttccctgtgtttagagcagccttgctaagggctgggacccagggtagtaaggtttttctgctcatgtcttccagtattaggcccattgttgagggagattattttttcagtcataaaaaggcataatttgtattgctaaatatggtgctccctccttgactatttttgtttcatgtacacttagtaagtcactgtgggcccactactgttttctaaatattaagggaaaagaatattccttaatcatcttaaggttcgatctgatgcttgagaagaaaaagggaatatatttagactgagtagctcaggataaaaatttggtatcatcaaataaaatatatgaacttagctaattgtgatatgcagagcctcttaagtatggttttttgtttttttaagttatgggatatgttaaagtttttttgtttgtttgttttttgtttttgtttttgttttttttttttgagatggaatcttgctctgtcacccgggttggagtgcagtggcactatctcggctcactgcaacctccacctcccagttcaagcgattctcctgcctcactctcctgagttgctgggattacaggtgtgtgccaccacgcctggctaatttttgtatttttggtagagacggggtttcaccatgttgatcaggctggtctcgaactcctgacttcatgatctgcctgcctctgcctcccaaagtgctgggataataaggaaagatttttaatgaaagtccgtgccctgaatttatttagaagaacaaacacttgttctttctgccaataaccttatgttatctttttaatataagacataatatagaatgccaagcttggaggcctctgatgaattgtaatggaccacctgtttctcttcaacttagagaacattcccattatgttatgaatgcataacattgccagttatatattattaaaattatcactatattgctctcaaaattgtattggaataaaactgtatgctaaacttcattaaactttaatcagagttttgcttttctcaatatagtgcttaccagcgagggtattgttttcatctcagacttctccccatccaagcctccctcaggccctgggaaaaaagtttacatatccagcccacactctagcccagctcataacaagctggccacagccacaggtgccaagaaagctctaaataaagtaaaaattttaatcactcaagagaaacctaggtaagttacaagtgtaaaattaacattcatctacttatctggtatgaaagcatcatttttggagatgtacaaagactgatgtttttcttcatctcactttttctcatttctaattttgaatttattagaggaaaaaaatatttatttttgtcccctgccctaagaggagattcagcatttaacattgcctttgtttccactagctgtgctaaacttccccactgacttttatagattaaaatttttgaattctgatttttacttgtgaaaatcgcaatgatcctaaagttcaggcaattgaatgcattaaaaatttgggcacaaaagctggatactcattttaaatacattttcctgacttaggtgctgtgcattctcattcagcagtaaaatcggagtgtttttcttatgcaggtgaagatgtctcccatcctggttaagagccaaggctccgggggaagctttagctatgagactgagaaacttctttaatcttactcaaatttctctctcccagtctctaaaataaggctttaaagtatttcatagggttgttttaaagatcaatagatccaataatgtaagtaaagcatgtaatgtcattgatacatagtaatttatttagaagatgtcggctgttattaagaaattacaactgaataaaagtttattttaagtaatttgatgtattcaaaataggtttctttctttttcctatagcaataatctgtatattattgctttggcaggcttttttgtttgttttggcattcattttcagatagcctttatttttaatatgccaagattactctctctaggcttggtgagtaactacttgaaaaatatgtggtaaaaatataaattgctctacaaatacattttgcacttgtgtgtaagtatcacttctatatattaagccataggctggttaagttcactagttaatttatctctcaccctgtgccaaaatgacttaagattacttcttaagtatcttaagagaactttctattttttatgtattccctctcataaacaagaaattatttggcagtctgaatagttttataagttatgttttatatttcttaagttttctctcatatgaattatatgtatatcttgagtattggggaaatacattatttcttcaagtagaaccgctctgggtgctttcacatctattaattcctggactcttactacaattctggcagtagtaatattcccattttacaaataaggaaaactgagtcccacaccaatttaaataaagttactcaagctcacccaactaggacatggcagtcgggattttaatgcaataaaaattcctctttctagtcttgtgaactaactttattttaaatttcaaagccttttaataaaattatgtttgtaaaatgaaatgtaaaatgaaaatagtacataattgtatgtctattcctattgaaatatatttaatatagaaaaggtcattgaatgtatgcaacaatcacaaattattaaaatgatttttcagaccctaacaatctcttaaaatccttatagtttcacctgttttatttacacacaagaaaatgctgcaatataagtgaaactttgtttcaaaaaagatttaagacagcttaaaagtgaatgaaggcagccaaggggaagttacttgcccaaagccatacagatagtccagtaactcctggtccaggggccctaattaccctaaatgttgatgtttttcatcctgagtcttgattttaacagtttgcctagtacttttaatgacaaagtaaaagtaaaataaaactgtcttatgcatgccagctattattatattatcatttaccatgtcttgtgtaatattaataacttaatattctactacttaatatttcaaaaacttagaaacactgacatttctacccatcctatacaatattattagcatttggattttggtacatagtagagatctaagttttggatgccaacccatgttggtcacttcagggaatagttgtacatttttattgtcaatttttatgtgtaaagtacaaaattaaatcttttattaggtctgatataaatgaagtctttgacccaagtgaatgtttacttttttcagtgctgaattcataactctcaatgattgccttcagttggcatacctgccttcaaaaaggaatcacatgttgttgctctatcctcgagagattttaatccttgaccttgaggtgaatcagacggtgggtgtgattgcaatagaacgcacaggagttccatttttacaggtatctacaattcataaattatattccccaaaattattaagaatgttatattaaaagaaggccataatcttgcataagtcttgtcttcagttctccactttctcttttcaatttatcaaaagactagcaacactattttagattgttttttttgtctgcacttttgattggtttgatttaccctagaaattgtgactgatcctgagatatttattgaactatttaagtcacatgggtaaagacaaattattttaggattataaatggatattttaaatgtacatttagttttaaagtttgggatttgtctatttttttttcttttgcccatattatctaaatatgagtttgagtttcacagtatatactttattaatctattgtgttttaaaaaataaatatatcatctatttaaaggtaataccctgctttcagcgtgatggtttattttgtctacatgaaaatggttgtataactttacgtgttcgaagatcttataataacatttttaccacttcaaatgaggaaccaggtgagtttctgtctcacaataatgttatatttttcttcaaaattattttataaagcttgatgtggcaaataccagccaaggtatatagttaatgatactccttgctttgaggaagtttaaaatatggttataataagaggcataaaaagtataagcccaagattaatctcttgatgttaaaacagtgcacctcctgtatacatcaaagagagtaaaattttgtgtttcttgatcatatccatgagccaagtagatattattttttggaattttttttttttttcagtacaagtccaaccttgtgtgcctttattattatacccccttgacttgttggctgtaagaacttccattgtaaagtgacagaggttattaagtctcagttgtcaagtcagtcttatcttggagaatggaaataatgtttttgtgaaattatatactgtgtaaagatcaaagtgattttcacatcttttggaaagtacagttattttcaggcttatagactactacaaattatgatggaaatttattcattaattatatatcactgttgatcctttttcaaagtatcgtctttattttaaaatattgaaaaaagatatcttgattatagttgttattttggaaattaaacttagtacagtcattaagtaaattatatttggaaaaaatttagtagtaattgtaaaaagtgaagccatgcttgacattgcattcatgaaggagtgatgcccaaatttagttgaggttttatttaaattgaaacaaacagtagtggtatcgatatggctgctttctgatatttaaaacaattttatgtgaagatccagatccagttcaggagcttacctatgatttacgaagccagtgtgatgcaatcagggtgacaaaaaccgtccgtcccttcagtatggtgtgctgtcctgtcaatgagaatgcagccgccctcgtagtgagtgatggcagggtcatgatatgggaactcaagtctgcagtttgtaatcgaaattcacggaacaggtaaatgaatcaacaggatcatggttttgttttttgtttcctgtttccttttataaaaaatttccataatcataaaaataggagggctggttttctataaaaatatttttaaggtaataattaaggctttagattattagggaattatgtaaatctgctagagctatttcacctatgggtaagatgaatgaataatataaaaatagatagaatgccataatctggacttaatactttgaattcctaatacgtaatgcagattttaagtatgtaaaaccttctaattattatgtctttgcagtagttctggtgtgtcacctttatattcaccagtgtctttctgtggaattcctgtaggagtgctacagaataaactcccagacctttccttagataacatgattggtaagcttttttcccctctaactccatgttaagtattctttctgaagggcaaaattaatagaatcactcacttgtaattattttaaagtcaaaaaagttaatacttgagaaaactagaacatggaatcattctttcctaaataaatcagaggggtttaaaatacttaggtagaaaagtgcctgaagtagcacgggtttgcattatagttgttagaaatagaaaacgttcattcgtgagagactgatgtaaatgaaagcaatgacattaggcatctggattttggacctagagccgatgctgagctatgccatgccaactcagggccttgctgtttgctggttcctcagcttggaatgaagtacatgcttcctttctgtctgctactcctaattcaaaattcaactcagatgttgttttctttaatctcccaagtctaatttaaatgctcttcttttgtttttcctaacagttatcagcatattttaattgtgggtttttttcttctgtttcatctcatcaattgtaagcatcacaagggtggtacagtgtttgattctattttgtctttcccagcactcagcacagtaccttgtgcatgcctgttttgtagtaaatatttactgaaggaataaagtaactgagcagtattagaaaagattattttaactttttgacatgaattatttttatgttggggattctttcaaaaaatcatttttggagataaagtgttcaaagttatttaattatgaggccagtatgtattaaaggaagaatgagagtttgtgatttcaaattttatgctacttgaaattataaggctttgtaaatatgccaagcaatttggacatctaatttttttacagttgtggctatggtttataaaggattttctgttttattatttattctaccataatataattgaaaacgatattatttaggagggtttttttgttgttgttgaaacgctaaataagtgatgcactagaaagagcattggccaggcgcagtgactcacgcctgtaatcccaacacttttggaggccgaggcgggaggatcacttgaggtcaggagttcgagaccagcctggccaacatagtgaaaccctgtctctactaaaaatataagaattagccaggtgcagtggcatgtgcttgtggtcccagctacttagggggctgaggcaggagaatcgcttgaacctgggaggcggtggaggttgcagtgagccgagattgcaccactgcactccaacctgggcaacagagcgagactcgatctcaaaaacaaaaaaaaagcattacattattaattacattaattagatcacatttattgggtacttcatactgtgttaagtgctgtgctaaatattctacatattaccttggtacagctttgcaatgtaagtaatattatctccatttgatacatatgagaactgaggcccagagagattaaaactttaaaccacacagtcacacagtcacacaatggaagagcccaagtgtgacccgggtaatcctggctccagagcctgctccttagcaatggcctccagtcctgacagctccactgtcatcttgggtaagaccatcattcatctctaggcctcagttttttcacgatttctgccagttatgaaatccttttgttcagtgatacttactattatatctaaaattatttctctccactatctattctaccagacataaatccatatgaggaagcctggacacatgttttgcaaaatttattttatcagtaacacaattttttgagttaattcaccttgtctactcttaatatgaaaacttaaagtgaaaagaattataaacacacacaagaacagcactaatcagttatatggagcccataggagtttgaaattttatgctgtttaggtatctaagtgatataaattacaggttttttttttttttttttttttgagacggagtcttgctctgtcgcccaggctggaatgcagtggcgcgatctcggctcactgcaagctccgcctcccgggttcacgccattctcctgcctcagcctcccgcgtagctgggactacaggcgcccgccaccacgcccggctaatttttttgtgtttttttagtagagacggggtttcactgtgttagccaggatggtctcgatctcctgacctcgtgatccgcccgcctcggcctcccaaagtgctgggattacaggcgtgagccaccgcgcccggccaaattacagtttttaagagacaaatggatacggattgtatagcagttcttgacaatgtagttgattttaaagtgttaaataaagcttcgtacttgaaaacattttaatttaaacttttaattaaacttttaatttgaaattcactgtgttcttagtgaaaattcaaagcaattcaggtaaataaagaggctgatttatattcactggataaatgctgatacttattaaggcctaatttgccctacattgtgaattgcctcttatgaaaaatacttgaagaaaaatgtggcattccctggatgtcaactcaaagccaacatatgtatgtgtggcacttacatgttaagcttcccattccttcatatttcatcttttttattttattttattttttttgagatggagtctcgctctgtcaccaggctggagtgcggtggcgcaatctcggctcattgcaacctccacctcccgagttcaagcgattctcctgcctcagccccatgagtagctgggattacaggtgtgcgccaccacacccagctaatttttgtatttttagtagagacagggtttcaccatgttgaccaggatggtctcaatcttctgacctcgtgatccggttgcctcggcctcccaaagttctgggattacaggcgtgagccaccacactcggcctccatctttttttaaccaaagttatgtagagagattgatattgagtatgtggctaatcctaagggatcattttaataggattaaaatgctattttttctatatattttgtggattttaaaataacattattaaaacaactttacagcttcaaaaggttgtatttatcacccactcttagtaattatttatacttttcctttcacactatatacatgtttgtgtttatgtgtgtgtagacatgtatgtatatactcatgcatattctttctatttttggcaagttaatcccaatattctgtagtggtttataggaaggaaatttgtatacctttttaatgaacagtcttgatttcattgtactgtttagatttagcttttgttagaatgatttttattggagtcatctttttagtttgagacttgctaacctaagtacgaatggtatatgtgaaaataatgccattgaagtcttaactattgacagtgatggtgtatatattatacacgtgatttatgaatatatatatttgtatttgttttatatttacttataaaacattttgtaattacactgacacattaaggtttcttattagaaattatgaataagttatttaaatctgtttttcatgaataccaattttgtatgtactttacagagtacatcagattgaaaagtaaccctttcaaaaggcagtaaaatgagaaaaatgtggtacagtagttcactctgcagaaactgttctctaatgcaagttctcttgctttgttctgaagcctgtgtagtgctttaataccaggaacattgactgaaacagtgtttcttagaagacataggtccctgcattctggatagcaggactcgggagtaatctatcctttgaggtgttagttgatgcaatttaagtcctatagccaggtacagagtcattgtgtccttaataactacagccactaaagtactacattaactacattatacttttagacctgaagagcatttctactgaaaattttctttagctttttaagatcagcatacactgtagttaatatatttgttatttttattacaaatcagggcaaagtgcaattgctggggaagaacatcccagaggttcaattctgcgggaagtgcacctcaagttcctgctgacgggactgctttcaggactgcccgcaccacagtttgctattcgtatgtgtccaccgttgaccacaaaaaacatcaagatgtatcagccactgctggctgttggtgagtatttgacctggtctttttttttttaactcactttataagatgtttaggttttctagtttctagaagatcctttattctttttgaggatgctttaaaaggagatagagactaagtgaaactgtaaatactcatcctggaacttaaaaaaaaaaaaatttctgtccttttattccaactgtcttatattgaattggaatgctgagtcttcatccacctgagactggacagtcgagtctctgacgctgtccattcatctcggaaataccaggaggctcatccctgcagtgctgaatcccaggctccttgtctgtaattggaccaccccagtctttatgtcatgtcagttttcgttgggtctttattgactaaaaatatagtcagggttaatagcttaataatagcagggttcttcttttgccaagagttatatattaaatattatttaaagtggctatggtccctataaattaagatttgccttttggtgtgaaattgtgtatttgtatgttataggtagaaaaatttatctgggttccaacttgctgtcacattgatttcatagtaatgtgatgaacctaattttctttacagcatagagaaaaaaacaaaatttagtttgctattaagtacacattattaaaatacatttctccaaaacttctgaaaaacagtgtatttgtttgaaactcaacatttcttcttaagatgctatcggctggcttctggctttctcccccagtctattaacatgtgatttgtggtgaaaacctcaccatatttattctgtggccaacatggctgacttctcagtgttaaagactcatttgggtattactgtttggtagtacccttctgtttttttctgtgcctatcttttgaaagcgatttgatttttatgattcaattgtctatatatgtgtcccgatttatataatgcagataaatgtttaatttttgctttagaaactgttgattaatatttcaccactaatagattttaattaggattcatcagtgtgcttcatatgtgcatgtatgtattatgtcagtgttcctgatttgtcagttaggattttgtcaatttcttggggaaaactacttcttgggatagctatgtaataagagctatggcaaggtctgagctttccattgtagaataagctgtattggtatgtagtgaatatcatttactgaatttagtataacaaagtaaaaatataagtacctaaaagtttgtctagaggtgtcactaagaaagataaataagagttcagctatggaattaattctccttgtggtgcccctagtgcattagatcataggttcagcattgttaaaactttcagattgcagaaatcattggattattatgaagttctgttaattgaaaaattttagtaatttagttattttctcagtgccaaaaggtattattatgaaatagatgataaatgtaaacaactgtacaatgtgtttttctagaatagttttgcaaaagatttctggagttttattcagcaaataagataatattggaatttgcccagcatttttacttccactctgttgctttgcatgaattcattaatctttaaatcatgtgcagtgcaaaagtgattgtccatatagactgttcacttttcttgcttaacttataaaaacactatagagactgaagctttactttctcatgtatgtccgtgtcctttacatttaaactttagacatactacctgagaccatgaaaagctttagaataatacctgtaaactattaattatagtgatgacagaatactaatagttaaccaagtgcttactttgtgccaattactgtgcttagtgctttatgtttccccatttaatctccaacaactagattttctactcttcccattttaaagagatgaaaacacagatttagtgtgggcaagtaattcatccaagagtataaggaagagccagggcttaagcccaggtttctttaattgcagaaaccacagttaaccattatactttactctcttgtcaggatttatttaataaaagagacaaaacaaaaagaaaactttggaaagaaaaatggataaccctggttagtgagctctgctagattgcttatttgaggaccagctataataaaccttctgagtctcaaaaagtataaattcccatgtgtataaaagcttaggaaagtgtttcttcaaattgtatgtgtattaatgtaagttttaaggtctttctgtgaaaaatctattcctggaattaggcaaggcttttgagcacgtgaggttaggcccattttttttataaggaagtggaccagagaaattcattcttctttgtgtgtttgtttaaacacatagtttgggtttcttttataaaagataaatgtgttaagtgattaaagtcttgagaaaagacttttcttgcaaagtgctggaactcccactgaattaatgctcttccatgatgtcattttgaaaggtacaagtaatggttctgtcctggtgtaccatctcaccagtggtctgctacacaaagagttaagcatccactcatgtgaagtcaagtaagtatgtcattgtgatgatgacatcacaaacatcatatcagaaaaaaaattctcatagacttttctacattgagtactctgtaatatctgcagtggtgattatttgaaaagtttgaataatattcatgtccaactaatggctatgttaatcaaggatgataactaattctttgctgtgtaaagaacataagcagtagagaatgttttctcttttattaggttggtgcaaaagtaattgcggtttttgcagttttttttttttttttgttgttgttgttgttgtttgttttgttttgttttgttttttttaaatggcaaaaaacacagctatttttgtaccaactaatattgttgcacctcatttatttctcctaagggccaggctgttttctcactggatatccttacgttgccttgttcaggtttattttatttatttattttgctcaaaattattattttttattattttaaaattttttttactttaagttcctggatacatgtgcagaatgcgtgcatttgttacatagttatacatgtgccttggtggtttgctgcacctgtcaacccatcacctaggttttaagctccacatgcattagctatttgtcctgatgctctccctcccctcacatgcccccgccaacaggccctagtgtgtgttgttcccctccctgtgtccatgtgttctcattgttcaactcccacttatgagtgagaacatacagtgtttggtttttctgttcctgtgttagtttgctgaggatgatggcttccagctccatccatatccctgcaaaggacatgatctccctttttatgactgcatagtattccatggtgtgtatgtaccacatttcctctttctttttttttctttaattttactttaagttctgggatacatgtgcagaatgtgcaggtttgttacatagatatacatgtgccttggtggtttgctgcacctgtcaacccgtcatctaggttttaagccccacatgcattaggtatttctcctaatgctctccctccccttgcccctcaatccccgataggccccagtgtgtgatgttcctctcgctgtgtctatgtgttctcatcgttcaactcccacttatgagtgagaacatgcagtgtttggttttctgttcctctgttagtctgctgagaatgatggcttccagtttcatccatgtccctgcaaaggacatgaactcattcttttttatggctgcgtatttttcatttctataacgatccatcagtaggactgcttatgacaaattcaaataaagtcattttaattgttaatttgtcttatttattctttgtttaaacatcatcagaacgctgcatagcatttatttgatttttaggacatgatctgcttatgagttctgtgtatgcagagctgtccgagggaaagctaaattgacggaaaagtgcttcttgctttctgttccaaaatgcctacctgtgctgtccatagcattatttcgctgaatgcaaggctattttccttttgtgtcctatcagtgatagatcgtagagttacatatataaaatatgaatttccacttttttgtttgttttttgatacagtcttactctgtcacccaggctagagtgcaatggcgcgatctcagctcactacaatctccgcctcctggtttcaggtgattcttatgcctcagcctcttgagtagctaggactacaggcacgtgccaccatgcccagctaaattttgtatttttagtagagacggggtttcaccatgttggccaggctgatgttgaactcctcacctcaagtgatccatccacctcagcctcccaaagtgctgggattacaggcatgagccaccacccccagccagtttccagtttttttttatgatctttcagtgaaagcataagaagtcattttctgttttctgtacattaaataattgtaggtcttgtgtataaaaattctcagtgaacccttagcaaacacattatcctgagtacatgcattttcttaatggagaagggttaaccttttttttctttttttttttttttttgagttggagtttcgctcttgttgcccaggctagagtggaatggcgctatcttagctcactgcaacctctgtctcccgggttcaagcaattctcctgcctcatcctcccaagtagctgggattacaggtgtatgccaccacgcccagctaatttttgtattttttagtagagacaagatttcaccatgttggtcaggccggtcttgaattcctgacctcagatgatctacctgcctctgcctcccaaagtgctgggattacaggcgtgagccaccgcgccaggccaggttaaccttttaagtatcacagcttctgattgtgatggaaatctctgaaaagtttgcattgtcttactgtttcaagtgcattgttgtgtggtgcagcccaggtgactgtttattgccaccttacgctgttcctatacagcatctccccagatacatttacgtggaataataatgtctttaaaagctttgggcttttgaggtgcagtgacacaggtatctgtttggactctttcaggctgttattcatctcttctcttctgttgcagtgtctgtagcttgccattctggcacttctagtagtctctgcttacactgctgaatcttctctctctctctttcccatctcctcttctctcgacatttcctttcaccctgccttgtgtgtctggtgtttccttttatggtcagcactaaccaatcgaaactctccatttaatcactacttattctagggattatgttaactattaatacttcacacgtatcatttcattgaatccccactacaatcgtatggggcaggtattgtatttccagtctacagagtaagaaactgaaaattacagagtaatctgtgaaggagctagatggaattcactctgggcctttgaagcctcagaacctgaactcttcacttatacttacagtgcatgtgctgcatctcctgctaaaatacgcacataggttagtaggaatcatgttggcagtaaaattaaaatgttggctgagccaagatttgtgctaagaatttcacacatgcttctgaaaaatcaaacatgttgtcttttcaaacacagaaagttttaatagctaattaatcagagaggtattaattttaagtaaggtttattatcctggattagtcaggttatagatgtcactaaatacttgacttatacatgttaagataatatttatggttgagtaacattgaaattgattataagtgttacttgggatactaactctgagggatatactacttatcagataaatgtgaatgatcatacaaagatactccatttttatatgaatttttcctcttcattgccattttgaaaataatttgtattttatattcagagatactgcccaagagaacactaaaatcctgctttgtgtttcagttaatgcaattttagtattataatcaaaagccattaagaaaatttcacagaaatacaaaaattagctgggcgtggtagcatacacctgtaggctcagccatttgggagcctgaggtgggaggatctcttgaacctgggaggcagaggttgcagtaagttgagattgtgtcactgcactccagcttgggtgacagtgagaccctgtctcaaaaaacacaaaacaaaacaaaacaaaactttcacgatgtattataaaaatgtctgaatttattagcagtaaactcaaaacattttagattttcatgtccaaataaggttaacttttagaaagttgtttttctaccttttattaagtgtgtttttaaaaaatcataatctaaagcacttgaaggttgtatatactgtgccggggactcatgacagcagatagcacaaagtgtgtgtgtttttaaaaccatgatgttttaacttgtgatgctttatgaatatctgttgaatatcttctctatgcttataaacagagaaagcctttgaagcttataatgcaatggaagatacttagaagtaaacaaaatagagaggtatatgtagattttcttaggtcattagtttgtgtctttgtctggtaggctgaaactactgtcatatgactctctccctggccagattttaatagtcatactaatactgatgtgaatcctgataattaaactatcttgtcattacatttgtagataaagttttggttagaaatgattttgtatgtgttaggtatggtaatacagtctcaaataaaaggtcatgttaagataaaaggtcatgcttactttttaattaatttgtgtaataaaatttaggtctttggaaaacttatttttcaaataaatgaacctttcaaataaaaaagagaattagtttaacctttatctcatttcctattataggggtattgaatggacaagtttgactagttttctttcttttgctacctcaacaccaaacaatatgggattagtgagaaatgaacttcaactggttgatcttccaacaggtttgtttttaaagatccaaataggtttgtcatattgaataaacatgttgccatttataaaacatgtttgaaagtacttctttcaccttggaatttttttttatatttcatgcttatatatttattcttttattctctaataattgccctagaaaggcctcatcattgtttacatggaaatgttgttggcacaaatacatggtaaaatggaggaccattagcctgaacagacagattcattaaaaaataggataccggttctacttttaagtgcattgttatatgtaaccaactttaaaagatcgatttaaaaataactctgtcaatggactttattagagtctgtgctggaaattttggcttttataggaaacacttagaaaatttataggttaaggattgtttttaaatgctcaaatttaaaacttgtaatagtctctggctgaatgaatagagaaacttaatttgggattttgaagattctacagtaggaaacgtcccaataaggtaactttttcagaattgaaagcctaaacccagtgaatttcaaaataaagaatttgaaaatataataaggaaagagtttcaaattattttctggtgtatgcagtagtttcaaagaggtttttttaaaaataaaattgtgatgagtttctttaaaatggtatagcaacacgaatcatatgtagatgatcttaaccaatgagagcatgtgtatgtatgtgtaaaatgaattaaatcaaataaatggttgtaaatcaagtaagttgtaaataaatgaagtacatggttgcttttttatgttctccatatgtattttcaagctctcaaagatccagttgttcttacttctcagggtatgttgctgaacttccaggaatcattcccgtctttagtccagtgttgctgctctagtctcattggaagtgacctgtccactgactctcatccccaagttcctaatttgccagcagaatggtactggccctgtgtctagtgatcccagggataaaatgctgttgtctagtatcattgacttaaaaaaaagaaaaaaaatccctgttttatttgttttggtcagctcaagttcaggactgttagataacttaaaatctgctttgcacagatgtatttttaaggaacaaacatctacagtaacagttacagatttccttaagtgggatatttgagttcatagatggtagacttttatagcctgggcttctaaggagggcagcagactagtgcagtcaggacaggacatgggctgtttggggtataataatagtgagtatagtgagattccacatgatggaatctcaacaaagagtaggaaggcgtttaggccttcagttgtccttgaattgagtatgttctctcttttgtttaatgtagataaaaatctaacacaagatactaaaacatacaaggtagaatttatactttttttattcacagaaaatcatgtaacttcctttgcgggtaactcattctttcacagcatacatgaacaccgtagttattccctagtttccagtttataaagatgttttgagaggaacatgttcaaaatatttaactagtattttgcacatgggacaagaagatcttaaatacatgtttcaagagtttttcccccactagttagtatttggaaacatgggaatgtttgtattaaatattactttaaataagtagttttcgcaccagacaattgctgtaccataaatatcttaaaacttaacattgtttttttaaatttctaaaattgaattatagaattcaagaaactgtgtgacaaatgaaaatgcctttttacaaaataaatatctgaatatgtgatatattattgatcattagtttgtaacacttttaagaatattctttgaacttacattattagaaacagcttagaaggaactgggcgccgtggctcacacctgtaatcccagtgctttgggaggctgaggcagatggatcactagaggttaggagatcgagaccagcctggccaacatggtgaaaccccatctctactaggagtacaaaaatgagctggcgtggtggcgagcgcctgtaatcccagctactcgggatgctaaggcaagaaaatcacttgaacctgggaggcggaggttgcagtgagccaagattgcgccattgcactccagcctgggtaacaaagtgagaccatctcaaaaaaaaaaacccgaaaaaacagaaacagattagaagcaaatggaagaatgaataggagaacagagggtaggatgggtaggactgatcaaattacattggcgtggcttcttgtttttcatacatgttttatgcactgttctcacttttttaaatatttgcaattaaaggtaggagcattgcttttcgtggtgaaagaggcaatgatgaatctgccatc

SEQ ID NO: 14871 - DNA, 1781 bp, Homo sapiens
aacaaggcggcggtggactggtgaggacgccgagcttccaggtcgccaggatcggccaggaatgtgtgagggggaagggggaaggacaagaggtttcaccccctggggctggcaaggtttaattgcttatggatgtcattcacttgtggtagtgattgattccattactgcccaaactcttcaagttttagaaaagcataaagctgatgttgtaaaggtccaagtttcagtctggtattatattcccatcgactgaagaatttactgttaaatgggccagggaaaactatcaccataacattggctcaccatattgcttacggttagcttctgctgatgtcaatgggaagatcatcgtctgggatgtagcagcaggagtagctcagtgtgagatccaagagcatgccaagcctatccaggatgttcagtggttgtggaatcaagatgcttcccgcgatttactgcttgctatccacccgccaaattacattgtgctctggaatgccgacactggcaccaaactatggaagaagagctatgcagataacattctttctttttcttttgacccttttgatccctcacatttaactttgcttaccagcgagggtattgttttcatctcagacttctccccatccaagcctccctcaggccctgggaaaaaagtttacatatccagcccacactctagcccagctcataacaagctggccacagccacaggtgccaagaaagctctaaataaagtaaaaattttaatcactcaagagaaacctagtgctgaattcataactctcaatgattgccttcagttggcatacctgccttcaaaaaggaatcacatgttgttgctctatcctcgagagattttaatccttgaccttgaggtgaatcagacggtgggtgtgattgcaatagaacgcacaggagttccatttttacaggtaataccctgctttcagcgtgatggtttattttgtctacatgaaaatggttgtataactttacgtgttcgaagatcttataataacatttttaccacttcaaatgaggaaccagatccagatccagttcaggagcttacctatgatttacgaagccagtgtgatgcaatcagggtgacaaaaaccgtccgtcccttcagtatggtgtgctgtcctgtcaatgagaatgcagccgccctcgtagtgagtgatggcagggtcatgatatgggaactcaagtctgcagtttgtaatcgaaattcacggaacagtagttctggtgtgtcacctttatattcaccagtgtctttctgtggaattcctgtaggagtgctacagaataaactcccagacctttccttagataacatgattgggcaaagtgcaattgctggggaagaacatcccagaggttcaattctgcgggaagtgcacctcaagttcctgctgacgggactgctttcaggactgcccgcaccacagtttgctattcgtatgtgtccaccgttgaccacaaaaaacatcaagatgtatcagccactgctggctgttggtacaagtaatggttctgtcctggtgtaccatctcaccagtggtctgctacacaaagagttaagcatccactcatgtgaagtcaagggtattgaatggacaagtttgactagttttctttcttttgctacctcaacaccaaacaatatgggattagtgagaaatgaacttcaactggttgatcttccaacaggtaggagcattgcttttcgtggtgaaagaggcaatgatgaatctgccatc

SEQ ID NO: 14872 - DNA, 2229 bp, Homo sapiens
atatgatatgggacaaaatacagcacttaaagagaggtgttgctcaggccagccactataatccacccatcagccagaacattttatttcttctaaatggcacttgagcaacattggtttctttgaaaagaatgaacttgagaatgcaactcccaggaccagaaaagaatgaaactgggccagtgcttgcatggtcctgctgctgctcactgcactttgcttcaaattcttacatttgctctcatttctacatggcaggtacttggttctctctctctttctccctctttctctgtgtgtgtttataatttttttttttttttaacagagaattaaaactaaactaaaaattttttttttcctttttttgaggtaaggtctcactcttctgcccagactggagtgagtggcacgatcatggctcactacagccttgacttcctgggctcaagcagtcctcccacctcatcctccccagtagctgggaccataggtccacaccattgtgcctggcttttttttttttttggtagtaacccgggtctcactatgttgcccaggctggtcttgaactcctagttcaagcagtcctctcaccttggcctcccaaagtgctgagattacaggcatgagccacccagccctgcactgaaagttttttaaaattaaactgaaggctgagcctactcaagatcatgtacctagtcactgggaaggtgactggttcagtgtatgcattttgaggatcaaagcatcagcacagagtacccaataggctgtttaaaaaaataaaaataaataaaaaaaaaccaataggacagggctttctaaaaacccaacaaccagatatagggaacattcagaaataaatatctgcccccaaactgccagcctctcagactttcaaatggaatgaggatatgcaggttaagtttctcctctcttatcattcatcttccaatcttcagttgagtgtaggttatgggaggatgttggttgggtcttctggaaggagaagctttggactcagctggtacgaaaggtaatgatggtacagactgagacatggcctactatggccgggaatcaccctctgcccgcgaaaagtctcctgtgttcatcctgtgctgcccgctgtggacaccaggtcccttccgagcagccagcagagcagacgcgactcacccttcctgcttctgggagcctgtgaagagtctcatcacagccctttttactcttcttttccttaactatggtttacagaaactcatcactgctatatatgcagattatgcccggagtttgaagaacctcggttttaagcagggagcagttctctttgcttcaaaagccggagcagctggcaaagacttattgaatgagcttgagtcccccaaggaagaacccattgaagagtgacagcttaataaatgccagggaatctgacctggaaggcagatgggagggggctggtctggctgtggccaccgtcacagtccaggatgaagaggagtacagggtcctgtgagctgtttgaccactgttctaagactatgtgtgcccaaaagcacataagcatctatgttgagagtaagtttgtatcctgcgttggtctcagaaagaacgtgaatgcttaagattttgaaagtacataatattttatactttgggagagagctttaagagtccctggaaatactttttaatttttttaacttaaaattcaagagactgaatcacttttctcattgattaaatgtaaagattattgagaaacctatagtaaatgaaatttgtgagatgttttctcaaatatatgctgtgcctgtacttatatacagtctttcaagagagatacaaacaaggcagaaacatttaaactagtattaaaggtagtttaccaaagcattttttgttttcttaccttgaaaacacagaaccgttaattccttggtttaagcagttgctaagttttgtaattttaggctcagaggaccataggaggttttaagatttatgtttagtccgataggtgaggtctttgatattttgaattttaactccttttatgatacatcacagtaacctcatttttgaagtctttctttgtactttaatgttctctctgttctaatagttgaagtatgagatgtaactattataaactgttgctgaaaacataaatgtctgtaacttacaaacatgataaataaattaaaaattccatcc

SEQ ID NO: 14873 - DNA, 2229 bp, Homo sapiens; identical to SEQ ID NO: 14872

SEQ ID NO: 14874 - DNA, 11519 bp, Homo sapiens
agcgcccaggtcctgggctggccgccgggatgttgccctacacagtgaacttcaaggtgtcggcgcgcaccctcacgggggccctcaacgcccacaacaaggcggcggtggactggtgaggacgccgagcttccaggtcgccaggatcggccaggaatgtgtgagggggaagggggaaggacaagaggtttcaccccctggttagtttggcctcgctaaggcagggagccgccctcacgcaatgagcttgctttcagttggtggatttttgttgttacaaaagtgataatagccccgtgtgggaaattcccccatgcaaatacatttcccctctttctcgcgtatttctctgctgttttctctgcacctcgcccttttgccgttccattcctctctcttttcctctcctccagcttccaggcttctctctctccaccattaattccctgtgcactttctctttcccatcctgtcttttctttttcgttgtcttgtattcctgttgtctttcaacaatgtgccagaccctgtgctaggcgcctgttctttcacctgtccttttcacctcttttcgggctcctcctgtgtagaacattcctgccttcaacaggtcgtctttattactctctcctttcactataaattactactgcagctctgaaaactactcattagacaaatgtaaagcaaaattctgtggctgtgggatgttgttaggaggactgaaacgtcttgtgcagtgtttgtcgttttatttagttggaaggactaggattagtcgcagtatccccaggcacattgtggatactaaggattagaaatcggataagcgaaagacgtatgcctacaagaacagtcagagggcacaagttcctttttatgtcctcgggtctctattttcatatcttttagaactttttttatccgaatgaaaagtgaatttcaacaagcattttaagcttagccagatcttttatttaagtgggataatgataaatactggcctttgggtttaaatgattttattaatggtggtacatatgaattagacttatcatttatttaggcttggcaagaaagaagtcgtcctgctttgttctgtacttaaactttaacattactgttttgctaggggctggcaaggtttaattgcttatggatgtcattcacttgtggtagtgattgattccattactgcccaaactcttcaagttttagaaaagcataaagctgatgttgtaaaggtaagtaaaatcccactttgacgctaacatgttgtctagtctaaagtttaatactgtgtatcactaagctctcattaagtcttacgtgtaagtgttgaatagcttttaaatataacaacctatttggggtagcctagaattttcatatatatgacttaatgtcaatacagggtgagttattaaatgctagttgttagatcattttaaggcagatgaaagttctaccatttacaagaccactcagtcattccttagttttgagcacttaccatatgctatggatatggagatgaaagccctcagataattctccatcttataaggaagactcacagcgtgatagtgtgataagtgagacttgcgtaacacgctgtgagaaaacagaggagctgcatattgcctggttgtgaggagagtcacagaagtctacagtttcaagactagtagacagtagttagccaagtaaaaaattgacaaggagcattgcagggaaaagcaagaatatacacagaagtaagtagcgtgccataaagatggctaaagatgggacacttgtaggagtgatgaaataagaggcagccagagagattcagctgtctgtcctgaagttttgtaagattacgaaggagtttggattttttttttttttagacagaatctcactctgtcgcccaggctggagtgcagtggcatgatctcggctcactgtaagctccacatcctgggttcacgccattctcctgcctcagcctcctgagtagctgggactacaggcacccaccaccatgcccagctaattttttgtatttttagtagagaccgggtttcaccatgttagccaggatggtctcgagctcctgacctcgtgatccacccgccttggcctcccaaagtgctgggattacaggtgtgagtcaccgcgcccagcaggaatttggatttttgagtaggagattgatgtgaccatattcgcgtcttagaaaaactctggcagcagtggaggatctgctgaagaaatgcaagactggaggcagtaagatcatttaggagatttctgcagtaattttggtgggaaattctaagggcctaaaataaagctggggcatggagaagtcatgtttaagagcagcaaagaggtaaacctgatagcctttatagtgatcagtataaaggagagtaagagaatagagtgactccaaggtttcttttggtgtaattgaatgacagtgtttccagttatcagaggtaagcatctgtgaagtcagtgaatttttaagttttcaacatgcaaaatctgagatgcctgtaatatattgcattatagtgatccgggctttaggagataggtcaggattagagatagagatttggagtctttttcttttttaaataatagctttattgagatactcataccataaaatgtactgacttaaaatgcacaattctgtggcttttagtatatccacagttaatgcagccacaattacaatgaacttttttacctcaaaaagaaaccctatatccactagcagtcatattccatttcccccatttccctcatcctttggcaaccactgacctactttctgtgtctgtagactggcccattctggggattttatataaattgaatcatataatttgtggtcttttgtgcatgacttctttcacttaggataatgttttcatggttcatctgcgttgtagcatatatcaatactctgttactgatgaataatattccactgtaaggatgtatcacatttattttattgatggacatttggatattttgtactttttgcctgttacgaataatgctgctttgcacattcatgtgcaagttttgtgtgaacctgtgttttcatttcccttgagtatgtttctaggggtggaattactgactcatatggtaactctgtttaactttttgaggaactgctggactgttttccaaattaacattctcattagtagtgtatgaggagtctaatttgtccaaatcctcaccaacgcttgctgttctctgttcttttgattataaccatcctaatgggtatgaattgattctcattgtggctttggtttgcatttccctgatggctaaaggtgtggagtatcttttcatgtgcttattggccatttgtatatcttctttggagaaatgtctatgcaggtcctttgcccattttaaaattgtattatttatctttttataattgagtcgtaagatttctttgtatacagtagtcctcccttatccagaagggaaatgttccaagaccccagtggaagcctgaaaccctggatagtactgaaccctatatatattgtgctttttctcatacatacttacttatgataaagtttataaaccaaaccctgtatatactgttttgtctcatacatacttacctatgatcaagtttataaattaggcataataagagattaacaacaataactaataataataaaggagaacaattataacaatacatcagcattactactcttgcactttgggggcattataaagtaaaataagggttacttgaacatagcactgagatatcacaacagttgatctgataatcagtatggctactgagggcaggtggtgtatacagcatggatgttctggacaaagggatgatttatgattaaggcaggatggaacaggacagtgggagatttcatcatgctattcagaaaagcgcataatttatgaattgtttatttttagacttttttgtgtcatatgtttggattgatacatgatttgcaaatattttctctcaatttgtgggttgtctttttactttcttggtggtgtcttttgaagaacaaaactttttcattttgatgtagtccaatttattattttgtattgttgttgcttgtactttttgtgccatatccaagaaaccattgctttctccaatatcaagaagatatatacctttgtttttttcttagaattttagagctttagcttttaatccattttgagttaatttttatatatgatgtgaaatagggaaaaatactattaatttttgtttattgatcatatcctgtaatctagctaacttcacttagtagatctatttaatagtaattttgggtaaattttttttaagtagacagtcatgtcactgcaagtgactgcagtttaatgttttcattgataatctgtgtgtcttctatttttcttgccatgttgcattggctaggacctctactacaatgaatgggagagtagtgagaggatactcttgtcctgttcctgagcttagggggaaagtattcagtctttcatcaagtctgatgtaaggtatagggtgttttgggaaaaatatatttaccttctctttccctctctgtttcctttcccctacactgccccttggcatttctggagcttttatttctttatgtaggtccaagtttcagtctggtattatattcccatcgactgaagaatttactgtaagttcttaaagtgcctgtctaatattggttgattctcttagcttttatttctctgagaaagtatttcacctttgttttcgaaagataattttcaaaggatatagaattctgggtttataatttttttttctagtagtactttacaaatatcattccattggccaggcatggtggctcacacctgtaatcccaacactctgggaggccgaggtggatggatcacctggggtcaggagtttgagactagcctggccaacaaggcaaaacctcatctctactaaaaatacaaaaattagccaggcgtggtggtacacacctgtaatcccagctacttgggaggctgaggcaggagaacagcttaaacctgggaggtggaggttgcagtgagctgagatagtgccactgcactccagcctcggcaacagaataagactctgtctccaaaaaaaaaaaaaaaaaaaaatccctccactatcttcaagcttacatagtttctgatgaaaaatttttgtttttgtttctctgcattatatcttttttcctccgattatcttcaagatttccttaaccttggttttcaatagtttgattattaaaatatatatatatatggcttggagtttacctaaatggaattcaacatatacatatacaaatatatacacatatacaaacatatatatacacatagagacagtcaattcttgttatttgtggtagctatattctgtaaagttgttgtatacactgaattagtgaatactgaaactttgtttgctcctaggggttaggttcttgtgaggctctggtcacaacattttcatcaactgatcaatagataaccttgctttatatgtgtttccgtttaaagacatattaatatgtcagttgatctattaacattgaactcatagccaacaacacatgcctgagcaaagattatcacatatatatatatgtatgtattttttgcaagacacatcacaacttctcatacttagaaacggtaggcagtatgcttggggacctatttaaacagtgaagtcaccagcaaaaggaacaaaaatgtgaaaaatgtggtactaaataaatcatgagatgaacacttgttttgccattggaaaagctaaagcaagaattcttgtttgacttcagctgggaacacacatgtatgttcggtgacatttttttcaccattctgcacttgtccacaaaagcactgcaagtattgattttgaggttgcaaattatagtgagtaggtaaattgacaaatacagaatctataaataactagaatggactgtgtacacatatatacactatacatattctattcatacacattctatacctatgaacttaaacatatacacatacaaatatgcatacacacatacatatgcatatatacacatacctcatttaaaaatttttgcctgagcaaaagatctattacaggaaaaccttaaggcctgttcacgctcattttcagaaaacgttgtttccatctttttcatgaatactactgcaattggttggcttactttcctaccttagcattatatatgagtgtatttatatctgtacacatatataggtatatacatttatatgtatttatagatttgtggtatttaaatctacttattaaacagaccttggacactgtactaagtctgagaatagaaatgcaaacaaagaccacatggtgtgccctatggaacttacagttgatggactcatgaataggcaaaaagaatgtaaataaaataagtacaaattgtgtagtagtaaatgctttgaagaaaataagcaggatactgagaagagaggggtggtagtgaccagggaaggcctgactcctagtgaggactatgaaatttttcccttattctgtcagtattcattgttcaagaatttaatcagatttgccctggagttcatgtgttttttattttaaaaattctattgttaatcatgttgctataggcatgaagcatttttttttttttagagaaaaacttaatgttttgtgaaagagagagacagctagagttttttgtttgactttgccttctcctgactttccctctgcaaggtttttgtgtttctaagttgtcttcttttagttaggagactagaatacagaaaaacattctgctaaatatgattttaggtattttgtcataaattagatcttaggaaaactgattttcaaggcatcctggggttttaacctaaatttcccaaaatattaaggctgtgaatcatttttcatcacaggatctttgtgatgtgtcaaagaaaacaattttgtaactgcagttaaagatatctaccaaagtaacacaaatgctgccttcaaaatgaaaaccagttttctgtttattcttgctaaatgtttatgtaatataaatgtagtatgggttctggttgatgttttgtgaaaattatgttctgtttcatccagcgcaagtatttacttgatctgatttcttcttgatacaggttaaatgggccagggaaaactatcaccataacattggctcaccatattgcttacggttagcttctgctgatgtcaatgggaagatcatcgtctgggatgtagcagcaggagtagctcagtgtgagatccaagagcatgccaagcctatccagggtgaggaaagtctgctcagctaagtgtgtatattgatacacttactcttggagtggttttttggttttgggggttttcccccattcatttaattttatcaattccaagttagctcttgattgtgttttgcctattctgctgatctaaatctggctttctgtccttactaatacacttctaggcatatttcttcaaatctcaactgatttgtgctttggtaaaactcattaattgcaatatcagcctcattcaagcatgataagaaaaagtaagtggtacaatcttgtaatctaagctacaatataaggaaaattggccactgctgttaggaactagccatcagtgcttactctacattaagtaatttgttcattatcagagatgaacaaaattttattctcattttcatatagattgcttgtttgttcgtttcatgttactgacctaaaaccagtacggtattctttttttttttctttttttttttttgagatggagtgtcgctctgttgcccaggctggagtacagtggcgctatctcggctcactgcaaactctgcctcctgggttcacgccattctcctgcctcagcctcccgagtagctgggaccacaggcacacaccaccacacccagctaattttttgtatttttagtagagacggggttttaccatgttagccaggatggtctcgatctcctgacttcgtgatccacctgcctcgtcctcccaaagtgctgggattacaggcgtgaaccactgcgccctgcccagtacagtattctttagacttaagtcctccagtggctctcttgactgaatgaattttttaaatgactatttaaaaaatatttattaaatacttactgtgtactaggtactgaactagatctttgcatattctgtttattttttgaaaaaccatgaagaactgtaaagttccattaagtaattccacagaaacattaggaaagtctgacatcttggttgtggctaagagagtttcatattgattttatagttttaagtaatgattagggcaaattgccttttattttctttgaagtaatatttcagattacttcaaaatttttaccttgagagtttaaccagacaacttatttttatatagaattagttttttctctggaatattgatacacacacacacacacacacacacgtcacatttggggctggtggttaagtttttaaagattatattttaaaaactaaatatcaaggacaagttagccaaggactttggagagtgtggtttctgaattttgcctttctttatcgggtctttccagatgttcagtggttgtggaatcaagatgcttcccgcgatttactgcttgctatccacccgccaaattacattgtgctctggaatgccgacactggcaccaaactatggaagaagagctatgcagataacattctttctttttcttttgacccttttgatccctcacatttaacttgtgagtaacagttgcttgtggaaaatgagttaagtgagatatttataatatagtaatgctatgtgcatgagatatacacacacattatacatctataatgttaaaatgactgagcgaagtggagaagcatgtctagtccatatatctgcagctcctaatacacatactcaatcataagttcatatcattgcaaatatgataaaaaattaaatcagcaagctacaccttcactgtgttgaatttgtgaatagtattagactagccagggacagagagttactttgacactccagacttaattagttcttctaagaacatttaaataacttgaatcaagggtttcattcagtctgtggccaagttaagttcttgctttttaataaattgtcctaattcacgccattcattttgagtgccataaacagatgcatgtaaagaagaaataagcctaagcaagttttttcttgcagagatagtttttgctaatatgcttttaatgttttcctgagctaatgatctaaaaatgagatgtgctttaggtatttttgtggctaaattgtttagaaactatttaatcatccaacagatatttcttgagctattgctactcttctgggaaccaagatgtctcagaacccaaaaggcaggagccttcacagagtttgcattctagtgagaagaagtcatatcataaactgtgaccacaatgaattaataaattctagtgtagtaagaggtgacaggtgatataaaggcaggataaaggggatgcagaagaatgggggatgagggcatgcaagttgtatgagataaagtggtcaaagtaggcttcactttgataatgatcagaaatgtgaaggaggtaagggaattagctatggtaaggaatgtttttcctggatttgaatgactcaaaattgttttacccatcaacttttattgaggggtgtgtgtgtgtctgcacgtgttaaaggaggaagagaaaggcagacaaaattgaaattataataacatgggaaatgtggctgtgtaaatacactacagggtgcttaggcttttatgtatgtaaatgtttgtatatggacgtgtgcatacatacactcacttggtcaccagtttacttactcacataggtgcagtgctggggaaacacctaggagggctggcccagttggcagagtcagggaaggagggcatcacaaaagaaggaagcaaaggggaccttgaaggatgagttctggaacctgaaaaggcaacaaggctttcagctaacttgattgcatcagctctttacatctctgtaatttggttgatgaaagcattgtgtgttccagagtgtcagttgacctaacatctttgatttactcatattgaatgtgctagggttgtcataactcttgaatgcatcctttttccctgtgtttagagcagccttgctaagggctgggacccagggtagtaaggtttttctgctcatgtcttccagtattaggcccattgttgagggagattattttttcagtcataaaaaggcataatttgtattgctaaatatggtgctccctccttgactatttttgtttcatgtacacttagtaagtcactgtgggcccactactgttttctaaatattaagggaaaagaatattccttaatcatcttaaggttcgatctgatgcttgagaagaaaaagggaatatatttagactgagtagctcaggataaaaatttggtatcatcaaataaaatatatgaacttagctaattgtgatatgcagagcctcttaagtatggttttttgtttttttaagttatgggatatgttaaagtttttttgtttgtttgttttttgtttttgtttttgttttttttttttgagatggaatcttgctctgtcacccgggttggagtgcagtggcactatctcggctcactgcaacctccacctcccagttcaagcgattctcctgcctcactctcctgagttgctgggattacaggtgtgtgccaccacgcctggctaatttttgtatttttggtagagacggggtttcaccatgttgatcaggctggtctcgaactcctgacttcatgatctgcctgcctctgcctcccaaagtgctgggataataaggaaagatttttaatgaaagtccgtgccctgaatttatttagaagaacaaacacttgttctttctgccaataaccttatgttatctttttaatataagacataatatagaatgccaagcttggaggcctctgatgaattgtaatggaccacctgtttctcttcaacttagagaacattcccattatgttatgaatgcataacattgccagttatatattattaaaattatcactatattgctctcaaaattgtattggaataaaactgtatgctaaacttcattaaactttaatcagagttttgcttttctcaatatagtgcttaccagcgagggtattgttttcatctcagacttctccccatccaagcctccctcaggccctgggaaaaaagtttacatatccagcccacactctagcccagctcataacaagctggccacagccacaggtgccaagaaagctctaaataaagtaaaaattttaatcactcaa

SEQ ID NO: 14875 - DNA, 558 bp, Homo sapiens
agcgcccaggtcctgggctggccgccgggatgttgccctacacagtgaacttcaaggtgtcggcgcgcaccctcacgggggccctcaacgcccacaacaaggcggcggtggactgcttctgctgatgtcaatgggaagatcatcgtctgggatgtagcagcaggagtagctcagtgtgagatccaagagcatgccaagcctatccaggatgttcagtggttgtggaatcaagatgcttcccgcgatttactgcttgctatccacccgccaaattacattgtgctctggaatgccgacactggcaccaaactatggaagaagagctatgcagataacattctttctttttcttttgacccttttgatccctcacatttaactttgcttaccagcgagggtattgttttcatctcagacttctccccatccaagcctccctcaggccctgggaaaaaagtttacatatccagcccacactctagcccagctcataacaagctggccacagccacaggtgccaagaaagctctaaataaagtaaaaattttaatcactcaa

SEQ ID NO: 14876 - DNA, 11506 bp, Homo sapiens
ctgggctggccgccgggatgttgccctacacagtgaacttcaaggtgtcggcgcgcaccctcacgggggccctcaacgcccacaacaaggcggcggtggactggtgaggacgccgagcttccaggtcgccaggatcggccaggaatgtgtgagggggaagggggaaggacaagaggtttcaccccctggttagtttggcctcgctaaggcagggagccgccctcacgcaatgagcttgctttcagttggtggatttttgttgttacaaaagtgataatagccccgtgtgggaaattcccccatgcaaatacatttcccctctttctcgcgtatttctctgctgttttctctgcacctcgcccttttgccgttccattcctctctcttttcctctcctccagcttccaggcttctctctctccaccattaattccctgtgcactttctctttcccatcctgtcttttctttttcgttgtcttgtattcctgttgtctttcaacaatgtgccagaccctgtgctaggcgcctgttctttcacctgtccttttcacctcttttcgggctcctcctgtgtagaacattcctgccttcaacaggtcgtctttattactctctcctttcactataaattactactgcagctctgaaaactactcattagacaaatgtaaagcaaaattctgtggctgtgggatgttgttaggaggactgaaacgtcttgtgcagtgtttgtcgttttatttagttggaaggactaggattagtcgcagtatccccaggcacattgtggatactaaggattagaaatcggataagcgaaagacgtatgcctacaagaacagtcagagggcacaagttcctttttatgtcctcgggtctctattttcatatcttttagaactttttttatccgaatgaaaagtgaatttcaacaagcattttaagcttagccagatcttttatttaagtgggataatgataaatactggcctttgggtttaaatgattttattaatggtggtacatatgaattagacttatcatttatttaggcttggcaagaaagaagtcgtcctgctttgttctgtacttaaactttaacattactgttttgctaggggctggcaaggtttaattgcttatggatgtcattcacttgtggtagtgattgattccattactgcccaaactcttcaagttttagaaaagcataaagctgatgttgtaaaggtaagtaaaatcccactttgacgctaacatgttgtctagtctaaagtttaatactgtgtatcactaagctctcattaagtcttacgtgtaagtgttgaatagcttttaaatataacaacctatttggggtagcctagaattttcatatatatgacttaatgtcaatacagggtgagttattaaatgctagttgttagatcattttaaggcagatgaaagttctaccatttacaagaccactcagtcattccttagttttgagcacttaccatatgctatggatatggagatgaaagccctcagataattctccatcttataaggaagactcacagcgtgatagtgtgataagtgagacttgcgtaacacgctgtgagaaaacagaggagctgcatattgcctggttgtgaggagagtcacagaagtctacagtttcaagactagtagacagtagttagccaagtaaaaaattgacaaggagcattgcagggaaaagcaagaatatacacagaagtaagtagcgtgccataaagatggctaaagatgggacacttgtaggagtgatgaaataagaggcagccagagagattcagctgtctgtcctgaagttttgtaagattacgaaggagtttggattttttttttttttagacagaatctcactctgtcgcccaggctggagtgcagtggcatgatctcggctcactgtaagctccacatcctgggttcacgccattctcctgcctcagcctcctgagtagctgggactacaggcacccaccaccatgcccagctaattttttgtatttttagtagagaccgggtttcaccatgttagccaggatggtctcgagctcctgacctcgtgatccacccgccttggcctcccaaagtgctgggattacaggtgtgagtcaccgcgcccagcaggaatttggatttttgagtaggagattgatgtgaccatattcgcgtcttagaaaaactctggcagcagtggaggatctgctgaagaaatgcaagactggaggcagtaagatcatttaggagatttctgcagtaattttggtgggaaattctaagggcctaaaataaagctggggcatggagaagtcatgtttaagagcagcaaagaggtaaacctgatagcctttatagtgatcagtataaaggagagtaagagaatagagtgactccaaggtttcttttggtgtaattgaatgacagtgtttccagttatcagaggtaagcatctgtgaagtcagtgaatttttaagttttcaacatgcaaaatctgagatgcctgtaatatattgcattatagtgatccgggctttaggagataggtcaggattagagatagagatttggagtctttttcttttttaaataatagctttattgagatactcataccataaaatgtactgacttaaaatgcacaattctgtggcttttagtatatccacagttaatgcagccacaattacaatgaacttttttacctcaaaaagaaaccctatatccactagcagtcatattccatttcccccatttccctcatcctttggcaaccactgacctactttctgtgtctgtagactggcccattctggggattttatataaattgaatcatataatttgtggtcttttgtgcatgacttctttcacttaggataatgttttcatggttcatctgcgttgtagcatatatcaatactctgttactgatgaataatattccactgtaaggatgtatcacatttattttattgatggacatttggatattttgtactttttgcctgttacgaataatgctgctttgcacattcatgtgcaagttttgtgtgaacctgtgttttcatttcccttgagtatgtttctaggggtggaattactgactcatatggtaactctgtttaactttttgaggaactgctggactgttttccaaattaacattctcattagtagtgtatgaggagtctaatttgtccaaatcctcaccaacgcttgctgttctctgttcttttgattataaccatcctaatgggtatgaattgattctcattgtggctttggtttgcatttccctgatggctaaaggtgtggagtatcttttcatgtgcttattggccatttgtatatcttctttggagaaatgtctatgcaggtcctttgcccattttaaaattgtattatttatctttttataattgagtcgtaagatttctttgtatacagtagtcctcccttatccagaagggaaatgttccaagaccccagtggaagcctgaaaccctggatagtactgaaccctatatatattgtgctttttctcatacatacttacttatgataaagtttataaaccaaaccctgtatatactgttttgtctcatacatacttacctatgatcaagtttataaattaggcataataagagattaacaacaataactaataataataaaggagaacaattataacaatacatcagcattactactcttgcactttgggggcattataaagtaaaataagggttacttgaacatagcactgagatatcacaacagttgatctgataatcagtatggctactgagggcaggtggtgtatacagcatggatgttctggacaaagggatgatttatgattaaggcaggatggaacaggacagtgggagatttcatcatgctattcagaaaagcgcataatttatgaattgtttatttttagacttttttgtgtcatatgtttggattgatacatgatttgcaaatattttctctcaatttgtgggttgtctttttactttcttggtggtgtcttttgaagaacaaaactttttcattttgatgtagtccaatttattattttgtattgttgttgcttgtactttttgtgccatatccaagaaaccattgctttctccaatatcaagaagatatatacctttgtttttttcttagaattttagagctttagcttttaatccattttgagttaatttttatatatgatgtgaaatagggaaaaatactattaatttttgtttattgatcatatcctgtaatctagctaacttcacttagtagatctatttaatagtaattttgggtaaattttttttaagtagacagtcatgtcactgcaagtgactgcagtttaatgttttcattgataatctgtgtgtcttctatttttcttgccatgttgcattggctaggacctctactacaatgaatgggagagtagtgagaggatactcttgtcctgttcctgagcttagggggaaagtattcagtctttcatcaagtctgatgtaaggtatagggtgttttgggaaaaatatatttaccttctctttccctctctgtttcctttcccctacactgccccttggcatttctggagcttttatttctttatgtaggtccaagtttcagtctggtattatattcccatcgactgaagaatttactgtaagttcttaaagtgcctgtctaatattggttgattctcttagcttttatttctctgagaaagtatttcacctttgttttcgaaagataattttcaaaggatatagaattctgggtttataatttttttttctagtagtactttacaaatatcattccattggccaggcatggtggctcacacctgtaatcccaacactctgggaggccgaggtggatggatcacctggggtcaggagtttgagactagcctggccaacaaggcaaaacctcatctctactaaaaatacaaaaattagccaggcgtggtggtacacacctgtaatcccagctacttgggaggctgaggcaggagaacagcttaaacctgggaggtggaggttgcagtgagctgagatagtgccactgcactccagcctcggcaacagaataagactctgtctccaaaaaaaaaaaaaaaaaaaaatccctccactatcttcaagcttacatagtttctgatgaaaaatttttgtttttgtttctctgcattatatcttttttcctccgattatcttcaagatttccttaaccttggttttcaatagtttgattattaaaatatatatatatatggcttggagtttacctaaatggaattcaacatatacatatacaaatatatacacatatacaaacatatatatacacatagagacagtcaattcttgttatttgtggtagctatattctgtaaagttgttgtatacactgaattagtgaatactgaaactttgtttgctcctaggggttaggttcttgtgaggctctggtcacaacattttcatcaactgatcaatagataaccttgctttatatgtgtttccgtttaaagacatattaatatgtcagttgatctattaacattgaactcatagccaacaacacatgcctgagcaaagattatcacatatatatatatgtatgtattttttgcaagacacatcacaacttctcatacttagaaacggtaggcagtatgcttggggacctatttaaacagtgaagtcaccagcaaaaggaacaaaaatgtgaaaaatgtggtactaaataaatcatgagatgaacacttgttttgccattggaaaagctaaagcaagaattcttgtttgacttcagctgggaacacacatgtatgttcggtgacatttttttcaccattctgcacttgtccacaaaagcactgcaagtattgattttgaggttgcaaattatagtgagtaggtaaattgacaaatacagaatctataaataactagaatggactgtgtacacatatatacactatacatattctattcatacacattctatacctatgaacttaaacatatacacatacaaatatgcatacacacatacatatgcatatatacacatacctcatttaaaaatttttgcctgagcaaaagatctattacaggaaaaccttaaggcctgttcacgctcattttcagaaaacgttgtttccatctttttcatgaatactactgcaattggttggcttactttcctaccttagcattatatatgagtgtatttatatctgtacacatatataggtatatacatttatatgtatttatagatttgtggtatttaaatctacttattaaacagaccttggacactgtactaagtctgagaatagaaatgcaaacaaagaccacatggtgtgccctatggaacttacagttgatggactcatgaataggcaaaaagaatgtaaataaaataagtacaaattgtgtagtagtaaatgctttgaagaaaataagcaggatactgagaagagaggggtggtagtgaccagggaaggcctgactcctagtgaggactatgaaatttttcccttattctgtcagtattcattgttcaagaatttaatcagatttgccctggagttcatgtgttttttattttaaaaattctattgttaatcatgttgctataggcatgaagcatttttttttttttagagaaaaacttaatgttttgtgaaagagagagacagctagagttttttgtttgactttgccttctcctgactttccctctgcaaggtttttgtgtttctaagttgtcttcttttagttaggagactagaatacagaaaaacattctgctaaatatgattttaggtattttgtcataaattagatcttaggaaaactgattttcaaggcatcctggggttttaacctaaatttcccaaaatattaaggctgtgaatcatttttcatcacaggatctttgtgatgtgtcaaagaaaacaattttgtaactgcagttaaagatatctaccaaagtaacacaaatgctgccttcaaaatgaaaaccagttttctgtttattcttgctaaatgtttatgtaatataaatgtagtatgggttctggttgatgttttgtgaaaattatgttctgtttcatccagcgcaagtatttacttgatctgatttcttcttgatacaggttaaatgggccagggaaaactatcaccataacattggctcaccatattgcttacggttagcttctgctgatgtcaatgggaagatcatcgtctgggatgtagcagcaggagtagctcagtgtgagatccaagagcatgccaagcctatccagggtgaggaaagtctgctcagctaagtgtgtatattgatacacttactcttggagtggttttttggttttgggggttttcccccattcatttaattttatcaattccaagttagctcttgattgtgttttgcctattctgctgatctaaatctggctttctgtccttactaatacacttctaggcatatttcttcaaatctcaactgatttgtgctttggtaaaactcattaattgcaatatcagcctcattcaagcatgataagaaaaagtaagtggtacaatcttgtaatctaagctacaatataaggaaaattggccactgctgttaggaactagccatcagtgcttactctacattaagtaatttgttcattatcagagatgaacaaaattttattctcattttcatatagattgcttgtttgttcgtttcatgttactgacctaaaaccagtacggtattctttttttttttctttttttttttttgagatggagtgtcgctctgttgcccaggctggagtacagtggcgctatctcggctcactgcaaactctgcctcctgggttcacgccattctcctgcctcagcctcccgagtagctgggaccacaggcacacaccaccacacccagctaattttttgtatttttagtagagacggggttttaccatgttagccaggatggtctcgatctcctgacttcgtgatccacctgcctcgtcctcccaaagtgctgggattacaggcgtgaaccactgcgccctgcccagtacagtattctttagacttaagtcctccagtggctctcttgactgaatgaattttttaaatgactatttaaaaaatatttattaaatacttactgtgtactaggtactgaactagatctttgcatattctgtttattttttgaaaaaccatgaagaactgtaaagttccattaagtaattccacagaaacattaggaaagtctgacatcttggttgtggctaagagagtttcatattgattttatagttttaagtaatgattagggcaaattgccttttattttctttgaagtaatatttcagattacttcaaaatttttaccttgagagtttaaccagacaacttatttttatatagaattagttttttctctggaatattgatacacacacacacacacacacacacgtcacatttggggctggtggttaagtttttaaagattatattttaaaaactaaatatcaaggacaagttagccaaggactttggagagtgtggtttctgaattttgcctttctttatcgggtctttccagatgttcagtggttgtggaatcaagatgcttcccgcgatttactgcttgctatccacccgccaaattacattgtgctctggaatgccgacactggcaccaaactatggaagaagagctatgcagataacattctttctttttcttttgacccttttgatccctcacatttaacttgtgagtaacagttgcttgtggaaaatgagttaagtgagatatttataatatagtaatgctatgtgcatgagatatacacacacattatacatctataatgttaaaatgactgagcgaagtggagaagcatgtctagtccatatatctgcagctcctaatacacatactcaatcataagttcatatcattgcaaatatgataaaaaattaaatcagcaagctacaccttcactgtgttgaatttgtgaatagtattagactagccagggacagagagttactttgacactccagacttaattagttcttctaagaacatttaaataacttgaatcaagggtttcattcagtctgtggccaagttaagttcttgctttttaataaattgtcctaattcacgccattcattttgagtgccataaacagatgcatgtaaagaagaaataagcctaagcaagttttttcttgcagagatagtttttgctaatatgcttttaatgttttcctgagctaatgatctaaaaatgagatgtgctttaggtatttttgtggctaaattgtttagaaactatttaatcatccaacagatatttcttgagctattgctactcttctgggaaccaagatgtctcagaacccaaaaggcaggagccttcacagagtttgcattctagtgagaagaagtcatatcataaactgtgaccacaatgaattaataaattctagtgtagtaagaggtgacaggtgatataaaggcaggataaaggggatgcagaagaatgggggatgagggcatgcaagttgtatgagataaagtggtcaaagtaggcttcactttgataatgatcagaaatgtgaaggaggtaagggaattagctatggtaaggaatgtttttcctggatttgaatgactcaaaattgttttacccatcaacttttattgaggggtgtgtgtgtgtctgcacgtgttaaaggaggaagagaaaggcagacaaaattgaaattataataacatgggaaatgtggctgtgtaaatacactacagggtgcttaggcttttatgtatgtaaatgtttgtatatggacgtgtgcatacatacactcacttggtcaccagtttacttactcacataggtgcagtgctggggaaacacctaggagggctggcccagttggcagagtcagggaaggagggcatcacaaaagaaggaagcaaaggggaccttgaaggatgagttctggaacctgaaaaggcaacaaggctttcagctaacttgattgcatcagctctttacatctctgtaatttggttgatgaaagcattgtgtgttccagagtgtcagttgacctaacatctttgatttactcatattgaatgtgctagggttgtcataactcttgaatgcatcctttttccctgtgtttagagcagccttgctaagggctgggacccagggtagtaaggtttttctgctcatgtcttccagtattaggcccattgttgagggagattattttttcagtcataaaaaggcataatttgtattgctaaatatggtgctccctccttgactatttttgtttcatgtacacttagtaagtcactgtgggcccactactgttttctaaatattaagggaaaagaatattccttaatcatcttaaggttcgatctgatgcttgagaagaaaaagggaatatatttagactgagtagctcaggataaaaatttggtatcatcaaataaaatatatgaacttagctaattgtgatatgcagagcctcttaagtatggttttttgtttttttaagttatgggatatgttaaagtttttttgtttgtttgttttttgtttttgtttttgttttttttttttgagatggaatcttgctctgtcacccgggttggagtgcagtggcactatctcggctcactgcaacctccacctcccagttcaagcgattctcctgcctcactctcctgagttgctgggattacaggtgtgtgccaccacgcctggctaatttttgtatttttggtagagacggggtttcaccatgttgatcaggctggtctcgaactcctgacttcatgatctgcctgcctctgcctcccaaagtgctgggataataaggaaagatttttaatgaaagtccgtgccctgaatttatttagaagaacaaacacttgttctttctgccaataaccttatgttatctttttaatataagacataatatagaatgccaagcttggaggcctctgatgaattgtaatggaccacctgtttctcttcaacttagagaacattcccattatgttatgaatgcataacattgccagttatatattattaaaattatcactatattgctctcaaaattgtattggaataaaactgtatgctaaacttcattaaactttaatcagagttttgcttttctcaatatagtgcttaccagcgagggtattgttttcatctcagacttctccccatccaagcctccctcaggccctgggaaaaaagtttacatatccagcccacactctagcccagctcataacaagctggccacagccacaggtgccaagaaagctctaaataaagtaaaaattttaatcactca

SEQ ID NO: 14877 - DNA, 565 bp, Homo sapiens
ctgggctggccgccgggatgttgccctacacagtgaacttcaaggtgtcggcgcgcaccctcacgggggccctcaacgcccacaacaaggcggcggtggactggtgaggacgccgagcttccaggggctggcaaggtttaattgcttatggatgtcattcacttgtggtagtgattgattccattactgcccaaactcttcaagttttagaaaagcataaagctgatgttgtaaaggttaaatgggccagggaaaactatcaccataacattggctcaccatattgcttacggttagcttctgctgatgtcaatgggaagatcatcgtctgggatgtagcagcaggagtagctcagtgtgagatccaagagcatgccaagcctatccaggtgcttaccagcgagggtattgttttcatctcagacttctccccatccaagcctccctcaggccctgggaaaaaagtttacatatccagcccacactctagcccagctcataacaagctggccacagccacaggtgccaagaaagctctaaataaagtaaaaattttaatcactca

SEQ ID NO: 14878 - DNA, 8966 bp, Homo sapiens
agaggaacctgacagcggcgccgagggggccacccggactctgtttggaacggaagcacagtgtccgccgcttcctggttgcgggtcagcgcccaggtcctgggctggccgccgggatgttgccctacacagtgaacttcaaggtgtcggcgcgcaccctcacgggggccctcaacgcccacaacaaggcggcggtggactggtgaggacgccgagcttccaggtcgccaggatcggccaggaatgtgtgagggggaagggggaaggacaagaggtttcaccccctggttagtttggcctcgctaaggcagggagccgccctcacgcaatgagcttgctttcagttggtggatttttgttgttacaaaagtgataatagccccgtgtgggaaattcccccatgcaaatacatttcccctctttctcgcgtatttctctgctgttttctctgcacctcgcccttttgccgttccattcctctctcttttcctctcctccagcttccaggcttctctctctccaccattaattccctgtgcactttctctttcccatcctgtcttttctttttcgttgtcttgtattcctgttgtctttcaacaatgtgccagaccctgtgctaggcgcctgttctttcacctgtccttttcacctcttttcgggctcctcctgtgtagaacattcctgccttcaacaggtcgtctttattactctctcctttcactataaattactactgcagctctgaaaactactcattagacaaatgtaaagcaaaattctgtggctgtgggatgttgttaggaggactgaaacgtcttgtgcagtgtttgtcgttttatttagttggaaggactaggattagtcgcagtatccccaggcacattgtggatactaaggattagaaatcggataagcgaaagacgtatgcctacaagaacagtcagagggcacaagttcctttttatgtcctcgggtctctattttcatatcttttagaactttttttatccgaatgaaaagtgaatttcaacaagcattttaagcttagccagatcttttatttaagtgggataatgataaatactggcctttgggtttaaatgattttattaatggtggtacatatgaattagacttatcatttatttaggcttggcaagaaagaagtcgtcctgctttgttctgtacttaaactttaacattactgttttgctaggggctggcaaggtttaattgcttatggatgtcattcacttgtggtagtgattgattccattactgcccaaactcttcaagttttagaaaagcataaagctgatgttgtaaaggtaagtaaaatcccactttgacgctaacatgttgtctagtctaaagtttaatactgtgtatcactaagctctcattaagtcttacgtgtaagtgttgaatagcttttaaatataacaacctatttggggtagcctagaattttcatatatatgacttaatgtcaatacagggtgagttattaaatgctagttgttagatcattttaaggcagatgaaagttctaccatttacaagaccactcagtcattccttagttttgagcacttaccatatgctatggatatggagatgaaagccctcagataattctccatcttataaggaagactcacagcgtgatagtgtgataagtgagacttgcgtaacacgctgtgagaaaacagaggagctgcatattgcctggttgtgaggagagtcacagaagtctacagtttcaagactagtagacagtagttagccaagtaaaaaattgacaaggagcattgcagggaaaagcaagaatatacacagaagtaagtagcgtgccataaagatggctaaagatgggacacttgtaggagtgatgaaataagaggcagccagagagattcagctgtctgtcctgaagttttgtaagattacgaaggagtttggattttttttttttttagacagaatctcactctgtcgcccaggctggagtgcagtggcatgatctcggctcactgtaagctccacatcctgggttcacgccattctcctgcctcagcctcctgagtagctgggactacaggcacccaccaccatgcccagctaattttttgtatttttagtagagaccgggtttcaccatgttagccaggatggtctcgagctcctgacctcgtgatccacccgccttggcctcccaaagtgctgggattacaggtgtgagtcaccgcgcccagcaggaatttggatttttgagtaggagattgatgtgaccatattcgcgtcttagaaaaactctggcagcagtggaggatctgctgaagaaatgcaagactggaggcagtaagatcatttaggagatttctgcagtaattttggtgggaaattctaagggcctaaaataaagctggggcatggagaagtcatgtttaagagcagcaaagaggtaaacctgatagcctttatagtgatcagtataaaggagagtaagagaatagagtgactccaaggtttcttttggtgtaattgaatgacagtgtttccagttatcagaggtaagcatctgtgaagtcagtgaatttttaagttttcaacatgcaaaatctgagatgcctgtaatatattgcattatagtgatccgggctttaggagataggtcaggattagagatagagatttggagtctttttcttttttaaataatagctttattgagatactcataccataaaatgtactgacttaaaatgcacaattctgtggcttttagtatatccacagttaatgcagccacaattacaatgaacttttttacctcaaaaagaaaccctatatccactagcagtcatattccatttcccccatttccctcatcctttggcaaccactgacctactttctgtgtctgtagactggcccattctggggattttatataaattgaatcatataatttgtggtcttttgtgcatgacttctttcacttaggataatgttttcatggttcatctgcgttgtagcatatatcaatactctgttactgatgaataatattccactgtaaggatgtatcacatttattttattgatggacatttggatattttgtactttttgcctgttacgaataatgctgctttgcacattcatgtgcaagttttgtgtgaacctgtgttttcatttcccttgagtatgtttctaggggtggaattactgactcatatggtaactctgtttaactttttgaggaactgctggactgttttccaaattaacattctcattagtagtgtatgaggagtctaatttgtccaaatcctcaccaacgcttgctgttctctgttcttttgattataaccatcctaatgggtatgaattgattctcattgtggctttggtttgcatttccctgatggctaaaggtgtggagtatcttttcatgtgcttattggccatttgtatatcttctttggagaaatgtctatgcaggtcctttgcccattttaaaattgtattatttatctttttataattgagtcgtaagatttctttgtatacagtagtcctcccttatccagaagggaaatgttccaagaccccagtggaagcctgaaaccctggatagtactgaaccctatatatattgtgctttttctcatacatacttacttatgataaagtttataaaccaaaccctgtatatactgttttgtctcatacatacttacctatgatcaagtttataaattaggcataataagagattaacaacaataactaataataataaaggagaacaattataacaatacatcagcattactactcttgcactttgggggcattataaagtaaaataagggttacttgaacatagcactgagatatcacaacagttgatctgataatcagtatggctactgagggcaggtggtgtatacagcatggatgttctggacaaagggatgatttatgattaaggcaggatggaacaggacagtgggagatttcatcatgctattcagaaaagcgcataatttatgaattgtttatttttagacttttttgtgtcatatgtttggattgatacatgatttgcaaatattttctctcaatttgtgggttgtctttttactttcttggtggtgtcttttgaagaacaaaactttttcattttgatgtagtccaatttattattttgtattgttgttgcttgtactttttgtgccatatccaagaaaccattgctttctccaatatcaagaagatatatacctttgtttttttcttagaattttagagctttagcttttaatccattttgagttaatttttatatatgatgtgaaatagggaaaaatactattaatttttgtttattgatcatatcctgtaatctagctaacttcacttagtagatctatttaatagtaattttgggtaaattttttttaagtagacagtcatgtcactgcaagtgactgcagtttaatgttttcattgataatctgtgtgtcttctatttttcttgccatgttgcattggctaggacctctactacaatgaatgggagagtagtgagaggatactcttgtcctgttcctgagcttagggggaaagtattcagtctttcatcaagtctgatgtaaggtatagggtgttttgggaaaaatatatttaccttctctttccctctctgtttcctttcccctacactgccccttggcatttctggagcttttatttctttatgtaggtccaagtttcagtctggtattatattcccatcgactgaagaatttactgtaagttcttaaagtgcctgtctaatattggttgattctcttagcttttatttctctgagaaagtatttcacctttgttttcgaaagataattttcaaaggatatagaattctgggtttataatttttttttctagtagtactttacaaatatcattccattggccaggcatggtggctcacacctgtaatcccaacactctgggaggccgaggtggatggatcacctggggtcaggagtttgagactagcctggccaacaaggcaaaacctcatctctactaaaaatacaaaaattagccaggcgtggtggtacacacctgtaatcccagctacttgggaggctgaggcaggagaacagcttaaacctgggaggtggaggttgcagtgagctgagatagtgccactgcactccagcctcggcaacagaataagactctgtctccaaaaaaaaaaaaaaaaaaaaatccctccactatcttcaagcttacatagtttctgatgaaaaatttttgtttttgtttctctgcattatatcttttttcctccgattatcttcaagatttccttaaccttggttttcaatagtttgattattaaaatatatatatatatggcttggagtttacctaaatggaattcaacatatacatatacaaatatatacacatatacaaacatatatatacacatagagacagtcaattcttgttatttgtggtagctatattctgtaaagttgttgtatacactgaattagtgaatactgaaactttgtttgctcctaggggttaggttcttgtgaggctctggtcacaacattttcatcaactgatcaatagataaccttgctttatatgtgtttccgtttaaagacatattaatatgtcagttgatctattaacattgaactcatagccaacaacacatgcctgagcaaagattatcacatatatatatatgtatgtattttttgcaagacacatcacaacttctcatacttagaaacggtaggcagtatgcttggggacctatttaaacagtgaagtcaccagcaaaaggaacaaaaatgtgaaaaatgtggtactaaataaatcatgagatgaacacttgttttgccattggaaaagctaaagcaagaattcttgtttgacttcagctgggaacacacatgtatgttcggtgacatttttttcaccattctgcacttgtccacaaaagcactgcaagtattgattttgaggttgcaaattatagtgagtaggtaaattgacaaatacagaatctataaataactagaatggactgtgtacacatatatacactatacatattctattcatacacattctatacctatgaacttaaacatatacacatacaaatatgcatacacacatacatatgcatatatacacatacctcatttaaaaatttttgcctgagcaaaagatctattacaggaaaaccttaaggcctgttcacgctcattttcagaaaacgttgtttccatctttttcatgaatactactgcaattggttggcttactttcctaccttagcattatatatgagtgtatttatatctgtacacatatataggtatatacatttatatgtatttatagatttgtggtatttaaatctacttattaaacagaccttggacactgtactaagtctgagaatagaaatgcaaacaaagaccacatggtgtgccctatggaacttacagttgatggactcatgaataggcaaaaagaatgtaaataaaataagtacaaattgtgtagtagtaaatgctttgaagaaaataagcaggatactgagaagagaggggtggtagtgaccagggaaggcctgactcctagtgaggactatgaaatttttcccttattctgtcagtattcattgttcaagaatttaatcagatttgccctggagttcatgtgttttttattttaaaaattctattgttaatcatgttgctataggcatgaagcatttttttttttttagagaaaaacttaatgttttgtgaaagagagagacagctagagttttttgtttgactttgccttctcctgactttccctctgcaaggtttttgtgtttctaagttgtcttcttttagttaggagactagaatacagaaaaacattctgctaaatatgattttaggtattttgtcataaattagatcttaggaaaactgattttcaaggcatcctggggttttaacctaaatttcccaaaatattaaggctgtgaatcatttttcatcacaggatctttgtgatgtgtcaaagaaaacaattttgtaactgcagttaaagatatctaccaaagtaacacaaatgctgccttcaaaatgaaaaccagttttctgtttattcttgctaaatgtttatgtaatataaatgtagtatgggttctggttgatgttttgtgaaaattatgttctgtttcatccagcgcaagtatttacttgatctgatttcttcttgatacaggttaaatgggccagggaaaactatcaccataacattggctcaccatattgcttacggttagcttctgctgatgtcaatgggaagatcatcgtctgggatgtagcagcaggagtagctcagtgtgagatccaagagcatgccaagcctatccagggtgaggaaagtctgctcagctaagtgtgtatattgatacacttactcttggagtggttttttggttttgggggttttcccccattcatttaattttatcaattccaagttagctcttgattgtgttttgcctattctgctgatctaaatctggctttctgtccttactaatacacttctaggcatatttcttcaaatctcaactgatttgtgctttggtaaaactcattaattgcaatatcagcctcattcaagcatgataagaaaaagtaagtggtacaatcttgtaatctaagctacaatataaggaaaattggccactgctgttaggaactagccatcagtgcttactctacattaagtaatttgttcattatcagagatgaacaaaattttattctcattttcatatagattgcttgtttgttcgtttcatgttactgacctaaaaccagtacggtattctttttttttttctttttttttttttgagatggagtgtcgctctgttgcccaggctggagtacagtggcgctatctcggctcactgcaaactctgcctcctgggttcacgccattctcctgcctcagcctcccgagtagctgggaccacaggcacacaccaccacacccagctaattttttgtatttttagtagagacggggttttaccatgttagccaggatggtctcgatctcctgacttcgtgatccacctgcctcgtcctcccaaagtgctgggattacaggcgtgaaccactgcgccctgcccagtacagtattctttagacttaagtcctccagtggctctcttgactgaatgaattttttaaatgactatttaaaaaatatttattaaatacttactgtgtactaggtactgaactagatctttgcatattctgtttattttttgaaaaaccatgaagaactgtaaagttccattaagtaattccacagaaacattaggaaagtctgacatcttggttgtggctaagagagtttcatattgattttatagttttaagtaatgattagggcaaattgccttttattttctttgaagtaatatttcagattacttcaaaatttttaccttgagagtttaaccagacaacttatttttatatagaattagttttttctctggaatattgatacacacacacacacacacacacacgtcacatttggggctggtggttaagtttttaaagattatattttaaaaactaaatatcaaggacaagttagccaaggactttggagagtgtggtttctgaattttgcctttctttatcgggtctttccagatgttcagtggttgtggaatcaagatgcttcccgcgatttactgcttgctatccacccgccaaattacattgtgctctggaatgccgacactggcaccaaactatggaagaagagctatgcagataacattctttctttttcttttgacccttttgatccct

SEQ ID NO: 14879 - DNA, 651 bp, Homo sapiens
agaggaacctgacagcggcgccgagggggccacccggactctgtttggaacggaagcacagtgtccgccgcttcctggttgcgggtcagcgcccaggtcctgggctggccgccgggatgttgccctacacagtgaacttcaaggtgtcggcgcgcaccctcacgggggccctcaacgcccacaacaaggcggcggtggactggtgaggacgccgagcttccaggggctggcaaggtttaattgcttatggatgtcattcacttgtggtagtgattgattccattactgcccaaactcttcaagttttagaaaagcataaagctgatgttgtaaaggttaaatgggccagggaaaactatcaccataacattggctcaccatattgcttacggttagcttctgctgatgtcaatgggaagatcatcgtctgggatgtagcagcaggagtagctcagtgtgagatccaagagcatgccaagcctatccaggatgttcagtggttgtggaatcaagatgcttcccgcgatttactgcttgctatccacccgccaaattacattgtgctctggaatgccgacactggcaccaaactatggaagaagagctatgcagataacattctttctttttcttttgacccttttgatccct

SEQ ID NO: 14880 - DNA, 3338 bp, Homo sapiens
agatttgaatgcagagactctctctgctcttggcttgtgtttcctaagcggtgactacattgaatatactctcagttgttccagatttacctgttgctctctgctgactgctctgtaaatggtttatagctgaagcttcactgtagtataaaacttcattttatttttaaaaacctttctttgttgtctagagcctgtgtggtgcccctatctccttgttccaagggcctctcttgccttgaaagccttcttattacaccagccttggaatggacagtattctttggacatttctcatgtgtaagtttttcacttttctttttctttcataatttacttggggttgaaagacacccatgaaagtcagccatggcctgtactccagcatttaaagggaatggagcctttaaagccgagagaaggcagagacactacagaattgccaggctgcctctgggttctcgggcctttgtggaagtgtgggtcagtgaggagctgtgagggcgtgtattgctctcaggtggctgtgtgcttgtcttatggtctgaacatggatgtgtcgtgatgatgaaaaggatgcgtgtgaagagggcaatggaaggcaggagaatttggagccgggcacgttctttttaaaagcagcatcattagcttcagggatatactgtgtcttaaaaatctcaatatttgcctcattgcaaaaaaatattcacagaaactattagtgtttattaattaaattcacaaatattactgaactcctgccatgtgcagcacggatggaggatttaaaaataatgccaggaagtgtctgttctccaagcactgtctcctcagaatattcattctgcagagctctaaatgagcagattcctttagtaacattgttaagttcttcattaaaaggaatctaaacctgatagattttaaagcctgcttataaatttcctggtttcttgaaagccaaggagactttctttactcattttcttgtttttgactcaataagataaaagcagatattaaagttgattggtggggtcctgagtagattgttgttattttggtctataaccaggtttctaaccaagaactacgaagaaggttatctctatattaacacaacttttttcaggtgaagaaatacgtggttttaagtgaagagataatgaactcattcaaaattttttctttacagtgactatccagaaaatgaagaaataaagaatctcctccaagaacagttgaattcattgtctaagtaagcactccatgtttcattagaagataggaatatgagaaagaaaaatgcaattcaactttaaatgcaattcaaaattaaaataagttacgttttagaaaatattagtggcccaagaagagaccattctgtttagaggtttgcttcccgttagagtctgtgttttgcagaaaaagtacttattcagtagttacagtgacagagcatctgtcttcaccaagttcatgagcaccagctgctctgatctcacatcaaggcaggactagatgcatagtgggagcatccttgtagctcagcttgcctctactacaaacctccatgaagcctcacagcgggagacgaatcgcagggtgattctgggtctgcttcccgcttctaaaatgagttctctgtgtcaggtgctggtgtgcacaggtctggctaagaaattaatgtgctccctagagccaagggcatttaacagaatgtactgggaataagaaaggaaaaaatatgggtctacaaggagttcttggggaaagcgtaacacatttttgcaatctagaatctgttacatataattatagtatttaacaaattaagcatgatattttattgacggaaaattcaaaataattagttttttctatgcaaagattaacatttatgtttaaatgggaaactatagatttaaagaatgtcttcctttctgatttgtgaatattcagtattttactattttagaaatacgaacttataaaagcacaagccattcttccttagatactttatttttggaatagtttcagaataaattacgaatgtcatcttctttaaagtatttactgttcttgatgattttttcaacaatggcattcttgttccagtagttaggcagctaatactttcaaaaactgttgtaagcctataaaccagaaatgagagcgctgcagctccctgtggtggctgaaagctgctgcttctccaagccttgagaacactctcagcccccttcaacttttataatttcagggtcatggtaaagtaccttgtcttgtgtaaattctaaacatgttatttgactggaatttttcatttcaagagtatattgatcaacccccatgctttattgtttgattgaaaacttttgtctcacttttgtccggatttcttccacagtgacataaagaaactgttgcttgatccagaattcactctcttgcagaggtgcctgcttgtttcaaggtaatattgtttgatgtattctgtataagagacaggatttcaagttaactcatttcttttaagggtttttagttagaaacacttagattttagaaaaatgtatcagttcatcctttagatttaacttaaaataattttgacagtagtaataacaaatagggaaaaatcaaattgcattttaaatgtgagatctaggccttctctctggaaagcacttcctcctacagctttttaaaatatgtgttttaaaatatcagatacaggtatatttaaatataccaataaattatatttagaagcgataacctctatatcctgacttacagtagagtttgtcacttataaaaaagactcctctccccacagaataaatagcacattactttcataccttatctagccagttatcccagaggaacttcttcctaatgtgaatcaatggcccacattgaaaggtgtgctaatggcaaaccaggtaaataattgttcttaacacagaacagaaagatgctggagtctgaaggggtcctgtgcagtcaggcccccgtattgttgaaggcccagtagcagggcaggagaacttgctgcctccccctttcaccctgtcaggccccatgccagtatcccagtggatatgtgacaacactcccttccagtccctcagtctactctaggaagccatccaggccaggtgtgctgagtgcagtcaaaactttgcttcatccttgccaggctctatggtgatgaatcggagctgcacttctggactgtcgctgcccactacctgcacagcttatcccaggaaaagtcagccagcacaacagctcctaaagaagctgctcctcgagacaaa

SEQ ID NO: 14881 - DNA, 550 bp, Homo sapiens
agatttgaatgcagagactctctctgctcttggcttgtgtttcctaagcggtgactacattgaatatactctcagttgttccagatttacctgttgctctctgctgactgctctgtaaatggtttatagctgaagcttcactgtagtataaaacttcattttatttttaaaaacctttctttgttgtctagagcctgtgtggtgcccctatctccttgttccaagggcctctcttgccttgaaagccttcttattacaccagccttggaatggacagtattctttggacatttctcatgttgactatccagaaaatgaagaaataaagaatctcctccaagaacagttgaattcattgtctaatgacataaagaaactgttgcttgatccagaattcactctcttgcagaggtgcctgcttgtttcaaggctctatggtgatgaatcggagctgcacttctggactgtcgctgcccactacctgcacagcttatcccaggaaaagtcagccagcacaacagctcctaaagaagctgctcctcgagacaaa

SEQ ID NO: 14882 - DNA, 4959 bp, Homo sapiens
attctgtaaagcacgctggcagcacttgggcaaacacagacatcttctgtgtccgctgagctcttggtcgtaaatgaacttttgcaaggatattgactggtgtgttttgtcatgatgtgagtttggagaccatctgtgtgtttttactgagagaggagacagattaacaattggctgatgcacccatggagtattacgtagcatgcagaaacaggaggaagaggacttaaatacagtggaaagagtaagaaacaggatgaagtatatatatatatatacacacacacacacacacacacacatataaacacaatactatttaggtaaattagataataactacatgttaagaacttatacatatgcgaggatattggactaaaaggctttacaataggtggaatataaaagaatatataaataaaacaagtgattttggaggaatctatggatgataaaggaccctggttcgagaactgtgattgtcttatcgtgtgcacataagagatgggggaggagacgaggaataggcaatactatcattgaattcattattttcattttgtaagtattttataaaaacatcaaaaggtcagaccttttggaagtttgccataaaagctccaattaaaatgcattcatttagcctttctctaagtaggtaaaatctaaagaacaaatgtggattcatgtgtagtaataataaatgatactgggcagtggtgtgtgtgcccagctcttctggacgattctttgacagaaggaaacctagcacttctaggtttgtctgcatttgctttacaggagtggtcaccatctcacaacttgaagagcctgagaaagaagcaacttgcaactcgagaggccatggcccgccagaccgtagtctcagacacagagctgagtattgttgaatcatctgtgatcaggtacagtacagtgtttcttgacactgtcatttgtgccattagcatcatgtctgggaagttgacaagtatcatcggaaggtgtctatggtagcaagttggactctgcttttgaacatacttagtttcatctttcagtacatacccagattactaaaaagataattttatcatttttagtattgtactatactgtttgttataactaataacatatgcagtaatattcacccatcagcatctagtagtaaatgtgctcattccgagtgcccttctactccatacacttcagcttctgaaattcaaatgaacatagcatagacatacagatagatcatattatcatttatacacaccaaagaaaatgtgttgggaatcctaaatttgtgtatcatccccatccataccaatcttacagataaaaggcttcagagataatgttgggtcactgtacagcctcccttctgttgagcacagttctatagccaaaatctctatgaattttatttttcttgtgttaagtttagatcaccatttctctctgtgcagggtaaacttcctctgatgttgtggctgttaaggagtgattcatgtttacccataattagctgggcaaatattagtttcagacttttaaaaaaatagttttggacctcctcttaatgcgtctgtactttgggcaagttaattaattatgagtatcactctaggggaaaaaaaaacatctttatcatatgtttcactatcccaaagcttgctgcaggaggcagaaagtaaatctgaacttagtcagaacatctctgcccgggaacattttgtatttaccgatattgatggccaagtgtatcatctcactgttgaaggaaactcagtaaaagacagtgctcggattccaccagatgtgagtacaaccttgattaaatcttcatcaagaagattttgttttgttggttccatatccagtgaaggcatagttaagttggaaacttcagaaaagcctaatgtaaataaactttatttaaggagatattatcgattaaacttgttccatactgctagagaataacgctgtaactattttgattaaatgtttactgtgtgctactcatttttatccctgtaataatccatgaggagttatctccattttacccataacaaaactgtgggagaataagtaactttcccaaagttatccagcttactcatatggcagagcagtgttttaaactcaggcctgtctgacttcagtatctgtcttctttccatttcaggcattaccctgaaggatttgacttacaatctagtattatttttggataatagtaatcaggttgtaagtgtaatagtattattaacatttactaacttacatatattcttatggccttgtggaatctgtaactaaagttttgccattaatcatttgtgtcagcatgcatctcatagatagtttttaatagatggatcatgaaaatgtttatgttaattaatgcaggctattataatggttaaatgaaggcatgaggggattttttaaaataggtatatttattttaaattgctatctaaaaatggaatgctctagtagaatgccaacccccataattttataggtggctttggggtctcataaagttacaatctagatgttggctgtggctacagtcttttgaagtgtaatgggacagaaggatctatttccaagttggctgcctcacaggctattgcacattaatgctggctgttgacgagggaccttagttcttcatgtcgatctttccataaggctgcttgagtgtcctcacgacatgacaactggcctcccctagagtaagtgatctgataaagcaagaaggaagttgcagagtctattatgacctggtttcagaagtctcttcaaaggcaacttcttaattaaacattctattttatggctaggaaagtagatatcttaaaatgttgcttcatattatatacagaatttcatttctttaatatttttttttattaatggactttattataatattgatttttaaatccagtttttgttttgtttcttgactattaccagagtttttacggtattcagtgtgtgtgctagtccactaatggtcaattattcaaaccactagagttttcttactttttaccatggataccatttgaatttttatgttgtacaataaatgcaaaaataaaatttcttttaataaatagagaagtaattgagcagtaatattatttaatagctaacatgtattgactatttactgcatggcaggcattgctttaaggcctttgcctttataaatttattaatactagcaacaactcaagtttcatgaacttaccctactttatggacaataaatccaagacagaaaggttaagtaaacatgcctcaaatcacataccagtttcaagctgggattcaagcccaggcagtgtgactgcagagcccaggctgctgagccctccatgataccacctctgagcatctattagaactgcaagttcctttcttcctccaagttagattgactacagcagcatttcattcttatgttgtgcttctatatgtaacttctgagcaaagctttctgtgaatttaaactgcatatgcctttagtaaacagcatctcttcaccttcatgattccacaatgttccaaaacgtgtcagtgaagctctggatccttttttcaatagaaaaatcacggcacaattagttataaaagagctttaagtttcccttggaatggatttagttatccttttgcagtgagagataagtttgagttggctctctggaaaaccttccctttacttctctgtttttcttactttaatttcccccttttttttttgaggtatttgttcctcaaaagacatcccctctctttaaatctagttccagtaactacttaatgtctatgaagttgaaatctcctatttcttcatagttgaaattgataggcaatgtagctctttgttagtgtctaaagtctgttttaggatttgatgactaaaagcatactaaagcacagccctttaaattaagttttattaaaatatttattataatgtcttatacagcatagtgaaatttatatttgtttgttgctgttgttttctagggaagtatgggtagtattacctgcatcgcttggaaaggtgatacattagtgcttggagatatggatggaaatttaaatttctgggacttgaaaggcagagtatccaggtataagccaagaatgaaatcttgttatttcattaaaaaaaagaaatgaaatctttttgttttgttttgttgagatggtgtcttgctctgtcgcccaggctggagtgcagtggtgcaatctcggctcactgcaagctctgactcccgggttcatgccattctcctgcctcagccacccgagtagctgggactacaggcacccaccaccacgcccggctaatttttttgtatttttttagtagagacgggatttcaccatgttagccaggatggtctcgatctcctgacctcgtgatccgcccacctcggcctcccaaagtgctgggattacaggcaggagccagcacacccggccaaaaaatgacatcttgatatggttccattagaggcttgtgacttggcaagaaggatcagtaaactcgtggaggtgtagcttggacccttgggtcccttcacctaaacttgggaggatgggccttgagccaagcattcttaggagatagttatctgcaagtggcccctgcagaagtcttagctgaccttaaagggcaggccctttctgtcagatgtggcccccagtcccagcaagtaaagggttctcccatcatcagacctgttagaaatggaaatagtgagagatgttagacatagcttctggtgaccagatctcactctacattgtattgatgtttttgtttctttgtcttcagaggaatacccacacaccgaagttgggtgaggaagattcgttttgctcctggtaaaggaaatcaaaaattaatag

SEQ ID NO: 14883 - DNA, 570 bp, Homo sapiens
attctgtaaagcacgctggcagcacttgggcaaacacagacatcttctgtgtccgctgagctcttggtcgtaaatgaacttttgcaaggatattgactggtgtgttttgtcatgatgagtggtcaccatctcacaacttgaagagcctgagaaagaagcaacttgcaactcgagaggccatggcccgccagaccgtagtctcagacacagagctgagtattgttgaatcatctgtgatcagcttgctgcaggaggcagaaagtaaatctgaacttagtcagaacatctctgcccgggaacattttgtatttaccgatattgatggccaagtgtatcatctcactgttgaaggaaactcagtaaaagacagtgctcggattccaccagatggaagtatgggtagtattacctgcatcgcttggaaaggtgatacattagtgcttggagatatggatggaaatttaaatttctgggacttgaaaggcagagtatccagaggaatacccacacaccgaagttgggtgaggaagattcgttttgctcctggtaaaggaaatcaaaaattaatag

SEQ ID NO: 14884 - DNA, 3010 bp, Homo sapiens
acagtgtccgccgcttcctggttgcgggtcagcgcccaggtcctgggctggccgccgggatgttgccctacacagtgaacttcaaggtgtcggcgcgcaccctcacgggggccctcaacgcccacaacaaggcggcggtggactggggctggcaaggtttaattgcttatggatgtcattcacttgtggtagtgattgattccattactgcccaaactcttcaagttcctgctgacgggactgctttcaggactgcccgcaccacagtttgctattcgtatgtgtccaccgttgaccacaaaaaacatcaagatgtatcagccactgctggctgttggtacaagtaatggttctgtcctggtgtaccatctcaccagtggtctgctacacaaagagttaagcatccactcatgtgaagtcaagggtattgaatggacaagtttgactagttttctttcttttgctacctcaacaccaaacaatatgggattagtgagaaatgaacttcaactggttgatcttccaacaggtaggagcattgcttttcgtggtgaaagaggcaatgatgaatctgccatcgaaatgattaaagtatctcatttgaagcagtatttggcagtcgtattcagagataaacccctggagctatgggatgttaggacttgtacccttcttagagagatgtccaaaaacttccctacaataactgctttggagtggtcaccatctcacaacttgaagagcctgagaaagaagcaacttgcaactcgagaggccatggcccgccagaccgtagtctcagacacagagctgagtattgttgaatcatctgtgatcagcttgctgcaggaggcagaaagtaaatctgaacttagtcagaacatctctgcccgggaacattttgtatttaccgatattgatggccaagtgtatcatctcactgttgaaggaaactcagtaaaagacagtgctcggattccaccagatggaagtatgggtagtattacctgcatcgcttggaaaggtgatacattagtgcttggagatatggatggaaatttaaatttctgggacttgaaaggcagagtatccagaggaatacccacacaccgaagttgggtgaggaagattcgttttgctcctggtaaaggaaatcaaaaattaatagcaatgtacaatgatggagctgaagtgtgggatactaaagaggttcagatggtgagcagtttaagaagtggcagaaatgtgacctttcgtatattggatgtggactggtgtacgtcagataaagtgatcttggcctcagatgatgggtgcatcagagtcctagagatgtctatgaagtctgcgtgctttagaatggatgaacaagagttaaccgagcctgtgtggtgcccctatctccttgttccaagggcctctcttgccttgaaagccttcttattacaccagccttggaatggacagtattctttggacatttctcatgttgactatccagaaaatgaagaaataaagaatctcctccaagaacagttgaattcattgtctaatgacataaagaaactgttgcttgatccagaattcactctcttgcagaggtgcctgcttgtttcaaggctctatggtgatgaatcggagctgcacttctggactgtcgctgcccactacctgcacagcttatcccaggaaaagtcagccagcacaacagctcctaaagaagctgctcctcgagacaaactgagcaacccactggatatatgctatgacgtgctctgtgaaaatgcctactttcagaaatttcagctagaaagggttaatctgcaggaagtgaaacggtcaacttatgatcatacaaggaaatgtacagaccagctactgctcttgggtcaaacagacagagctgtgcagttgctgttggaaacaagtgcagataaccagcattattactgtgattcactgaaagcctgtttagtcactactgtcacctcgtcaggcccctctcagagcaccattaagttggtggcaacgaatatgattgccaatggcaaattggcagagggcgttcagttgctctgcctgatagataaggctgcagacgcctgccgctacctgcagacatacggcgagtggaatcgggctgcatggctggcaaaagtccgtttgaatcctgaggagtgtgccgatgttttaaggcggtgggttgaccacctttgttctccacaagtcaatcagaaatcaaaggctctcctggttctcctctctctgggctgcttttttagcgtggcagagacgcttcacagcatgagatactttgatagagcagccttatttgtggaagcttgcctcaagtatggagcatttgaagtcactgaggacacagagaaactcatcactgctatatatgcagattatgcccggagtttgaagaacctcggttttaagcagggagcagttctctttgcttcaaaagccggagcagctggcaaagacttattgaatgagcttgagtcccccaaggaagaacccattgaagagtgacagcttaataaatgccagggaatctgacctggaaggcagatgggagggggctggtctggctgtggccaccgtcacagtccaggatgaagaggagtacagggtcctgtgagctgtttgaccactgttctaagactatgtgtgcccaaaagcacataagcatctatgttgagagtaagtttgtatcctgcgttggtctcagaaagaacgtgaatgcttaagattttgaaagtacataatattttatactttgggagagagctttaagagtccctggaaatactttttaatttttttaacttaaaattcaagagactgaatcacttttctcattgattaaatgtaaagattattgagaaacctatagtaaatgaaatttgtgagatgttttctcaaatatatgctgtgcctgtacttatatacagtctttcaagagagatacaaacaaggcagaaacatttaaactagtatt

SEQ ID NO: 14885 - DNA, 1355 bp, Homo sapiens
ttctagaaatttcagctagaaagggttaatctgcaggaagtgaaacggtcaacttatgatcatacaaggaaatgtacagaccagctactgctcttgggtcaagtatgtcagtttttataactctacatgcttcattaaattgctagttaattcgtatttcagagcaatatatctgtatgtatatatttcataatattttccccttgtatgtacctccttccctgtagacagtttaggctttctttcaaaataataccaataaacctcatgagaaaaaacatatggttaaccagcttgtaatttagacttccataatgcccagtggagcccagctatttgttttgttttgtttttgtgtctgaattgactggtacaaagctaaaataggcaattactcgagcacctagatacaccagcctctggctttatgtttgtctcaaaaaagtagtgtagcacctctgtttaatgtttgtatttgtaaacaaaatattcaattgcattttttgaaaatgagtgttttcctttagttttctaccttatgaattttaaaaagttatgttggaggaaaatgttctcataattagaaaaaccgtttctcttactagacagacagagctgtgcagttgctgttggaaacaagtgcagataaccagcattattactgtgattcactgaaagcctgtttagtcactactgtcacctcgtcaggcccctctcagagcaccattaagttggtggcaacgaatatgattgccaatggcaaattggcaggtaaggcacacttgatatgtttgtcatctctctgaaaaatgagaccttgttcccagcaaagtatctgattagtagggacatttctttctcttttacatatgctgaagaaaaatagaaaaattattgctacctataaatcagatgaatataattgtctaaaccagaattaattgtttacacttttcagagtgaaagggggcactgttaataattgctgagataataggcataaatccaacaatcctaggcaaatcagaacaataaaacctgtgagagaactatgctctccctacttattctccagactgtattgtgcttcctaccctggttacttgagtaataacagtaaaactcttaatattatgtttcagaatttaaatcaagaatgtcttcagtaggtataaaatgggcacgactagataaggtcaaatggggatttaactttttaatgacttctcaaagaaggagctgcagtgtcacttaaggggatgcgcttttgtctttcagagggcgttcagttgctctgcctgatagataaggctgcagacgcctgccgctacctgcagacatacggcgagtggaat

SEQ ID NO: 14886 - DNA, 185 bp, Homo sapiens
ttctagaaatttcagctagaaagggttaatctgcaggaagtgaaacggtcaacttatgatcatacaaggaaatgtacagaccagctactgctcttgggtcaagtatgtcaggcgttcagttgctctgcctgatagataaggctgcagacgcctgccgctacctgcagacatacggcgagtggaat

SEQ ID NO: 14887 - DNA, 4632 bp, Homo sapiens
atggcggccgtagggtccggaggctatgcgcggaacgatgcaggggagaagctgccctctgtcatggcgggagttccggcgcggaggggccagtcctccccgccccccgccccaccaatctgcctacggcggcggacgcgactctcgacggcctccgaggagacggtgcagaaccgggtgtcactcgagaaggtgcttggcatcacagcccagaacagcagtggcctaacctgtgaccccggcacaggccatgtggcctacctggcaggctgtgtggtggtgattttggaccccaaggagaacaagcagcagcacatctttaacaccgccaggaagtctctcagtgctctggccttctcccctgatgggaagtacatagtgacaggggagaatgggcataggcctgctgtgcgcatctgggatgtggaggagaagaatcaggtggcggagatgctaggccacaagtatggtgtggcgtgtgtggccttctcacccaatatgaagcacatcgtgtccatgggctaccaacatgacatggtgctcaacgtctgggactggaagaaagacatcgtagtggcctccaacaaggtatcttgtagagtcattgccctctccttctcagaggacagcagctattttgtcactgttgggaaccgccatgtgaggttctggttcttggaagtctccactgagacaaaggtgacgagcacagtgccccttgtagggcgctcgggcatcctgggcgagctgcacaacaacatcttctgtggtgtggcctgcggtcggggccggatggcgggcagtaccttctgtgtgtcctactcgggcctcctctgccagttcaatgagaagagggtgctggagaagtggatcaacctgaaggtctccctgtcttcctgcctctgtgtcagccaggagctcatcttctgtggctgcacagatgggatagtccgcatcttccaggcccatagcctgcactacctcgccaacctgcccaagccacactaccttggggtagacgtggcacagggcctggagcccagcttcctcttccacaggaaggcggaagcagtctacccagatacagtggcactgaccttcgaccccatccaccagtggctgtcctgcgtgtataaggaccacagcatctacatctgggatgtcaaggacatcaacagagtgggcaaggtgtggtcagagctcttccacagctcctacgtttggaacgtggaggtgtatcctgagtttgaagaccagagagcttgtttgccatcaggatcctttctgacttgttcttcagacaacaccattcgcttctggaacttggacagcagccctgattctcactggcagaaaaacatcttcagcaataccctgctgaaggtcgtgtacgtggagaatgacatccagcacctgcaggacatgtcacacttcccagaccgggggagcgagaatgggacacccatggacgtgaaagccggggtgcgggtcatgcaggtcagtcctgacggccagcatttggcttcaggcgaccgaagtggaaatctgaggatccacgagctgcacttcatggacgagctggtcaaggtggaggcccatgatgctgaggtgctgtgcctggagtactccaagccagagacggggctgaccttgctggcctcagccagtcgggaccggctgatccatgtgctgaacgtggagaagaactacaacctggagcagacgctggatgaccactcctcctccatcaccgccatcaagttcgctggcaacagagacatccagatgatcagctgtggggctgacaagagcatctactttcgcagtgcccagcagggttcggatggactacactttgtccgtacccaccacgtagcagagaaaaccaccttgtatgacatggacattgacatcacccagaagtacgtggccgtggcctgccaggaccgcaatgtgagagtctacaacactgtgaacgggaagcagaagaagtgctacaagggctcccagggtgacgaagggtccttgctgaaggtccatgtggacccctcaggcaccttcctggccaccagctgctctgacaaaagcatctcagtgattgacttttactcgggcgagtgcattgccaagatgtttggccattcagaaattattaccagcatgaagttcacctatgactgtcatcacttgatcacagtatctggagacagctgcgtgttcatctggcacctgggcccggagatcaccaactgcatgaagcagcacttgctggagattgaccaccggcagcagcagcagcacacaaatgacaagaagcggagtggccaccccaggcaggatacgtatgtgtccacacctagtgagattcactccctgagccctggagagcaaacagaggatgatctggaggaagagtgtgagccagaagagatgctgaagacaccatccaaagatagcttggatccagatcctcgttgcctgctaaccaacggcaagctgccactgtgggcaaagcggctgctaggggacgatgatgtggcagatggcttggccttccacgccaagcgcagctaccagccccacggccgctgggcagagcgggccggccaagagcccctcaagaccatcctggatgcccaggacctggattgctactttacccccatgaagcccgagagtctggagaactccattctggattcactggagccacagagcctggccagcctgctgagtgagtcagagagtccccaggaagctggccgcgggcacccctccttcctgccccagcagaaggaatcatctgaggccagtgagctcatcctctactctctggaggcagaagtgacagtcacagggacagacagccagtattgcaggaaggaggtggaggccgggcctggagaccagcagggcgactcctacctcagggtgtcctccgacagcccaaaggaccagagcccgcctgaggactcgggggagtcagaggccgacctggagtgcagcttcgcagccatccactccccagctccgcctcctgaccctgcccctcggtttgccacgtcgctgccccatttcccaggatgcgcaggtcccacagaagatgagctgtccctgcccgagggacccagcgtccccagcagctccctaccccagactccggagcaggagaagttcctccgccaccactttgagacactgactgagtccccctgcagagctctgggagacgtggaggcctctgaagctgaagaccacttcttcaacccacgcctgagtatctccacgcagttcctctcaagcctccagaaggcatccaggttcacccataccttccctccccgggcaacccagtgccttgtgaagtctccagaggtcaagctcatggaccgaggcggaagccagcccagagcaggtactggctacgcctccccagacaggacccacgtcctcgctgcagggaaggctgaagagaccctggaggcctggcgcccaccacctccctgccttacgagcctggcgtcctgtgtccctgcttcctccgtgctgcccacagacaggaatctcccaacgcccacatctgcacccaccccaggcctggctcagggtgtccatgccccctccacctgttcctacatggaggccactgccagctcccgtgccaggatatcacgcagcatctccctcggtgacagtgagggccctatcgtggccacactggcccagcccctccgtaggccatcgtccgttggggagctggcctccttgggccaggagcttcaggccatcaccaccgcgacaacacccagtttggacagtgagggccaagagcctgccctgcgttcctggggcaaccacgaggcccgggccaacctgagactgaccctgtcaagtgcctgtgatgggctcctgcagccccccgtggatacccagcctggcgtcaccgtccctgcagtgagcttcccagcccctagccctgtggaagagagcgccctgaggctccacggctctgcctttcgcccaagtctcccagctcctgagtcccctggccttcctgcccaccccagtaacccccagcttccagaggcccggcctggcatccctggcggcactgcctccctcctggagcccacctccggtgcacttggtctgttacagggcagccctgcccgctggagtgagccctgggtgccggttgaagccctgcccccatctccccttgagctgagcagggtggggaacatcttgcacaggctgcagaccaccttccaagaagccctcgacctttaccgtgtgttggtctccagtggccaggtggacaccgggcagcagcaggcacggactgagctggtctccaccttcctgtggatccacagccagctggaggctgaatgcctggtggggactagtgtggccccagcccaggctctgcccagcccaggacccccgtccccaccgacgctgtaccccctggccagcccagacctgcaggccctgctggaacactactcggagctgctggtgcaggccgtgcggaggaaggcacgggggcactgagggcgcagcccctccaccgcagccctgctgcttctgaggacttaggtattttaagcgaataaactgacagctttg

SEQ ID NO: 14888 - DNA, 19424 bp, Homo sapiens
tttcccgcggctgttcgctgttccagtgggtcgtggcggtggcggcagcggcggttaggggatgtaacggtcgcccgcctccggcgtgacgatggcggccgtagggtccggaggctatgcgcggaacgatgcaggggagaagctgccctctgtcatggcgggagttccggcgcggaggggccagtcctccccgccccccgccccaccaatctgcctacggcggcggacgcgactctcgacggcctccgaggagacggtgcagaaccgggtgagaagctgctcgccatgtctaccccagttccaggcttcctaggtttcccctagtcccgtcctgagaactgtggccccgacatcagcccccggccagtcccctcaggttgttccctgccatgcctcgtcccctaacccccgcccctttagccacggcccctcccactttctcctcgctgctttcccggctccaccctcagcgttggagcaattcgggggttcctcgctggttcccacccgtggaaatgcattttgcttctgtaaatcacagcctagtcctgctatattttaacccccgttctatcgcctttagacgtcacgatcatagctcactgcagcctcactgccctggcccccgctgagtcattaaggtcccttcgagggttcggtccagagtgttacctgccccaactcttcctcgcttctaccccgccttctctcaccttctgcgatctctatcctttttcctcaccaaggtgggattcttaatccatattgtcactcaaaactatgagaaagacgtgagaagttatttataaaatctctgcagtgctgcctggggaggagggcgtacagaacagttccctaaatcctgagacagaaaaatggaaagaaatgatttcacagtaggtagaaggaattccattagcacagcggcaattaaaaaaattgttttccagctgtgtaggcacaaaatctgtttttataaaatggagatgataagaaccatactactggtagggcgcggtagctcacgtctgtaatcccagcactttgggaggccaaggtgggctgttcacctgagatcagttcaagaccagcctggccaacatggtgaaacccgtctctacaaaaagtagaaaaattagcccggcatgctagcgcgcgcctgtaatcccagctactcaggaggctgaggcgggagaaatcgcttgaacctgggaggcggaggttgcagtgagctgaggtcatgccactgcactccagcctgggcgacagagtgagactctgtctcaaaataaataaataaataaattatactattgcattggagggaaatgaaattttaattgtgatcttcttggcacggagtccagataaagggaggatacctggtagctgctggtggagcttgttcctgccccatgactttctcctgcactgtgattataccgcccactcctggctacagggctctggctgtacctcccatgtgctctctgtcaccaaggttcagtcacactggcctgcttttggttttcctgaggctccatattcttttctgcctcctggcctttgtgattggtgagtcctcagcctgggctttttgctgcaatctgcctgtctggctccttcccatccttcaagtctcagcctgaatgtcgctatcttgaaaggccttctcgaaccccattctaaagcaaacagccaccttcatctgtcacccagcaccctatacttcatagcctttatcttatatgttcctgaaagtgccctttgagctattaaactacatataacaatagcaaattcagagaggcgttatagcaaagtggctaagagcacagactgctgctgatggtatggttggacccaggcagcctgagcttaaactttagtcctgttcttcctggcaggttatgaacttcgctttttcttttctttttttttttttttgagatggggtcttactctgtcatccaggctgtagtgcactgggttgatctcggctcactgcagtctcagcctccctgggctcaggtgatcttcctgcctcaagcctcctgagtagctgggactgcaggcgcatgccaccatacctgactaatttttttgtgttttctggtagagacagggtctcgccgtgttggccaggctggtcttgaattactgagctcaagcgatctgcctgcctcggcctcccaaagtgctaggattacaggcgtgagctactgtgccccgccaagttatgaacttatctgtgcctcagttttcttatctgtaaaatgagaataatgatgtagaaatctctcatagggtatttgtgaggattcaatgaggttacatatcctaggcacttagaacaacactggcatatggcaagtactctattcatgttagctaatactgatattatgactgtgtatttggggtaatatttatttattttttttgtttggcagcacagagttgatctgtcttgcaaagacctagtctaaaagtgaccattcataccagggcccagtaatgctgatcgacagataagacaacatgagtgccatggcttggttgtttgtgttggaatcctggcactaccccttcctggatgggtaacccctcttggcctctgtttcctcaactgttttgttcctttttttttttgagacagagtctcactctgtcgcccaggatggagtgcaatggtgccatctcagctcactgcaacctccgcctcctgggttcaagcgattttactgcctcagcctcctgagtgcctgggattataggcatgggccaccacacctgactaatttttttgtatttttagtagagacagggtttcgccatcttggccaggatggtctcaaactcttgactgagccaccacacccagccttgtttaaattttaaatattactgttcatgtggttttttactcgttgaaaccgctcaaatttctggactgtgaatctgatgtggggaaactgtctacctttggtcactactgtgtctctcctgtacagcccaaagtgctagctttggagccagactgcctgggtttgtatatcaacattgccacttgcagatgtaggatcttgggcctcagacttcttacctgtaaaacaggggtgataatagagccttcttcgtggcttgttgggaggattcaagtcttttatacatataaaagtactaagaggccgggcacagtggctcatgcctgtaatcctagcactttgggaggccgaggcgggtgtatcacctgaggtcaggagttcgaggccagcctggccaacatggtgaaaccccatctctactaaaaatacaaaaattagccggacatggtggcatgtgcctgtaatcctagctactcaggaggctgaggcaggagaattgcttgaacctggaaggcggaggttgcaatgagccaagatctcaccactgactccagcctgggtgacagagcaagactccatctcaaaaacaaacaaaaaaaagtacttagaaacttattcacaggtcaccttctcaccgcggcattcgcccccttcccctgtgctcctaacctccttatctgctttcttctctcttgcacccatcattacttggcatctatttcacatatttgttctgctccttttctatgttctacatacccatcaccagtagaatgtgagccccccgagggcagggatttgtctcttcctcaccactctgtgcttttcacctagcgttgtatttgtcaaaggaatgttgagagaacaagtgttagctgctggtggatggcgtggccacagaagctcagtgtgggtgttgaatgtagcaggacctgaatgggtggccaaggcggctgcaccatgtggtgctggctagggtgggtgcctctgacttgggctttttctttgcaggtgtcactcgagaaggtgcttggcatcacagcccagaacagcagtggcctaacctgtgaccccggcacaggccatgtggcctacctggcagggtaagcagataagggcctcgacgtctaatcattgctagggaatttggagcttggaacctgaagccatccgtaaatcgctctgagcctcatatttttcacctgtagaatgtggagaatggggcctgcctctgagagctgtggagaggattccatagccccctctctgtctagaacagttcctggcatgtagtgagtgcaatgaaagcctttattatgactacaggggggaggtgacagcgattctgggaaagacaggtgattaaagtccacgctgtggtgtcaggtaacctggatttgtgtcccagctctgccatgtatgctgctctctgagcctcttcctctgcctctgtaaaacagagctggtgaccccctctgcttgcatagttgagaagactgaagaagatgctacagctgttcattccataaatactcatgtagcctggcactgtgctaaggacgtcccctctctgggtttgtttccttatctataaatgggcctaaatagtcgtgacctgacctggcagttgtgaggatttaaaacaattacatccctctttctctctttttgttttgttttgcttttttgagacagagtctggctgtgttgcccaggctagaatgcaatagtgtgaataacagctcactacagccccaacctcctgtgctcaagcgatcctcccatcttcacctcccatgtagctgggactacaggcacatgccaccacagccagctaattttttttagtggagatgagatctcactctgtcgcccaggctggtctaaaactcctgagctcaagtgatccctcctgccccatactcccaaagtgctgggattatagccagcttaaggtcttaattagcctagggcctgacagacattacctcagaggaagtgttggtttctatttaagaacatagcaatgttaaagtgccctagaattctcagcgtaaacacctggaggagggggaggaggaggagaccagagagaaccgagggagcttgtttatttgtgggcttttctggtgggaatagaatcatcccaggaccccaacactccccacagttgaggcacattttcctctttcttcccagctgtgtggtggtgattttggaccccaaggagaacaagcagcagcacatctttaacaccgccaggtaggctgaggcctgggcccggggcaggggtggaaccaggggcttggcacgcctcccctcccctacacagcctggagatactcatgggtaggtgctcactcattcacttacatgttggctcagcagcattcgcctgtgctgggtgctgttccgtgtgctggggacacagcagtgaccagaggagacgagaatctctgctggctagagcgagacagactgtaaactagtcagcaaattacgggctgatcatgatcagtgctatggaggaaatgatggaggatgtcttcgggcaggtttgtgggcagagaataggaggaaagccttatcagaaggctcagggaacgctgccttgactctgagacctgaaggaagcgagagggtgacccataagaagctgtagggagagcgcttcaggcagggggcacaggaagggcaaaggccctgcagtggttaagaatctccggcgctttagaagcagccagggatctgggtgcctggagaaaggagcagggaagatgaggctggaccaggcagaagccacatcccgtaggccttgcagccttgtagagggtctgcatagcatgctgagtgcagagagcagccacaggagggcaccacaggccaggaatgtgcttttcacccccagccctccagcagctctattccctgctttgcttttctccacaaaatttgctcccatctctgatatgctgtccagtttcctcattgatggtattcactgtgggtctccctcagtgtgagcactcttgagagcagggactttctctgagttcatttctgtgtccctagcaccaaagagcagtatctggcatattgatggctattttctaagagaaagacttaacatgatttgggttttagaaagatcccttcagctataagtttactggggaaggacccgctcctctgccttggggctaactgatcactgctaccctggggatgtggtcccaatagggctgtgacctttggaaggcacaccatgtccctccttggcatagctcaggctcagctcctttggcccagttctccaggtggatggataaggagtgggttttctcctgcccttatggtccctaaggtacggtccttaagctacggcaggttcttgttatctgacagaagtgcattccctcttgaaagtggctttttggaccttttgctcctaactgtgggttctgttactggtgataagggcagagctgggttccattcctggctcaagcgtctattcactgtggaatctcaggtgagacacttctttcagagccttggtctcctctgaaaataaaatagctgcctccaactgggagagcattcataaggcagcagctacaaaccagagtcacacacacttgcccaatatagtatgttttaaaggttggataagtggacaacatttcaagttttttaacacaaaaatccaaatgtcccttttgtttggagaagtgagaaattctctggcctctggggcccaaattcccctgtggcagtgaggggctgagcttagtgaaatttgtcaggcccgttgtggccagttcctcacacctgtgttgcctccctaatccctgtaggcagtggagtgggtggcctggatctatagtagatggtatgcaggtgtccgcccttggccaccagtgggtgtgcattaggaggtggtgtggccagtgtggggattttcactccaactgcatatcagaatcacctggtccctgtgcctcaccgcccccccaccgccacgcaagagaaagccaaatcagttgatctgggatgaaacttgggcattggcaattttgagactttttatattgaaataatttcagacttagaatagtacaaagagctcctatatacctatgtacctttcacatatttcacaaatgttagcttttttttcttttttttttttggacacagagtcttgctctgtcacccaggctgctggagtgcagtggcacagtctcagctcactgcaacttccacctcccgggttcaggtgattctcatgcctcagccccccaggtggctgggaccacaggcatgtgccaccatgcccagctagttttttgtgttttagtggagacggggttcatcatgttgcccaaggtggtcttgaactcctgagcttagacagtctgcctgcctcagcctcccaaagtgctaggattacaggtgcgagccactgcacttggccaaatgttagcattttaccacatttgctttatcattttttgtctatatacatattaatttgttctgaactatttgagaatcagttgtagacatgatgcccctatatctctaaatacttcacgccaggcatggtgattcacgcctgtaatctcagcactgtgggaggccttggaggcaggaagatcatttgaggtcaggagtttgagaccagcctggggaacatggcaaaaccctgtctctactaaaaatacaaaaattagccaggcctggtggcaggcgcctgtaatcccagctactcgggaggctgaggcaggagaatcgcttgaacccgggaggcagaggttgcagtgagccaagatcatgccactgcactccagcctgggtgacagagcaagagtccgtctcaaaaaaaaaaaaaaaaaaaaaaaaaacttaatcaaataaatacttcagtgtgtatttcctacaaaaaaaaatgacaatctttttaaactgtaatacatccagcaaaatcaggaaatgaaaattgatatatcactctcatccactccccagagggcaccattcaggagtcagcctttgtcccatgaatgtcctttatggccaaaggattctgtctagaatcacacattgcattgagttgtcccctcagtctctttcaggctgacgtggctcctctgtcttttcttgactttcaggatcttgacatttttttttttctttttgagatggagtctctgtcgtcaggctggagtgcagtggtgggatcctggctcactgcaacctgactccccagttcaagtgattctcctgcctcagcctcccgagtagctaggattacaggcatatgccaccatgtccggctaatttttgtatttttagtagagctggggtttccccatgttggccaggatggtctcgatctcctgaccttgtgatccgcccgccttggcctcccaaagtgctgggattacaggcgtgagccacagcacctggccacttttttttgtttttttgttttttgagacgaagtctcacactgtcgcccgggctggagtgcagtggggcgatcttggctcgctgcagcctccacctcctgggttcaagcgattctctgcctcagcctcctgagtagctgggactacaggcatgcgccaccgtgcctggctaatttttgtatttttttttagtagagacggggtttcactatgttggtcaggctggtcacgaactcctgacctcgtgatccacccgcctcggcctcccaaagtgctgggattacaggcttgagccactgcacccggccaatcttgacactgaggattgtagacgaggtattttgtagagtgtcccagcatttgggtttgtccaatgcctcctcacgggcagactcaggttctgcatctttggcaggaacagaccagaaggggtgctgtgttcttcctggtgcctcctctcaggaggtctcctatgactggtggtgttcactgggagcacttggccaaggtgttgcctgccagattcctccacttcaaagcctctcttttcacctttgtgattagcaggtatcctggggacatctttcctgagacagtgcaaatattatcttgttcctcaccaaactttcactcaactaatcttaggctttgacacttttcagatgctccccagggaaatctaatgtacagccaggactgagaactactggcttagaggtcagggctctgccctgtctggttaggtaactgcaggcaggggacttccttgtgttgcagtcacctcatctgccaagttggttcatgagagccctgactccatgaagcatgcttgaggaatcagtgcactgatggccagacagcatttgccagagggccaggcacaaggtcagggcatgcgacaggttagaggtggctacgggcaacagaaacccctccacagcatggcttaaaacccaagagcatgctcttcctgcatgtcataagtccagaggtgggcagcccaggggctgtgtctctgaacgccacattttttttttctgtctctctttttgagacagagtctcactctgttgcccaggctggagtgcagtggcgcgatcttggctcactgcaagctccgcctcctgggttcacaccattctcctgcctcagcctcccaagtagctgggactacaggcgcccaccaccacgcctggctaattttgtttttgtatttttagtatagacagggtttcaccgtgttagccagggtggtctcgatctcctgaccttgtgatctgcccacctcagcctcccaaagtgctgggattacaggcgtgagccaccgcgcccagccccacttctttttttctctagacggagtcttggtctgttgcccaggctggagtgcagcagcacgatcttggcttgctgcaacctctgcctcccgggttcaagcaattctcctgcctcagcctcccgagtagccgggattacaggctcctgccaccacacctggctattttttgtatttttagtagaggtggggttttgtcgtgttggccaggctgttcgcgaattcctgacctcaagtgaaccacccacccctctgcctcccaaagtgctgggattacaggcgtgaggcaccgcacccggcccccattccttctctcctgttccaccccatttattgtgaggcttctggtcttgaagtcacttcatggcccaagatggagttctggctgtcgtgtgcgtatttcaggaggggaactggtaggaagcagggcaaagggttccctttgacgagtatttcaggaagtcccacacagcatgtcagtttacttctccttggccagactaagtcatgtagctgtacctgcatagttgcaagcataaaactggggttatgtcagtaaggaaagagaggcgagtggatatccaggaggcagcttgccctgtttgttgcagtaaggagccacgggaagcctgggaagcaggttgacttgatgatgaatattccatgaagttgccaaagtctcacttagcgacatttacttagttatctacacaccaatttaccatctcacgtagggagacaattattagattgttaaggaacaaaggtaaaaataagattaaaagagagaagggagtagaaggaaaccatacaatctgggaacagtgaatcttgctgccagaaacctacgagctagcctgttcattcagtgcttgtgcaggctagctaggagtatcagaaacattttggctctttatggattttccagaacaccttgagtatttagcagtggagcacaggctgcaggctaccttgatgtgatgcctgccaggatcctcccatcagcaccacccgtttagttaggccaggcctgtaccatttcctgcatctctatttctcagtgttacagggtggatagggtcttaggatacccactgcggcagagggagaagaaagcagggtccgcatacagtgtctactccatttgggtttggtgtctcagggcggaaggggcctttgcatttacccccatttctctgtgtgctttgctgggcacaccagcggcactggctctgtgggagctgcttgagctcacctctgctggcctcttccgaggcttgggaggcagaagagggcagagtcctatcagagtcgccaggatggggtctggctggccaccctcagcggaaccagtgatcagctcttttctttatccccaggaagtctctcagtgctctggccttctcccctgatgggaagtacatagtgacaggggaggtgagtcgtgatcgtgactgagtgggagtcgggggctggggggtcttggaagccattccttctgctcccggcaggcctgggagtccctggaatagctccttcctgggccagaacagccctgtagcagatgggggaggtggcttttgggcacatcctgtggcaatgccatcttcggccttgacaaccctctagccctgcccagtacagagcccagcagcagtaacgaccccaccttccctagaatgggcataggcctgctgtgcgcatctgggatgtggaggagaagaatcaggtggcggagatgctaggccacaagtatggtgtggcgtgtgtggccttctcacccaatatgaagcacatcgtgtccatgggctaccaacatgacatggtgctcaacgtctgggactggaaggtaagagccgaccagcaggcctgtggcaggcagccagctgccacagcatcctatgtcttgggcacagggagagctacatgagaggacgcagtaaagtgctcactcacccaacagataacagctattgagcacctgtgacatgctgatcccttattgtagggcacaaggcaggctcccagctagaagcattatacatatttttatattgaccagctgtgaccttaggcaagtgacttaacatctctgtgagtctgtttcctcctctgttagatggatatagtagtacttatcttgttgagttgtgagactttaatgagttgataagcactggaaggctgggctttggaacagctgtggagctggcagaagtgggtaccaagtcctggctctgcccataacccactatgtgaccttgagcacatgacatctccccctctgagcctggtagggttggggagaagcgcctccctcgtggggcttttgagggattgaggaaatttcatgggttatcctgtgaagggctcagggcagggcccagagcaggagccccatctgtgacagccataggttgtgttgtccttacatcccagccgtgactgtccccaataccatgtgtgggctgcagagcttagacccttggagagagctctggaacatactgtcccatggggaccattccaagcctctgtcccttcctctgtcggtgaggaatgagcagggtgccccacataggtttccccatacagcagctccctggagggtcccaggaagacagacttggagtggggacgagcagggagttccagcctgagggcaaaggcacaaacagtccagtggaatgagtgctggcatgagcttctctgcacttattcttccagaaagacatcgtagtggcctccaacaaggtatcttgtagagtcattgccctctccttctcagaggacagcagctattttgtcactgttgggaaccgccatgtgaggttctggttcttggaagtctccactgagacaaaggtgagtttctgtccctgcccctttagccaggccctgagggagtcaccatcggtggcagcatggtctcctgtttctccctgagatttgagggcagcggtctcgggccatttggcctctcaggggcccagctgctgcttctgggcctactctcagggtgctgatgcacaggccctgccaggaaccccctgaccctgggaccagctctcattcttggactgctgctgtccagcccctctgtccagagtggcagggttctagtgttttcttcccttctccatttggaagagcttcttagagttctcctgttttgttgtgtcctatcatctggtcatgcagggcccagctgtgtggacaagtatctcactacgccctctgtgtctccaggtgacgagcacagtgccccttgtagggcgctcgggcatcctgggcgagctgcacaacaacatcttctgtggtgtggcctgcggtcggggccggatggcgggcagtaccttctgtgtgtcctactcgggcctcctctgccagttcaatgagaagagggtgctggagaagtggatcaacctgaaggtaccacctccctctctgccatcagctggacagactctttctcgtgatatgtgtctgcaggggtgctcatcagcattgaccacacaggttctgcttatgtgactagtggtgaatgacgcccactctctgagcttaaggttccacatctgtaaaatgggagtactgctgccctccccgcagagctgataaggaagtcacgtgagataacataggcaaggcagtgagcacggtgcttggtaccctgaaatgggctcaaggtgacagttgttttcccatgactatttgatctacttcacatttcttttctcctttgagcactctggctggtagaggattgcatttttttttaattaatttatttttttttattgatcattcttgggtgtttctcccagagggggtttggcagggtcttaggacaatagtggagggaaggtcagcagacaaacaagtgaacaaaggtctctggttttcctaggcagaggaccctgcgggcttccgcagtgtttgtgtccctgggtacttgagattagggagtggtgatgactcttaacgagtctgctgccttcaagcatctgtttaacaaagcacatcttgcaccgcccttaatgcatttaaccctgaatggacacagcacatgtttcagagagcacagggttgggggtaaggtcatagatcaacagcatcccaaggcagaagaatttttcttagtacagaacaaaatgaagtctcccatgtctacttctttctacacagacacagcaacaatctgatttctctatcttttccccacctttcccccttttctattccacaaaaccgccatcgtcatcatggcccgttctcaatgagctgttgggtacacctcccagacggggtggtggccgggcagaggggctcctcacttcccagaaggggcggccgggcagaggcaccccccatctcccggacggggcggcggcagggcggaggcggacccccacctccctccctgacgggccggctggctgggcaggggctgacccccacctccctcctggacggggcggctggccgggcgggggctaaccccccacctccctcccggacggagcggctggccgggcgggggctgactccccccacctccctcccggactgggcggctggccgggcgggggctgacccccacctccctccgggacggggcggctgctgggcggagacgctcctcacttcccagacggggcagctgccgggcggaggggctcctcacttctcagacggggcggctgccgggcggaggggctcctcacttctcagatgggacggccaggcagagacgctcctcacctcccagacagggtcgcggccgggtagaggcgctcctcacatcccagacggggtggcggggcagaggcgctccccgcatctcagacgatgggcggccgggcagagacgctcctcactttctagacggaatggcagccgggaagaggcgctcctcacttcccagattgggcagccgagcagaggggctcctcacatcccagacgatgggcggccaggcagagacgctcctcacttcccagacggggtggcggccgggcagaggctgcaatctcggcactttgggaggccaaggcaggcggctgggaggtggaggttgtagctagccaagatcgcgccactgcactccagcctgggaaacattgagcactgagtaaacgagactccgtctgcaatcccggcacctcgggaggccgaggctggcggaccactcgcggttaggagctggagaccagcccggccaacacagcgaaaccctgtgtttggtggagaccaaaaaaatacgaaaaccagtcaggcgtggcggcgcgcgcctgcaatcgcaggcactcggcaggctgaggcaggagaatcaggcagggaggttgcagtgagccgagagggcagcagtacagtccagctttggctcggcatcagagggagaccgtggaaagagagggagagggagaccgtggggagagggagagggagaccgtggggagaaggagagggagaggaggattgcattttttaaaaattggaggtaccattgatttaataacttttcagtcaaaaaagactacacaaaatacataaacttttatttatttttatttatttttactttttttttttttttgagatggcgtctcacttgttgccaaggctggagtgcagtggcgcaatctcagctcactacaagttccacctcccaggttcaagcaattctcctgcctcagcctcccaagtagctgggattacaggtgcctgccaccacgcacagctaatttttgtatttttagtagagacagggttttaccatgttggcctggctggtctcgaactcctgacctttagtgatccatccgtcttggcctcccactgcgcccggccataaacttttaaactaaagcatgatctatcgatacattgcagagcttctttcctttagtatctgaaggtttgagtcaaagctgttttcccatctggaatcagttgcccatttggctatccgcccgagcgttgtggtttcctctcctgttcctggcctgcctttgtgactcactctggagatcaccttcgaggttaatggcttgtggaagagttccaagttttatctctgtcctagttggttaaacatcattttctctttttcaagcaagtgaaaagctttcaatagatagatgtttatttcctaagcactaaatgactcataaattaagtccctgtagatttggaaaaactccttaaactgtatctagaggtctagcacttcctagtaggatagacagtcctttctagatactgtaacttttttctgtaccgctttggagtacagtctttatgaagttgtttgtaagcaaaagggaataaaatttaagcctaaaggctgggcgcgatggctcacatctgtaatcccaatgctttgggaggccaaggcaggtggatcacctgaggtcaggagttcaagaccagcctgaccaacatggtgaaaccccatctcaaaatacaaaaaattatctgggtgtggtggcggccgcctataatcccagctactctggaggccgaggcaggagaatcacttgaacccaggaggtggaagttgcagtgagccgagattgtgccattgcactccagcctgggcgcaacaaaaaactctatctcaaaaaaaaaaaaaaatttaagcctaaaattcaaccctgttactacaagtgacttacctgaagttgcagtctgctgaacaggtattttccatacacagctacgtttctctgtagacagcagtgacaattctgtttccgttcatgcctctgcctacctgctggcacatgtctttcaatagcagcagtatgctatatcctgatttcacaaatcttaaaatatgctaaaatgggtgtcttagacccaaggaactgtaagtcttctctggaggcctaaggctgctctgtcagtccccatatccccgggccaggccacgtgaagcaccaaatccactggggtcccttttgcccctacaggtctccctgtcttcctgcctctgtgtcagccaggagctcatcttctgtggctgcacagatgggatagtccgcatcttccaggcccatagcctgcactacctcgccaacctgcccaagccacactaccttggggtagacgtggcacagggcctggagcccaggtactgccctgtggggagagggaatgggaggggcccacccagagtctgtccactggcattcatccatgcttccagatccatctatctgtctgtccatcccacaaatacccatcatgactctcagccctgggcattacaaagcagaaaagtccttgccttccgaggcaagcctcacagtgagaagtgaggctgggtagggggaagaaacagtgagaaaacaaaggaataatatcatttcagatagcggtcagcatggtgaagaacagtgcagagcaggtgtgaatgtggcggagtgtttccatccacatggctgacccctactaagtggctgctaagtgccagccctgggctggaagcaggacatgcctattataatgaagcagcaaaatctctgcctctctgcagtatagcaagggggctcgatgataagcaagtacacgaaaaagataatttcaataggcatgagtgctttggggaacacagcagggactcgggaaggagagtgactggggtgggctgtgctgattgggtgcctggtgagaaggagctgctgtgtggagagctgggtcccagcagttgaggtgacagcacactgggcttgttacgttgcaggaatagtaagggactgtgtggccagagcccagtgtgtccggggaggatggtgggagatgaggccagtgtggggcgcctgtagtctatcctcaggtcagtgggcagttgctggggtttcgggcgttggggtaaatgaccaggccttacatgttaggtccctcagctgctgtgtcgagagtggatagaagcactaggctgtggctttcttctcctttgttgcaagtctgttttatggaattgggggctacctaaccagggggtgccaggtgcctagggctgcctctttgtggatttctggatgctagctcctgggtgccttttccacgacagggcctgaacaggggaactgggtgtcatgaaggaaaggagggggcgagcaacccacaggcagtgttgtgttgtagtagtcgggctcacagctctgctgtcttctgttgtgctctgtgaccttgggaaggtgactatacctccctgtgcttccgttttctcatgtgtaaaatacagtacctagctcttattgtggttgtgagaatttattgcaggtaaaactctcggcctggcacagtgtaaatgctcagtaaactgtagccttcatagggagaccccaggccaagggacagctccccagcctccttaggacacagaggctttttgatcatgcgttggtgaggccaagaagaggtgggacctgagatacatgcctattatctttctatgctcagagagagagcaggagcttgggttgggtgaaatgatgggcgataaatgttcataggaatcaaaaactcaattgctctcggggccaggcaaaaatttccggtttgtagcctctatatgaaaagcaaagcagaggaagagggaagagggaaaagtagaattggagcaggagagatggatggccacaaataccatgagggatggcattgccggggaggcatctccactgtcactagaggtggctgtcactactcagtgacattgatggtgattgattacccatgtggccttgttagcttcctcttccacaggaaggcggaagcagtctacccagatacagtggcactgaccttcgaccccatccaccagtggctgtcctgcgtgtataaggaccacagcatctacatctgggatgtcaaggacatcaacagagtgggcaaggtgtggtcagagctcttccacagctcctacgtttggaacgtggaggtgagccccccccccacccccttgcccctgcttggcctctgcacagttccccacagtttgggaacccattcagtaattccttcagaagatactcattgactccctcctatgcatcaggccctgtcctaggtgctgaggacacagacacaaaatccctgcccttaacaagctcacatttggatgggaaaggaaacctggaaacatcatcagtgaataacacgccaagcagcagtaaccctctgaagaaaaatgaggcggggaaggggaaggggaatgcaggtggtattctagagaggagaggggtcagggaaggcctccctgaggacatatgagcagagacctgcaggaaatcggggagtgagacctgcaactgctggggagaaccacaagcacagaggccctgcggcaggaacatgcactccacagagagctttgctgtggaggtcgtttatgtatttcactgctttttttaaaaaggagttgaagacggggcatggtggctcacacctgtaatcccaacactttgggaatctgaggcgggaggatcacttgagtccaggagtttgagaccagcctgggcaacacaagaccctgtctctacaaataatttttaaaaattagccaggcatggtagcacacacgtgtggtcccagctactcaagaggtggaggcaggaagatcacttgagcctgggatgtcaaggctgcagtgagctgtgattgtgccaccacactcccacactccagcctgggtaacagtgagaccatgtctag

SEQ ID NO: 14889 - DNA, 1980 bp, Homo sapiens
tttcccgcggctgttcgctgttccagtgggtcgtggcggtggcggcagcggcggttaggggatgtaacggtcgcccgcctccggcgtgacgatggcggccgtagggtccggaggctatgcgcggaacgatgcaggggagaagctgccctctgtcatggcgggagttccggcgcggaggggccagtcctccccgccccccgccccaccaatctgcctacggcggcggacgcgactctcgacggcctccgaggagacggtgcagaaccgggtgtcactcgagaaggtgcttggcatcacagcccagaacagcagtggcctaacctgtgaccccggcacaggccatgtggcctacctggcaggctgtgtggtggtgattttggaccccaaggagaacaagcagcagcacatctttaacaccgccaggaagtctctcagtgctctggccttctcccctgatgggaagtacatagtgacaggggagaatgggcataggcctgctgtgcgcatctgggatgtggaggagaagaatcaggtggcggagatgctaggccacaagtatggtgtggcgtgtgtggccttctcacccaatatgaagcacatcgtgtccatgggctaccaacatgacatggtgctcaacgtctgggactggaagaaagacatcgtagtggcctccaacaaggtatcttgtagagtcattgccctctccttctcagaggacagcagctattttgtcactgttgggaaccgccatgtgaggttctggttcttggaagtctccactgagacaaaggtgacgagcacagtgccccttgtagggcgctcgggcatcctgggcgagctgcacaacaacatcttctgtggtgtggcctgcggtcggggccggatggcgggcagtaccttctgtgtgtcctactcgggcctcctctgccagttcaatgagaagagggtgctggagaagtggatcaacctgaaggtctccctgtcttcctgcctctgtgtcagccaggagctcatcttctgtggctgcacagatgggatagtccgcatcttccaggcccatagcctgcactacctcgccaacctgcccaagccacactaccttggggtagacgtggcacagggcctggagcccagcttcctcttccacaggaaggcggaagcagtctacccagatacagtggcactgaccttcgaccccatccaccagtggctgtcctgcgtgtataaggaccacagcatctacatctgggatgtcaaggacatcaacagagtgggcaaggtgtggtcagagctcttccacagctcctacgtttggaacgtggaggccctgtcctaggtgctgaggacacagacacaaaatccctgcccttaacaagctcacatttggatgggaaaggaaacctggaaacatcatcagtgaataacacgccaagcagcagtaaccctctgaagaaaaatgaggcggggaaggggaaggggaatgcaggtggtattctagagaggagaggggtcagggaaggcctccctgaggacatatgagcagagacctgcaggaaatcggggagtgagacctgcaactgctggggagaaccacaagcacagaggccctgcggcaggaacatgcactccacagagagctttgctgtggaggtcgtttatgtatttcactgctttttttaaaaaggagttgaagacggggcatggtggctcacacctgtaatcccaacactttgggaatctgaggcgggaggatcacttgagtccaggagtttgagaccagcctgggcaacacaagaccctgtctctacaaataatttttaaaaattagccaggcatggtagcacacacgtgtggtcccagctactcaagaggtggaggcaggaagatcacttgagcctgggatgtcaaggctgcagtgagctgtgattgtgccaccacactcccacactccagcctgggtaacagtgagaccatgtctag

SEQ ID NO: 14890 - DNA, 4727 bp, Homo sapiens
gctgttccagtgggtcgtggcggtggcggcagcggcggttaggggatgtaacggtcgcccgcctccggcgtgacgatggcggccgtagggtccggaggctatgcgcggaacgatgcaggggagaagctgccctctgtcatggcgggagttccggcgcggaggggccagtcctccccgccccccgccccaccaatctgcctacggcggcggacgcgactctcgacggcctccgaggagacggtgcagaaccgggtgtcactcgagaaggtgcttggcatcacagcccagaacagcagtggcctaacctgtgaccccggcacaggccatgtggcctacctggcaggctgtgtggtggtgattttggaccccaaggagaacaagcagcagcacatctttaacaccgccaggaagtctctcagtgctctggccttctcccctgatgggaagtacatagtgacaggggagaatgggcataggcctgctgtgcgcatctgggatgtggaggagaagaatcaggtggcggagatgctaggccacaagtatggtgtggcgtgtgtggccttctcacccaatatgaagcacatcgtgtccatgggctaccaacatgacatggtgctcaacgtctgggactggaagaaagacatcgtagtggcctccaacaaggtatcttgtagagtcattgccctctccttctcagaggacagcagctattttgtcactgttgggaaccgccatgtgaggttctggttcttggaagtctccactgagacaaaggtgacgagcacagtgccccttgtagggcgctcgggcatcctgggcgagctgcacaacaacatcttctgtggtgtggcctgcggtcggggccggatggcgggcagtaccttctgtgtgtcctactcgggcctcctctgccagttcaatgagaagagggtgctggagaagtggatcaacctgaaggtctccctgtcttcctgcctctgtgtcagccaggagctcatcttctgtggctgcacagatgggatagtccgcatcttccaggcccatagcctgcactacctcgccaacctgcccaagccacactaccttggggtagacgtggcacagggcctggagcccagcttcctcttccacaggaaggcggaagcagtctacccagatacagtggcactgaccttcgaccccatccaccagtggctgtcctgcgtgtataaggaccacagcatctacatctgggatgtcaaggacatcaacagagtgggcaaggtgtggtcagagctcttccacagctcctacgtttggaacgtggaggtgtatcctgagtttgaagaccagagagcttgtttgccatcaggatcctttctgacttgttcttcagacaacaccattcgcttctggaacttggacagcagccctgattctcactggcagaaaaacatcttcagcaataccctgctgaaggtcgtgtacgtggagaatgacatccagcacctgcaggacatgtcacacttcccagaccgggggagcgagaatgggacacccatggacgtgaaagccggggtgcgggtcatgcaggtcagtcctgacggccagcatttggcttcaggcgaccgaagtggaaatctgaggatccacgagctgcacttcatggacgagctggtcaaggtggaggcccatgatgctgaggtgctgtgcctggagtactccaagccagagacggggctgaccttgctggcctcagccagtcgggaccggctgatccatgtgctgaacgtggagaagaactacaacctggagcagacgctggatgaccactcctcctccatcaccgccatcaagttcgctggcaacagagacatccagatgatcagctgtggggctgacaagagcatctactttcgcagtgcccagcagggttcggatggactacactttgtccgtacccaccacgtagcagagaaaaccaccttgtatgacatggacattgacatcacccagaagtacgtggccgtggcctgccaggaccgcaatgtgagagtctacaacactgtgaacgggaagcagaagaagtgctacaagggctcccagggtgacgaagggtccttgctgaaggtccatgtggacccctcaggcaccttcctggccaccagctgctctgacaaaagcatctcagtgattgacttttactcgggcgagtgcattgccaagatgtttggccattcagaaattattaccagcatgaagttcacctatgactgtcatcacttgatcacagtatctggagacagctgcgtgttcatctggcacctgggcccggagatcaccaactgcatgaagcagcacttgctggagattgaccaccggcagcagcagcagcacacaaatgacaagaagcggagtggccaccccaggcaggatacgtatgtgtccacacctagtgagattcactccctgagccctggagagcaaacagaggatgatctggaggaagagtgtgagccagaagagatgctgaagacaccatccaaagatagcttggatccagatcctcgttgcctgctaaccaacggcaagctgccactgtgggcaaagcggctgctaggggacgatgatgtggcagatggcttggccttccacgccaagcgcagctaccagccccacggccgctgggcagagcgggccggccaagagcccctcaagaccatcctggatgcccaggacctggattgctactttacccccatgaagcccgagagtctggagaactccattctggattcactggagccacagagcctggccagcctgctgagtgagtcagagagtccccaggaagctggccgcgggcacccctccttcctgccccagcagaaggaatcatctgaggccagtgagctcatcctctactctctggaggcagaagtgacagtcacagggacagacagccagtattgcaggaaggaggtggaggccgggcctggagaccagcagggcgactcctacctcagggtgtcctccgacagcccaaaggaccagagcccgcctgaggactcgggggagtcagaggccgacctggagtgcagcttcgcagccatccactccccagctccgcctcctgaccctgcccctcggtttgccacgtcgctgccccatttcccaggatgcgcaggtcccacagaagatgagctgtccctgcccgagggacccagcgtccccagcagctccctaccccagactccggagcaggagaagttcctccgccaccactttgagacactgactgagtccccctgcagagagctcttccccgcagctctgggagacgtggaggcctctgaagctgaagaccacttcttcaacccacgcctgagtatctccacgcagttcctctcaagcctccagaaggcatccaggttcacccataccttccctccccgggcaacccagtgccttgtgaagtctccagaggtcaagctcatggaccgaggcggaagccagcccagagcaggtactggctacgcctccccagacaggacccacgtcctcgctgcagggaaggctgaagagaccctggaggcctggcgcccaccacctccctgccttacgagcctggcgtcctgtgtccctgcttcctccgtgctgcccacagacaggaatctcccaacgcccacatctgcacccaccccaggcctggctcagggtgtccatgccccctccacctgttcctacatggaggccactgccagctcccgtgccaggatatcacgcagcatctccctcggtgacagtgagggccctatcgtggccacactggcccagcccctccgtaggccatcgtccgttggggagctggcctccttgggccaggagcttcaggccatcaccaccgcgacaacacccagtttggacagtgagggccaagagcctgccctgcgttcctggggcaaccacgaggcccgggccaacctgagactgaccctgtcaagtgcctgtgatgggctcctgcagccccccgtggatacccagcctggcgtcaccgtccctgcagtgagcttcccagcccctagccctgtggaagagagcgccctgaggctccacggctctgcctttcgcccaagtctcccagctcctgagtcccctggccttcctgcccaccccagtaacccccagcttccagaggcccggcctggcatccctggcggcactgcctccctcctggagcccacctccggtgcacttggtctgttacagggcagccctgcccgctggagtgagccctgggtgccggttgaagccctgcccccatctccccttgagctgagcagggtggggaacatcttgcacaggctgcagaccaccttccaagaagccctcgacctttaccgtgtgttggtctccagtggccaggtggacaccgggcagcagcaggcacggactgagctggtctccaccttcctgtggatccacagccagctggaggctgaatgcctggtggggactagtgtggccccagcccaggctctgcccagcccaggacccccgtccccaccgacgctgtaccccctggccagcccagacctgcaggccctgctggaacactactcggagctgctggtgcaggccgtgcggaggaaggcacgggggcactgagggcgcagcccctccaccgcagccctgctgcttctgaggacttaggtattttaagcgaataaactgacagctttgaggaa

SEQ ID NO: 14891 - DNA, 16573 bp, Homo sapiens
ggaggctatgcgcggaacgatgcaggggagaagctgccctctgtcatggcgggagttccggcgcggaggggccagtcctccccgccccccgccccaccaatctgcctacggcggcggacgcgactctcgacggcctccgaggagacggtgcagaaccgggtgagaagctgctcgccatgtctaccccagttccaggcttcctaggtttcccctagtcccgtcctgagaactgtggccccgacatcagcccccggccagtcccctcaggttgttccctgccatgcctcgtcccctaacccccgcccctttagccacggcccctcccactttctcctcgctgctttcccggctccaccctcagcgttggagcaattcgggggttcctcgctggttcccacccgtggaaatgcattttgcttctgtaaatcacagcctagtcctgctatattttaacccccgttctatcgcctttagacgtcacgatcatagctcactgcagcctcactgccctggcccccgctgagtcattaaggtcccttcgagggttcggtccagagtgttacctgccccaactcttcctcgcttctaccccgccttctctcaccttctgcgatctctatcctttttcctcaccaaggtgggattcttaatccatattgtcactcaaaactatgagaaagacgtgagaagttatttataaaatctctgcagtgctgcctggggaggagggcgtacagaacagttccctaaatcctgagacagaaaaatggaaagaaatgatttcacagtaggtagaaggaattccattagcacagcggcaattaaaaaaattgttttccagctgtgtaggcacaaaatctgtttttataaaatggagatgataagaaccatactactggtagggcgcggtagctcacgtctgtaatcccagcactttgggaggccaaggtgggctgttcacctgagatcagttcaagaccagcctggccaacatggtgaaacccgtctctacaaaaagtagaaaaattagcccggcatgctagcgcgcgcctgtaatcccagctactcaggaggctgaggcgggagaaatcgcttgaacctgggaggcggaggttgcagtgagctgaggtcatgccactgcactccagcctgggcgacagagtgagactctgtctcaaaataaataaataaataaattatactattgcattggagggaaatgaaattttaattgtgatcttcttggcacggagtccagataaagggaggatacctggtagctgctggtggagcttgttcctgccccatgactttctcctgcactgtgattataccgcccactcctggctacagggctctggctgtacctcccatgtgctctctgtcaccaaggttcagtcacactggcctgcttttggttttcctgaggctccatattcttttctgcctcctggcctttgtgattggtgagtcctcagcctgggctttttgctgcaatctgcctgtctggctccttcccatccttcaagtctcagcctgaatgtcgctatcttgaaaggccttctcgaaccccattctaaagcaaacagccaccttcatctgtcacccagcaccctatacttcatagcctttatcttatatgttcctgaaagtgccctttgagctattaaactacatataacaatagcaaattcagagaggcgttatagcaaagtggctaagagcacagactgctgctgatggtatggttggacccaggcagcctgagcttaaactttagtcctgttcttcctggcaggttatgaacttcgctttttcttttctttttttttttttttgagatggggtcttactctgtcatccaggctgtagtgcactgggttgatctcggctcactgcagtctcagcctccctgggctcaggtgatcttcctgcctcaagcctcctgagtagctgggactgcaggcgcatgccaccatacctgactaatttttttgtgttttctggtagagacagggtctcgccgtgttggccaggctggtcttgaattactgagctcaagcgatctgcctgcctcggcctcccaaagtgctaggattacaggcgtgagctactgtgccccgccaagttatgaacttatctgtgcctcagttttcttatctgtaaaatgagaataatgatgtagaaatctctcatagggtatttgtgaggattcaatgaggttacatatcctaggcacttagaacaacactggcatatggcaagtactctattcatgttagctaatactgatattatgactgtgtatttggggtaatatttatttattttttttgtttggcagcacagagttgatctgtcttgcaaagacctagtctaaaagtgaccattcataccagggcccagtaatgctgatcgacagataagacaacatgagtgccatggcttggttgtttgtgttggaatcctggcactaccccttcctggatgggtaacccctcttggcctctgtttcctcaactgttttgttcctttttttttttgagacagagtctcactctgtcgcccaggatggagtgcaatggtgccatctcagctcactgcaacctccgcctcctgggttcaagcgattttactgcctcagcctcctgagtgcctgggattataggcatgggccaccacacctgactaatttttttgtatttttagtagagacagggtttcgccatcttggccaggatggtctcaaactcttgactgagccaccacacccagccttgtttaaattttaaatattactgttcatgtggttttttactcgttgaaaccgctcaaatttctggactgtgaatctgatgtggggaaactgtctacctttggtcactactgtgtctctcctgtacagcccaaagtgctagctttggagccagactgcctgggtttgtatatcaacattgccacttgcagatgtaggatcttgggcctcagacttcttacctgtaaaacaggggtgataatagagccttcttcgtggcttgttgggaggattcaagtcttttatacatataaaagtactaagaggccgggcacagtggctcatgcctgtaatcctagcactttgggaggccgaggcgggtgtatcacctgaggtcaggagttcgaggccagcctggccaacatggtgaaaccccatctctactaaaaatacaaaaattagccggacatggtggcatgtgcctgtaatcctagctactcaggaggctgaggcaggagaattgcttgaacctggaaggcggaggttgcaatgagccaagatctcaccactgactccagcctgggtgacagagcaagactccatctcaaaaacaaacaaaaaaaagtacttagaaacttattcacaggtcaccttctcaccgcggcattcgcccccttcccctgtgctcctaacctccttatctgctttcttctctcttgcacccatcattacttggcatctatttcacatatttgttctgctccttttctatgttctacatacccatcaccagtagaatgtgagccccccgagggcagggatttgtctcttcctcaccactctgtgcttttcacctagcgttgtatttgtcaaaggaatgttgagagaacaagtgttagctgctggtggatggcgtggccacagaagctcagtgtgggtgttgaatgtagcaggacctgaatgggtggccaaggcggctgcaccatgtggtgctggctagggtgggtgcctctgacttgggctttttctttgcaggtgtcactcgagaaggtgcttggcatcacagcccagaacagcagtggcctaacctgtgaccccggcacaggccatgtggcctacctggcagggtaagcagataagggcctcgacgtctaatcattgctagggaatttggagcttggaacctgaagccatccgtaaatcgctctgagcctcatatttttcacctgtagaatgtggagaatggggcctgcctctgagagctgtggagaggattccatagccccctctctgtctagaacagttcctggcatgtagtgagtgcaatgaaagcctttattatgactacaggggggaggtgacagcgattctgggaaagacaggtgattaaagtccacgctgtggtgtcaggtaacctggatttgtgtcccagctctgccatgtatgctgctctctgagcctcttcctctgcctctgtaaaacagagctggtgaccccctctgcttgcatagttgagaagactgaagaagatgctacagctgttcattccataaatactcatgtagcctggcactgtgctaaggacgtcccctctctgggtttgtttccttatctataaatgggcctaaatagtcgtgacctgacctggcagttgtgaggatttaaaacaattacatccctctttctctctttttgttttgttttgcttttttgagacagagtctggctgtgttgcccaggctagaatgcaatagtgtgaataacagctcactacagccccaacctcctgtgctcaagcgatcctcccatcttcacctcccatgtagctgggactacaggcacatgccaccacagccagctaattttttttagtggagatgagatctcactctgtcgcccaggctggtctaaaactcctgagctcaagtgatccctcctgccccatactcccaaagtgctgggattatagccagcttaaggtcttaattagcctagggcctgacagacattacctcagaggaagtgttggtttctatttaagaacatagcaatgttaaagtgccctagaattctcagcgtaaacacctggaggagggggaggaggaggagaccagagagaaccgagggagcttgtttatttgtgggcttttctggtgggaatagaatcatcccaggaccccaacactccccacagttgaggcacattttcctctttcttcccagctgtgtggtggtgattttggaccccaaggagaacaagcagcagcacatctttaacaccgccaggtaggctgaggcctgggcccggggcaggggtggaaccaggggcttggcacgcctcccctcccctacacagcctggagatactcatgggtaggtgctcactcattcacttacatgttggctcagcagcattcgcctgtgctgggtgctgttccgtgtgctggggacacagcagtgaccagaggagacgagaatctctgctggctagagcgagacagactgtaaactagtcagcaaattacgggctgatcatgatcagtgctatggaggaaatgatggaggatgtcttcgggcaggtttgtgggcagagaataggaggaaagccttatcagaaggctcagggaacgctgccttgactctgagacctgaaggaagcgagagggtgacccataagaagctgtagggagagcgcttcaggcagggggcacaggaagggcaaaggccctgcagtggttaagaatctccggcgctttagaagcagccagggatctgggtgcctggagaaaggagcagggaagatgaggctggaccaggcagaagccacatcccgtaggccttgcagccttgtagagggtctgcatagcatgctgagtgcagagagcagccacaggagggcaccacaggccaggaatgtgcttttcacccccagccctccagcagctctattccctgctttgcttttctccacaaaatttgctcccatctctgatatgctgtccagtttcctcattgatggtattcactgtgggtctccctcagtgtgagcactcttgagagcagggactttctctgagttcatttctgtgtccctagcaccaaagagcagtatctggcatattgatggctattttctaagagaaagacttaacatgatttgggttttagaaagatcccttcagctataagtttactggggaaggacccgctcctctgccttggggctaactgatcactgctaccctggggatgtggtcccaatagggctgtgacctttggaaggcacaccatgtccctccttggcatagctcaggctcagctcctttggcccagttctccaggtggatggataaggagtgggttttctcctgcccttatggtccctaaggtacggtccttaagctacggcaggttcttgttatctgacagaagtgcattccctcttgaaagtggctttttggaccttttgctcctaactgtgggttctgttactggtgataagggcagagctgggttccattcctggctcaagcgtctattcactgtggaatctcaggtgagacacttctttcagagccttggtctcctctgaaaataaaatagctgcctccaactgggagagcattcataaggcagcagctacaaaccagagtcacacacacttgcccaatatagtatgttttaaaggttggataagtggacaacatttcaagttttttaacacaaaaatccaaatgtcccttttgtttggagaagtgagaaattctctggcctctggggcccaaattcccctgtggcagtgaggggctgagcttagtgaaatttgtcaggcccgttgtggccagttcctcacacctgtgttgcctccctaatccctgtaggcagtggagtgggtggcctggatctatagtagatggtatgcaggtgtccgcccttggccaccagtgggtgtgcattaggaggtggtgtggccagtgtggggattttcactccaactgcatatcagaatcacctggtccctgtgcctcaccgcccccccaccgccacgcaagagaaagccaaatcagttgatctgggatgaaacttgggcattggcaattttgagactttttatattgaaataatttcagacttagaatagtacaaagagctcctatatacctatgtacctttcacatatttcacaaatgttagcttttttttcttttttttttttggacacagagtcttgctctgtcacccaggctgctggagtgcagtggcacagtctcagctcactgcaacttccacctcccgggttcaggtgattctcatgcctcagccccccaggtggctgggaccacaggcatgtgccaccatgcccagctagttttttgtgttttagtggagacggggttcatcatgttgcccaaggtggtcttgaactcctgagcttagacagtctgcctgcctcagcctcccaaagtgctaggattacaggtgcgagccactgcacttggccaaatgttagcattttaccacatttgctttatcattttttgtctatatacatattaatttgttctgaactatttgagaatcagttgtagacatgatgcccctatatctctaaatacttcacgccaggcatggtgattcacgcctgtaatctcagcactgtgggaggccttggaggcaggaagatcatttgaggtcaggagtttgagaccagcctggggaacatggcaaaaccctgtctctactaaaaatacaaaaattagccaggcctggtggcaggcgcctgtaatcccagctactcgggaggctgaggcaggagaatcgcttgaacccgggaggcagaggttgcagtgagccaagatcatgccactgcactccagcctgggtgacagagcaagagtccgtctcaaaaaaaaaaaaaaaaaaaaaaaaaacttaatcaaataaatacttcagtgtgtatttcctacaaaaaaaaatgacaatctttttaaactgtaatacatccagcaaaatcaggaaatgaaaattgatatatcactctcatccactccccagagggcaccattcaggagtcagcctttgtcccatgaatgtcctttatggccaaaggattctgtctagaatcacacattgcattgagttgtcccctcagtctctttcaggctgacgtggctcctctgtcttttcttgactttcaggatcttgacatttttttttttctttttgagatggagtctctgtcgtcaggctggagtgcagtggtgggatcctggctcactgcaacctgactccccagttcaagtgattctcctgcctcagcctcccgagtagctaggattacaggcatatgccaccatgtccggctaatttttgtatttttagtagagctggggtttccccatgttggccaggatggtctcgatctcctgaccttgtgatccgcccgccttggcctcccaaagtgctgggattacaggcgtgagccacagcacctggccacttttttttgtttttttgttttttgagacgaagtctcacactgtcgcccgggctggagtgcagtggggcgatcttggctcgctgcagcctccacctcctgggttcaagcgattctctgcctcagcctcctgagtagctgggactacaggcatgcgccaccgtgcctggctaatttttgtatttttttttagtagagacggggtttcactatgttggtcaggctggtcacgaactcctgacctcgtgatccacccgcctcggcctcccaaagtgctgggattacaggcttgagccactgcacccggccaatcttgacactgaggattgtagacgaggtattttgtagagtgtcccagcatttgggtttgtccaatgcctcctcacgggcagactcaggttctgcatctttggcaggaacagaccagaaggggtgctgtgttcttcctggtgcctcctctcaggaggtctcctatgactggtggtgttcactgggagcacttggccaaggtgttgcctgccagattcctccacttcaaagcctctcttttcacctttgtgattagcaggtatcctggggacatctttcctgagacagtgcaaatattatcttgttcctcaccaaactttcactcaactaatcttaggctttgacacttttcagatgctccccagggaaatctaatgtacagccaggactgagaactactggcttagaggtcagggctctgccctgtctggttaggtaactgcaggcaggggacttccttgtgttgcagtcacctcatctgccaagttggttcatgagagccctgactccatgaagcatgcttgaggaatcagtgcactgatggccagacagcatttgccagagggccaggcacaaggtcagggcatgcgacaggttagaggtggctacgggcaacagaaacccctccacagcatggcttaaaacccaagagcatgctcttcctgcatgtcataagtccagaggtgggcagcccaggggctgtgtctctgaacgccacattttttttttctgtctctctttttgagacagagtctcactctgttgcccaggctggagtgcagtggcgcgatcttggctcactgcaagctccgcctcctgggttcacaccattctcctgcctcagcctcccaagtagctgggactacaggcgcccaccaccacgcctggctaattttgtttttgtatttttagtatagacagggtttcaccgtgttagccagggtggtctcgatctcctgaccttgtgatctgcccacctcagcctcccaaagtgctgggattacaggcgtgagccaccgcgcccagccccacttctttttttctctagacggagtcttggtctgttgcccaggctggagtgcagcagcacgatcttggcttgctgcaacctctgcctcccgggttcaagcaattctcctgcctcagcctcccgagtagccgggattacaggctcctgccaccacacctggctattttttgtatttttagtagaggtggggttttgtcgtgttggccaggctgttcgcgaattcctgacctcaagtgaaccacccacccctctgcctcccaaagtgctgggattacaggcgtgaggcaccgcacccggcccccattccttctctcctgttccaccccatttattgtgaggcttctggtcttgaagtcacttcatggcccaagatggagttctggctgtcgtgtgcgtatttcaggaggggaactggtaggaagcagggcaaagggttccctttgacgagtatttcaggaagtcccacacagcatgtcagtttacttctccttggccagactaagtcatgtagctgtacctgcatagttgcaagcataaaactggggttatgtcagtaaggaaagagaggcgagtggatatccaggaggcagcttgccctgtttgttgcagtaaggagccacgggaagcctgggaagcaggttgacttgatgatgaatattccatgaagttgccaaagtctcacttagcgacatttacttagttatctacacaccaatttaccatctcacgtagggagacaattattagattgttaaggaacaaaggtaaaaataagattaaaagagagaagggagtagaaggaaaccatacaatctgggaacagtgaatcttgctgccagaaacctacgagctagcctgttcattcagtgcttgtgcaggctagctaggagtatcagaaacattttggctctttatggattttccagaacaccttgagtatttagcagtggagcacaggctgcaggctaccttgatgtgatgcctgccaggatcctcccatcagcaccacccgtttagttaggccaggcctgtaccatttcctgcatctctatttctcagtgttacagggtggatagggtcttaggatacccactgcggcagagggagaagaaagcagggtccgcatacagtgtctactccatttgggtttggtgtctcagggcggaaggggcctttgcatttacccccatttctctgtgtgctttgctgggcacaccagcggcactggctctgtgggagctgcttgagctcacctctgctggcctcttccgaggcttgggaggcagaagagggcagagtcctatcagagtcgccaggatggggtctggctggccaccctcagcggaaccagtgatcagctcttttctttatccccaggaagtctctcagtgctctggccttctcccctgatgggaagtacatagtgacaggggaggtgagtcgtgatcgtgactgagtgggagtcgggggctggggggtcttggaagccattccttctgctcccggcaggcctgggagtccctggaatagctccttcctgggccagaacagccctgtagcagatgggggaggtggcttttgggcacatcctgtggcaatgccatcttcggccttgacaaccctctagccctgcccagtacagagcccagcagcagtaacgaccccaccttccctagaatgggcataggcctgctgtgcgcatctgggatgtggaggagaagaatcaggtggcggagatgctaggccacaagtatggtgtggcgtgtgtggccttctcacccaatatgaagcacatcgtgtccatgggctaccaacatgacatggtgctcaacgtctgggactggaaggtaagagccgaccagcaggcctgtggcaggcagccagctgccacagcatcctatgtcttgggcacagggagagctacatgagaggacgcagtaaagtgctcactcacccaacagataacagctattgagcacctgtgacatgctgatcccttattgtagggcacaaggcaggctcccagctagaagcattatacatatttttatattgaccagctgtgaccttaggcaagtgacttaacatctctgtgagtctgtttcctcctctgttagatggatatagtagtacttatcttgttgagttgtgagactttaatgagttgataagcactggaaggctgggctttggaacagctgtggagctggcagaagtgggtaccaagtcctggctctgcccataacccactatgtgaccttgagcacatgacatctccccctctgagcctggtagggttggggagaagcgcctccctcgtggggcttttgagggattgaggaaatttcatgggttatcctgtgaagggctcagggcagggcccagagcaggagccccatctgtgacagccataggttgtgttgtccttacatcccagccgtgactgtccccaataccatgtgtgggctgcagagcttagacccttggagagagctctggaacatactgtcccatggggaccattccaagcctctgtcccttcctctgtcggtgaggaatgagcagggtgccccacataggtttccccatacagcagctccctggagggtcccaggaagacagacttggagtggggacgagcagggagttccagcctgagggcaaaggcacaaacagtccagtggaatgagtgctggcatgagcttctctgcacttattcttccagaaagacatcgtagtggcctccaacaaggtatcttgtagagtcattgccctctccttctcagaggacagcagctattttgtcactgttgggaaccgccatgtgaggttctggttcttggaagtctccactgagacaaaggtgagtttctgtccctgcccctttagccaggccctgagggagtcaccatcggtggcagcatggtctcctgtttctccctgagatttgagggcagcggtctcgggccatttggcctctcaggggcccagctgctgcttctgggcctactctcagggtgctgatgcacaggccctgccaggaaccccctgaccctgggaccagctctcattcttggactgctgctgtccagcccctctgtccagagtggcagggttctagtgttttcttcccttctccatttggaagagcttcttagagttctcctgttttgttgtgtcctatcatctggtcatgcagggcccagctgtgtggacaagtatctcactacgccctctgtgtctccaggtgacgagcacagtgccccttgtagggcgctcgggcatcctgggcgagctgcacaacaacatcttctgtggtgtggcctgcggtcggggccggatggcgggcagtaccttctgtgtgtcctactcgggcctcctctgccagttcaatgagaagagggtgctggagaagtggatcaacctgaaggtaccacctccctctctgccatcagctggacagactctttctcgtgatatgtgtctgcaggggtgctcatcagcattgaccacacaggttctgcttatgtgactagtggtgaatgacgcccactctctgagcttaaggttccacatctgtaaaatgggagtactgctgccctccccgcagagctgataaggaagtcacgtgagataacataggcaaggcagtgagcacggtgcttggtaccctgaaatgggctcaaggtgacagttgttttcccatgactatttgatctacttcacatttcttttctcctttgagcactctggctggtagaggattgcatttttttttaattaatttatttttttttattgatcattcttgggtgtttctcccagagggggtttggcagggtcttaggacaatagtggagggaaggtcagcagacaaacaagtgaacaaaggtctctggttttcctaggcagaggaccctgcgggcttccgcagtgtttgtgtccctgggtacttgagattagggagtggtgatgactcttaacgagtctgctgccttcaagcatctgtttaacaaagcacatcttgcaccgcccttaatgcatttaaccctgaatggacacagcacatgtttcagagagcacagggttgggggtaaggtcatagatcaacagcatcccaaggcagaagaatttttcttagtacagaacaaaatgaagtctcccatgtctacttctttctacacagacacagcaacaatctgatttctctatcttttccccacctttcccccttttctattccacaaaaccgccatcgtcatcatggcccgttctcaatgagctgttgggtacacctcccagacggggtggtggccgggcagaggggctcctcacttcccagaaggggcggccgggcagaggcaccccccatctcccggacggggcggcggcagggcggaggcggacccccacctccctccctgacgggccggctggctgggcaggggctgacccccacctccctcctggacggggcggctggccgggcgggggctaaccccccacctccctcccggacggagcggctggccgggcgggggctgactccccccacctccctcccggactgggcggctggccgggcgggggctgacccccacctccctccgggacggggcggctgctgggcggagacgctcctcacttcccagacggggcagctgccgggcggaggggctcctcacttctcagacggggcggctgccgggcggaggggctcctcacttctcagatgggacggccaggcagagacgctcctcacctcccagacagggtcgcggccgggtagaggcgctcctcacatcccagacggggtggcggggcagaggcgctccccgcatctcagacgatgggcggccgggcagagacgctcctcactttctagacggaatggcagccgggaagaggcgctcctcacttcccagattgggcagccgagcagaggggctcctcacatcccagacgatgggcggccaggcagagacgctcctcacttcccagacggggtggcggccgggcagaggctgcaatctcggcactttgggaggccaaggcaggcggctgggaggtggaggttgtagctagccaagatcgcgccactgcactccagcctgggaaacattgagcactgagtaaacgagactccgtctgcaatcccggcacctcgggaggccgaggctggcggaccactcgcggttaggagctggagaccagcccggccaacacagcgaaaccctgtgtttggtggagaccaaaaaaatacgaaaaccagtcaggcgtggcggcgcgcgcctgcaatcgcaggcactcggcaggctgaggcaggagaatcaggcagggaggttgcagtgagccgagagggcagcagtacagtccagctttggctcggcatcagagggagaccgtggaaagagagggagagggagaccgtggggagagggagagggagaccgtggggagaaggagagggagaggaggattgcattttttaaaaattggaggtaccattgatttaataacttttcagtcaaaaaagactacacaaaatacataaacttttatttatttttatttatttttactttttttttttttttgagatggcgtctcacttgttgccaaggctggagtgcagtggcgcaatctcagctcactacaagttccacctcccaggttcaagcaattctcctgcctcagcctcccaagtagctgggattacaggtgcctgccaccacgcacagctaatttttgtatttttagtagagacagggttttaccatgttggcctggctggtctcgaactcctgacctttagtgatccatccgtcttggcctcccactgcgcccggccataaacttttaaactaaagcatgatctatcgatacattgcagagcttctttcctttagtatctgaaggtttgagtcaaagctgttttcccatctggaatcagttgcccatttggctatccgcccgagcgttgtggtttcctctcctgttcctggcctgcctttgtgactcactctggagatcaccttcgaggttaatggcttgtggaagagttccaagttttatctctgtcctagttggttaaacatcattttctctttttcaagcaagtgaaaagctttcaatagatagatgtttatttcctaagcactaaatgactcataaattaagtccctgtagatttggaaaaactccttaaactgtatctagaggtctagcacttcctagtaggatagacagtcctttctagatactgtaacttttttctgtaccgctttggagtacagtctttatgaagttgtttgtaagcaaaagggaataaaatttaagcctaaaggctgggcgcgatggctcacatctgtaatcccaatgctttgggaggccaaggcaggtggatcacctgaggtcaggagttcaagaccagcctgaccaacatggtgaaaccccatctcaaaatacaaaaaattatctgggtgtggtggcggccgcctataatcccagctactctggaggccgaggcaggagaatcacttgaacccaggaggtggaagttgcagtgagccgagattgtgccattgcactccagcctgggcgcaacaaaaaactctatctcaaaaaaaaaaaaaaatttaagcctaaaattcaaccctgttactacaagtgacttacctgaagttgcagtctgctgaacaggtattttccatacacagctacgtttctctgtagacagcagtgacaattctgtttccgttcatgcctctgcctacctgctggcacatgtctttcaatagcagcagtatgctatatcctgatttcacaaatcttaaaatatgctaaaatgggtgtcttagacccaaggaactgtaagtcttctctggaggcctaaggctgctctgtcagtccccatatccccgggccaggccacgtgaagcaccaaatccactggggtcccttttgcccctacaggtctccc

SEQ ID NO: 14892 - DNA, 955 bp, Homo sapiens
ggaggctatgcgcggaacgatgcaggggagaagctgccctctgtcatggcgggagttccggcgcggaggggccagtcctccccgccccccgccccaccaatctgcctacggcggcggacgcgactctcgacggcctccgaggagacggtgcagaaccgggtgtcactcgagaaggtgcttggcatcacagcccagaacagcagtggcctaacctgtgaccccggcacaggccatgtggcctacctggcaggaatgtggagaatggggcctgcctctgagagctgtggagaggattccatagccccctctctgtctagaacagttcctggcatgtactgtgtggtggtgattttggaccccaaggagaacaagcagcagcacatctttaacaccgccaggaagtctctcagtgctctggccttctcccctgatgggaagtacatagtgacaggggagaatgggcataggcctgctgtgcgcatctgggatgtggaggagaagaatcaggtggcggagatgctaggccacaagtatggtgtggcgtgtgtggccttctcacccaatatgaagcacatcgtgtccatgggctaccaacatgacatggtgctcaacgtctgggactggaagaaagacatcgtagtggcctccaacaaggtatcttgtagagtcattgccctctccttctcagaggacagcagctattttgtcactgttgggaaccgccatgtgaggttctggttcttggaagtctccactgagacaaaggtgacgagcacagtgccccttgtagggcgctcgggcatcctgggcgagctgcacaacaacatcttctgtggtgtggcctgcggtcggggccggatggcgggcagtaccttctgtgtgtcctactcgggcctcctctgccagttcaatgagaagagggtgctggagaagtggatcaacctgaaggtctccc

SEQ ID NO: 14893 - DNA, 5971 bp, Homo sapiens
ggcgtgacgatggcggccgtagggtccggaggctatgcgcggaacgatgcaggggagaagctgccctctgtcatggcgggagttccggcgcggaggggccagtcctccccgccccccgccccaccaatctgcctacggcggcggacgcgactctcgacggcctccgaggagacggtgcagaaccgggtgtcactcgagaaggtgcttggcatcacagcccagaacagcagtggcctaacctgtgaccccggcacaggccatgtggcctacctggcaggctgtgtggtggtgattttggaccccaaggagaacaagcagcagcacatctttaacaccgccaggaagtctctcagtgctctggccttctcccctgatgggaagtacatagtgacaggggagaatgggcataggcctgctgtgcgcatctgggatgtggaggagaagaatcaggtggcggagatgctaggccacaagtatggtgtggcgtgtgtggccttctcacccaatatgaagcacatcgtgtccatgggctaccaacatgacatggtgctcaacgtctgggactggaagaaagacatcgtagtggcctccaacaaggtatcttgtagagtcattgccctctccttctcagaggacagcagctattttgtcactgttgggaaccgccatgtgaggttctggttcttggaagtctccactgagacaaaggtgacgagcacagtgccccttgtagggcgctcgggcatcctgggcgagctgcacaacaacatcttctgtggtgtggcctgcggtcggggccggatggcgggcagtaccttctgtgtgtcctactcgggcctcctctgccagttcaatgagaagagggtgctggagaagtggatcaacctgaaggtctccctgtcttcctgcctctgtgtcagccaggagctcatcttctgtggctgcacagatgggatagtccgcatcttccaggcccatagcctgcactacctcgccaacctgcccaagccacactaccttggggtagacgtggcacagggcctggagcccagcttcctcttccacaggaaggcggaagcagtctacccagatacagtggcactgaccttcgaccccatccaccagtggctgtcctgcgtgtataaggaccacagcatctacatctgggatgtcaaggacatcaacagagtgggcaaggtgtggtcagagctcttccacagctcctacgtttggaacgtggaggtgtatcctgagtttgaagaccagagagcttgtttgccatcaggatcctttctgacttgttcttcagacaacaccattcgcttctggaacttggacagcagccctgattctcactggcagaaaaacatcttcagcaatttggctcctgctctgcagatgtgtggacgtggccactcccggcagcccaacacacccagcccaggtgaaattgcttcctaagtcttgagatggaattccctgggagagcacctgatgagccagcccattcagctgccacacaaccctgctgaaggtcgtgtacgtggagaatgacatccagcacctgcaggacatgtcacacttcccagaccgggggagcgagaatgggacacccatggacgtgaaagccggggtgcgggtcatgcaggtcagtcctgacggccagcatttggcttcaggcgaccgaagtggaaatctgaggatccacgagctgcacttcatggacgagctggtcaaggtggaggcccatgatgctgaggtgctgtgcctggagtactccaagccagagacggggctgaccttgctggcctcagccagtcgggaccggctgatccatgtgctgaacgtggagaagaactacaacctggagcagacgctggatgaccactcctcctccatcaccgccatcaagttcgctggcaacagagacatccagatgatcagctgtggggctgacaagagcatctactttcgcagtgcccagcagggttcggatggactacactttgtccgtacccaccacgtagcagagaaaaccaccttgtatgacatggacattgacatcacccagaagtacgtggccgtggcctgccaggaccgcaatgtgagagtctacaacactgtgaacgggaagcagaagaagtgctacaagggctcccagggtgacgaagggtccttgctgaaggtccatgtggacccctcaggcaccttcctggccaccagctgctctgacaaaagcatctcagtgattgacttttactcgggcgagtgcattgccaagatgtttggccattcagaaattattaccagcatgaagttcacctatgactgtcatcacttgatcacagtatctggagacagctgcgtgttcatctggcacctgggcccggagatcaccaactgcatgaagcagcacttgctggagattgaccaccggcagcagcagcagcacacaaatgacaagaagcggagtggccaccccaggcaggatacgtatgtgtccacacctagtgagattcactccctgagccctggagagcaaacagaggatgatctggaggaagagtgtgagccagaagagatgctgaagacaccatccaaagatagcttggatccagatcctcgttgcctgctaaccaacggcaagctgccactgtgggcaaagcggctgctaggggacgatgatgtggcagatggcttggccttccacgccaagcgcagctaccagccccacggccgctgggcagagcgggccggccaagagcccctcaagaccatcctggatgcccaggacctggattgctactttacccccatgaagcccgagagtctggagaactccattctggattcactggagccacagagcctggccagcctgctgagtgagtcagagagtccccaggaagctggccgcgggcacccctccttcctgccccagcagaaggaatcatctgaggccagtgagctcatcctctactctctggaggcagaagtgacagtcacagggacagacagccagtattgcaggaaggaggtggaggccgggcctggagaccagcagggcgactcctacctcagggtgtcctccgacagcccaaaggaccagagcccgcctgagggtgagtgcagggcaggcagggaccctgtgacagtctgtgcgttcagccaagcccctttctgggcaccgatggtgactttgacccagtactgaagctcagagtctgtcgaggaagacacatgtggtccctgctgctgcctgaggattctgggcccagctgcctacagctgagagcccagctctgccacctccttgatgtggaacttcccttattcataaaatggggggcagctgctcttaccatccctcctccagatggggaaactgagcccagggaagggtagccctggccctggctcaccagaatggtcaggctgtgggctcctgaccccgactctgtccttcagactcgggggagtcagaggccgacctggagtgcagcttcgcagccatccactccccagctccgcctcctgaccctgcccctcggtttgccacgtcgctgccccatttcccaggtaagcaggggccagacacgcaggggactcgctgctcgggcctggcttagggccagtcacaatgtctaagcacaggccctgcacttggagcccactgagcctggaagacggggatccctgcttctcagcctgcgggcaacagggcagggatgggtggggcccgctttctccatttcaggtggcgtctgctgtgactcatggtgttggctcctcttgtccctcccctccttccctgtcaggatgcgcaggtcccacagaagatgagctgtccctgcccgagggacccagcgtccccagcagctccctaccccagactccggagcaggagaagttcctccgccaccactttgagacactgactgagtccccctgcagaggtagggccctgcctcacccacacctgccgaggccgtctgtgcagcctgggcacagcattggcgtccctggagttggctccccagcagggccaggagggtgagtggagagcaactgcttcgttttttttgagacggagtctcgctctgttgccaggctggagtgcggtggcccaatcttggctcactgcaacctccgactccctggttcaagcaattctcctgcctcagcctcctgagtagctgggattataggcatccacaaccacgccctgctaattttttgtatttttagtagagatgaggtttcaccatgttggccagactggtctcaaactcctgcctcagatgatctgcccgccttggcctcccaaagtgctgggattacaggcgtgagccaccgtgcccggcccactgcttcactcttgacctgagcctcacgatgcctcctcacccactgcccctgctcgtaccctgtgtctgtacataagggtttctggggagtgccccgctgggctgtgggctggcctagggccagggctgctcggcgggaagggttatgagggtcccctcgggatcttcccctagagctcttccccgcagctctgggagacgtggaggcctctgaagctgaagaccacttcttcaacccacgcctgagtatctccacgcagttcctctcaagcctccagaaggcatccaggttcacccataccttccctccccgggcaacccagtgccttgtgaagtctccagaggtcaagctcatggaccgaggcggaagccagcccagagcaggtactggctacgcctccccagacaggacccacgtcctcgctgcagggaaggctgaagagaccctggaggcctggcgcccaccacctccctgccttacgagcctggcgtcctgtgtccctgcttcctccgtgctgcccacagacaggaatctcccaacgcccacatctgcacccaccccaggcctggctcagggtgtccatgccccctccacctgttcctacatggaggccactgccagctcccgtgccaggatatcacgcagcatctccctcggtgacagtgagggccctatcgtggccacactggcccagcccctccgtaggccatcgtccgttggggagctggcctccttgggccaggagcttcaggccatcaccaccgcgacaacacccagtttggacagtgagggccaagagcctgccctgcgttcctggggcaaccacgaggcccgggccaacctgagactgaccctgtcaagtgcctgtgatgggctcctgcagccccccgtggatacccagcctggcgtcaccgtccctgcagtgagcttcccagcccctagccctgtggaagagagcgccctgaggctccacggctctgcctttcgcccaagtctcccagctcctgagtcccctggccttcctgcccaccccagtaacccccagcttccagaggcccggcctggcatccctggcggcactgcctccctcctggagcccacctccggtgcacttggtctgttacagggcagccctgcccgctggagtgagccctgggtgccggttgaagccctgcccccatctccccttgagctgagcagggtggggaacatcttgcacaggctgcagaccaccttccaagaagccctcgacctttaccgtgtgttggtctccagtggccaggtggacaccgggcagcagcaggcacggactgagctggtctccaccttcctgtggatccacagccagctggaggctgaatgcctggtggggactagtgtggccccagcccaggctctgcccagcccaggacccccgtccccaccgacgctgtaccccctggccagcccagacctgcaggccctgctggaacactactcggagctgctggtgcaggccgtgcggaggaaggcacgggggcactgagggcgcagcccctccaccgcagccctgctgcttctgaggacttaggtattttaagcgaataaactgacagctttgagg

SEQ ID NO: 14894 - DNA, 3812 bp, Homo sapiens
ctgcacagatgggatagtccgcatcttccaggcccatagcctgcactacctcgccaacctgcccaagccacactaccttggggtagacgtggcacagggcctggagcccaggtactgccctgtggggagagggaatgggaggggcccacccagagtctgtccactggcattcatccatgcttccagatccatctatctgtctgtccatcccacaaatacccatcatgactctcagccctgggcattacaaagcagaaaagtccttgccttccgaggcaagcctcacagtgagaagtgaggctgggtagggggaagaaacagtgagaaaacaaaggaataatatcatttcagatagcggtcagcatggtgaagaacagtgcagagcaggtgtgaatgtggcggagtgtttccatccacatggctgacccctactaagtggctgctaagtgccagccctgggctggaagcaggacatgcctattataatgaagcagcaaaatctctgcctctctgcagtatagcaagggggctcgatgataagcaagtacacgaaaaagataatttcaataggcatgagtgctttggggaacacagcagggactcgggaaggagagtgactggggtgggctgtgctgattgggtgcctggtgagaaggagctgctgtgtggagagctgggtcccagcagttgaggtgacagcacactgggcttgttacgttgcaggaatagtaagggactgtgtggccagagcccagtgtgtccggggaggatggtgggagatgaggccagtgtggggcgcctgtagtctatcctcaggtcagtgggcagttgctggggtttcgggcgttggggtaaatgaccaggccttacatgttaggtccctcagctgctgtgtcgagagtggatagaagcactaggctgtggctttcttctcctttgttgcaagtctgttttatggaattgggggctacctaaccagggggtgccaggtgcctagggctgcctctttgtggatttctggatgctagctcctgggtgccttttccacgacagggcctgaacaggggaactgggtgtcatgaaggaaaggagggggcgagcaacccacaggcagtgttgtgttgtagtagtcgggctcacagctctgctgtcttctgttgtgctctgtgaccttgggaaggtgactatacctccctgtgcttccgttttctcatgtgtaaaatacagtacctagctcttattgtggttgtgagaatttattgcaggtaaaactctcggcctggcacagtgtaaatgctcagtaaactgtagccttcatagggagaccccaggccaagggacagctccccagcctccttaggacacagaggctttttgatcatgcgttggtgaggccaagaagaggtgggacctgagatacatgcctattatctttctatgctcagagagagagcaggagcttgggttgggtgaaatgatgggcgataaatgttcataggaatcaaaaactcaattgctctcggggccaggcaaaaatttccggtttgtagcctctatatgaaaagcaaagcagaggaagagggaagagggaaaagtagaattggagcaggagagatggatggccacaaataccatgagggatggcattgccggggaggcatctccactgtcactagaggtggctgtcactactcagtgacattgatggtgattgattacccatgtggccttgttagcttcctcttccacaggaaggcggaagcagtctacccagatacagtggcactgaccttcgaccccatccaccagtggctgtcctgcgtgtataaggaccacagcatctacatctgggatgtcaaggacatcaacagagtgggcaaggtgtggtcagagctcttccacagctcctacgtttggaacgtggaggtgagccccccccccacccccttgcccctgcttggcctctgcacagttccccacagtttgggaacccattcagtaattccttcagaagatactcattgactccctcctatgcatcaggccctgtcctaggtgctgaggacacagacacaaaatccctgcccttaacaagctcacatttggatgggaaaggaaacctggaaacatcatcagtgaataacacgccaagcagcagtaaccctctgaagaaaaatgaggcggggaaggggaaggggaatgcaggtggtattctagagaggagaggggtcagggaaggcctccctgaggacatatgagcagagacctgcaggaaatcggggagtgagacctgcaactgctggggagaaccacaagcacagaggccctgcggcaggaacatgcactccacagagagctttgctgtggaggtcgtttatgtatttcactgctttttttaaaaaggagttgaagacggggcatggtggctcacacctgtaatcccaacactttgggaatctgaggcgggaggatcacttgagtccaggagtttgagaccagcctgggcaacacaagaccctgtctctacaaataatttttaaaaattagccaggcatggtagcacacacgtgtggtcccagctactcaagaggtggaggcaggaagatcacttgagcctgggatgtcaaggctgcagtgagctgtgattgtgccaccacactcccacactccagcctgggtaacagtgagaccatgtctaggaaaaaaaaaaaagttttgaagtttttattttctgagaatgaatttgtgggtttttaaaaattctctaaagttaaccaggcacagtggctcatgcctgtagtcccagcactttgggaaatcgaagtgggcagattgcttgagtccaggggttcgagatcagcctgggcaacatgaggaaaccccggctttacaaaaaatacataaaaattagccaggcgcgcctatagttgcagctactcggcaggggctgcggcaggggggctgaaaatttcttactgggaatgtttgtcctagagaaattgggttttcagtggccagattcaggatcgtgagaaagaactttgtccttttgaataggcagcattcagcctatgactctggttgaatctgtctgccttcatggggctgacgtttttgttgacagcactttttttccactcaaagaatgttttttaataacttttaaaattcctgtatgaaatttttaaaaatttgggataataggtgaaatattacagataaggctacagtccacattgatgacttccctgcccccagttctgctctctctcgccctcaccattatcaattttattatgggtgtcttcagttgattttctttgcatctccttattgtttatgtatatagctgttcaacaacagtatctgtggatagatcttttcatcagttctagaaaattctcagccaatactgcttctaccctcttctctctctttttttttttcagacggagtttcactcttgttgcccaggctggagtgcaatggtgtgatctcggttcactgcatcctccgcctcccgggttcaagtgattctcctgcctcggcctctcaggtagctgggattccaggcatgcgccaccacgccttgctaattttgtatttttagtagagacggggtttctccttgttggtcaggctggtcttgaactcccgacctcaggtgatccgcctgccttggcctcccaaagtgctgggattacaggcatgagccaccatgcccggcctattcgctctcttctaaggttctatctaactctaaggttctatctgtattcttcatgtttctgaaaataaaaatcacacaaaag

SEQ ID NO: 14895 - DNA, 664 bp, Homo sapiens
ctgcacagatgggatagtccgcatcttccaggcccatagcctgcactacctcgccaacctgcccaagccacactaccttggggtagacgtggcacagggcctggagcccagcttcctcttccacaggaaggcggaagcagtctacccagatacagtggcactgaccttcgaccccatccaccagtggctgtcctgcgtgtataaggaccacagcatctacatctgggatgtcaaggacatcaacagagtgggcaaggtgtggtcagagctcttccacagctcctacgtttggaacgtggagacggagtttcactcttgttgcccaggctggagtgcaatggtgtgatctcggttcactgcatcctccgcctcccgggttcaagtgattctcctgcctcggcctctcaggtagctgggattccaggcatgcgccaccacgccttgctaattttgtatttttagtagagacggggtttctccttgttggtcaggctggtcttgaactcccgacctcaggtgatccgcctgccttggcctcccaaagtgctgggattacaggcatgagccaccatgcccggcctattcgctctcttctaaggttctatctaactctaaggttctatctgtattcttcatgtttctgaaaataaaaatcacacaaaag

SEQ ID NO: 14896 - DNA, 7687 bp, Homo sapiens
ggcgtgacgatggcggccgtagggtccggaggctatgcgcggaacgatgcaggggagaagctgccctctgtcatggcgggagttccggcgcggaggggccagtcctccccgccccccgccccaccaatctgcctacggcggcggacgcgactctcgacggcctccgaggagacggtgcagaaccgggtgagaagctgctcgccatgtctaccccagttccaggcttcctaggtttcccctagtcccgtcctgagaactgtggccccgacatcagcccccggccagtcccctcaggttgttccctgccatgcctcgtcccctaacccccgcccctttagccacggcccctcccactttctcctcgctgctttcccggctccaccctcagcgttggagcaattcgggggttcctcgctggttcccacccgtggaaatgcattttgcttctgtaaatcacagcctagtcctgctatattttaacccccgttctatcgcctttagacgtcacgatcatagctcactgcagcctcactgccctggcccccgctgagtcattaaggtcccttcgagggttcggtccagagtgttacctgccccaactcttcctcgcttctaccccgccttctctcaccttctgcgatctctatcctttttcctcaccaaggtgggattcttaatccatattgtcactcaaaactatgagaaagacgtgagaagttatttataaaatctctgcagtgctgcctggggaggagggcgtacagaacagttccctaaatcctgagacagaaaaatggaaagaaatgatttcacagtaggtagaaggaattccattagcacagcggcaattaaaaaaattgttttccagctgtgtaggcacaaaatctgtttttataaaatggagatgataagaaccatactactggtagggcgcggtagctcacgtctgtaatcccagcactttgggaggccaaggtgggctgttcacctgagatcagttcaagaccagcctggccaacatggtgaaacccgtctctacaaaaagtagaaaaattagcccggcatgctagcgcgcgcctgtaatcccagctactcaggaggctgaggcgggagaaatcgcttgaacctgggaggcggaggttgcagtgagctgaggtcatgccactgcactccagcctgggcgacagagtgagactctgtctcaaaataaataaataaataaattatactattgcattggagggaaatgaaattttaattgtgatcttcttggcacggagtccagataaagggaggatacctggtagctgctggtggagcttgttcctgccccatgactttctcctgcactgtgattataccgcccactcctggctacagggctctggctgtacctcccatgtgctctctgtcaccaaggttcagtcacactggcctgcttttggttttcctgaggctccatattcttttctgcctcctggcctttgtgattggtgagtcctcagcctgggctttttgctgcaatctgcctgtctggctccttcccatccttcaagtctcagcctgaatgtcgctatcttgaaaggccttctcgaaccccattctaaagcaaacagccaccttcatctgtcacccagcaccctatacttcatagcctttatcttatatgttcctgaaagtgccctttgagctattaaactacatataacaatagcaaattcagagaggcgttatagcaaagtggctaagagcacagactgctgctgatggtatggttggacccaggcagcctgagcttaaactttagtcctgttcttcctggcaggttatgaacttcgctttttcttttctttttttttttttttgagatggggtcttactctgtcatccaggctgtagtgcactgggttgatctcggctcactgcagtctcagcctccctgggctcaggtgatcttcctgcctcaagcctcctgagtagctgggactgcaggcgcatgccaccatacctgactaatttttttgtgttttctggtagagacagggtctcgccgtgttggccaggctggtcttgaattactgagctcaagcgatctgcctgcctcggcctcccaaagtgctaggattacaggcgtgagctactgtgccccgccaagttatgaacttatctgtgcctcagttttcttatctgtaaaatgagaataatgatgtagaaatctctcatagggtatttgtgaggattcaatgaggttacatatcctaggcacttagaacaacactggcatatggcaagtactctattcatgttagctaatactgatattatgactgtgtatttggggtaatatttatttattttttttgtttggcagcacagagttgatctgtcttgcaaagacctagtctaaaagtgaccattcataccagggcccagtaatgctgatcgacagataagacaacatgagtgccatggcttggttgtttgtgttggaatcctggcactaccccttcctggatgggtaacccctcttggcctctgtttcctcaactgttttgttcctttttttttttgagacagagtctcactctgtcgcccaggatggagtgcaatggtgccatctcagctcactgcaacctccgcctcctgggttcaagcgattttactgcctcagcctcctgagtgcctgggattataggcatgggccaccacacctgactaatttttttgtatttttagtagagacagggtttcgccatcttggccaggatggtctcaaactcttgactgagccaccacacccagccttgtttaaattttaaatattactgttcatgtggttttttactcgttgaaaccgctcaaatttctggactgtgaatctgatgtggggaaactgtctacctttggtcactactgtgtctctcctgtacagcccaaagtgctagctttggagccagactgcctgggtttgtatatcaacattgccacttgcagatgtaggatcttgggcctcagacttcttacctgtaaaacaggggtgataatagagccttcttcgtggcttgttgggaggattcaagtcttttatacatataaaagtactaagaggccgggcacagtggctcatgcctgtaatcctagcactttgggaggccgaggcgggtgtatcacctgaggtcaggagttcgaggccagcctggccaacatggtgaaaccccatctctactaaaaatacaaaaattagccggacatggtggcatgtgcctgtaatcctagctactcaggaggctgaggcaggagaattgcttgaacctggaaggcggaggttgcaatgagccaagatctcaccactgactccagcctgggtgacagagcaagactccatctcaaaaacaaacaaaaaaaagtacttagaaacttattcacaggtcaccttctcaccgcggcattcgcccccttcccctgtgctcctaacctccttatctgctttcttctctcttgcacccatcattacttggcatctatttcacatatttgttctgctccttttctatgttctacatacccatcaccagtagaatgtgagccccccgagggcagggatttgtctcttcctcaccactctgtgcttttcacctagcgttgtatttgtcaaaggaatgttgagagaacaagtgttagctgctggtggatggcgtggccacagaagctcagtgtgggtgttgaatgtagcaggacctgaatgggtggccaaggcggctgcaccatgtggtgctggctagggtgggtgcctctgacttgggctttttctttgcaggtgtcactcgagaaggtgcttggcatcacagcccagaacagcagtggcctaacctgtgaccccggcacaggccatgtggcctacctggcagggtaagcagataagggcctcgacgtctaatcattgctagggaatttggagcttggaacctgaagccatccgtaaatcgctctgagcctcatatttttcacctgtagaatgtggagaatggggcctgcctctgagagctgtggagaggattccatagccccctctctgtctagaacagttcctggcatgtagtgagtgcaatgaaagcctttattatgactacaggggggaggtgacagcgattctgggaaagacaggtgattaaagtccacgctgtggtgtcaggtaacctggatttgtgtcccagctctgccatgtatgctgctctctgagcctcttcctctgcctctgtaaaacagagctggtgaccccctctgcttgcatagttgagaagactgaagaagatgctacagctgttcattccataaatactcatgtagcctggcactgtgctaaggacgtcccctctctgggtttgtttccttatctataaatgggcctaaatagtcgtgacctgacctggcagttgtgaggatttaaaacaattacatccctctttctctctttttgttttgttttgcttttttgagacagagtctggctgtgttgcccaggctagaatgcaatagtgtgaataacagctcactacagccccaacctcctgtgctcaagcgatcctcccatcttcacctcccatgtagctgggactacaggcacatgccaccacagccagctaattttttttagtggagatgagatctcactctgtcgcccaggctggtctaaaactcctgagctcaagtgatccctcctgccccatactcccaaagtgctgggattatagccagcttaaggtcttaattagcctagggcctgacagacattacctcagaggaagtgttggtttctatttaagaacatagcaatgttaaagtgccctagaattctcagcgtaaacacctggaggagggggaggaggaggagaccagagagaaccgagggagcttgtttatttgtgggcttttctggtgggaatagaatcatcccaggaccccaacactccccacagttgaggcacattttcctctttcttcccagctgtgtggtggtgattttggaccccaaggagaacaagcagcagcacatctttaacaccgccaggtaggctgaggcctgggcccggggcaggggtggaaccaggggcttggcacgcctcccctcccctacacagcctggagatactcatgggtaggtgctcactcattcacttacatgttggctcagcagcattcgcctgtgctgggtgctgttccgtgtgctggggacacagcagtgaccagaggagacgagaatctctgctggctagagcgagacagactgtaaactagtcagcaaattacgggctgatcatgatcagtgctatggaggaaatgatggaggatgtcttcgggcaggtttgtgggcagagaataggaggaaagccttatcagaaggctcagggaacgctgccttgactctgagacctgaaggaagcgagagggtgacccataagaagctgtagggagagcgcttcaggcagggggcacaggaagggcaaaggccctgcagtggttaagaatctccggcgctttagaagcagccagggatctgggtgcctggagaaaggagcagggaagatgaggctggaccaggcagaagccacatcccgtaggccttgcagccttgtagagggtctgcatagcatgctgagtgcagagagcagccacaggagggcaccacaggccaggaatgtgcttttcacccccagccctccagcagctctattccctgctttgcttttctccacaaaatttgctcccatctctgatatgctgtccagtttcctcattgatggtattcactgtgggtctccctcagtgtgagcactcttgagagcagggactttctctgagttcatttctgtgtccctagcaccaaagagcagtatctggcatattgatggctattttctaagagaaagacttaacatgatttgggttttagaaagatcccttcagctataagtttactggggaaggacccgctcctctgccttggggctaactgatcactgctaccctggggatgtggtcccaatagggctgtgacctttggaaggcacaccatgtccctccttggcatagctcaggctcagctcctttggcccagttctccaggtggatggataaggagtgggttttctcctgcccttatggtccctaaggtacggtccttaagctacggcaggttcttgttatctgacagaagtgcattccctcttgaaagtggctttttggaccttttgctcctaactgtgggttctgttactggtgataagggcagagctgggttccattcctggctcaagcgtctattcactgtggaatctcaggtgagacacttctttcagagccttggtctcctctgaaaataaaatagctgcctccaactgggagagcattcataaggcagcagctacaaaccagagtcacacacacttgcccaatatagtatgttttaaaggttggataagtggacaacatttcaagttttttaacacaaaaatccaaatgtcccttttgtttggagaagtgagaaattctctggcctctggggcccaaattcccctgtggcagtgaggggctgagcttagtgaaatttgtcaggcccgttgtggccagttcctcacacctgtgttgcctccctaatccctgtaggcagtggagtgggtggcctggatctatagtagatggtatgcaggtgtccgcccttggccaccagtgggtgtgcattaggaggtggtgtggccagtgtggggattttcactccaactgcatatcagaatcacctggtccctgtgcctcaccgcccccccaccgccacgcaagagaaagccaaatcagttgatctgggatgaaacttgggcattggcaattttgagactttttatattgaaataatttcagacttagaatagtacaaagagctcctatatacctatgtacctttcacatatttcacaaatgttagcttttttttcttttttttttttggacacagagtcttgctctgtcacccaggctgctggagtgcagtggcacagtctcagctcactgcaacttccacctcccgggttcaggtgattctcatgcctcagccccccaggtggctgggaccacaggcatgtgccaccatgcccagctagttttttgtgttttagtggagacggggttcatcatgttgcccaaggtggtcttgaactcctgagcttagacagtctgcctgcctcagcctcccaaagtgctaggattacaggtgcgagccactgcacttggccaaatgttagcattttaccacatttgctttatcattttttgtctatatacatattaatttgttctgaactatttgagaatcagttgtagacatgatgcccctatatctctaaatacttcacgccaggcatggtgattcacgcctgtaatctcagcactgtgggaggccttggaggcaggaagatcatttgaggtcaggagtttgagaccagcctggggaacatggcaaaaccctgtctctactaaaaatacaaaaattagccaggcctggtggcaggcgcctgtaatcccagctactcgggaggctgaggcaggagaatcgcttgaacccgggaggcagaggttgcagtgagccaagatcatgccactgcactccagcctgggtgacagagcaagagtccgtctc

SEQ ID NO: 14897 - DNA, 2960 bp, Homo sapiens
ggcgtgacgatggcggccgtagggtccggaggctatgcgcggaacgatgcaggggagaagctgccctctgtcatggcgggagttccggcgcggaggggccagtcctccccgccccccgccccaccaatctgcctacggcggcggacgcgactctcgacggcctccgaggagacggtgcagaaccgggtgtcactcgagaaggtgcttggcatcacagcccagaacagcagtggcctaacctgtgaccccggcacaggccatgtggcctacctggcaggctgtgtggtggtgattttggaccccaaggagaacaagcagcagcacatctttaacaccgccaggtaggctgaggcctgggcccggggcaggggtggaaccaggggcttggcacgcctcccctcccctacacagcctggagatactcatgggtaggtgctcactcattcacttacatgttggctcagcagcattcgcctgtgctgggtgctgttccgtgtgctggggacacagcagtgaccagaggagacgagaatctctgctggctagagcgagacagactgtaaactagtcagcaaattacgggctgatcatgatcagtgctatggaggaaatgatggaggatgtcttcgggcaggtttgtgggcagagaataggaggaaagccttatcagaaggctcagggaacgctgccttgactctgagacctgaaggaagcgagagggtgacccataagaagctgtagggagagcgcttcaggcagggggcacaggaagggcaaaggccctgcagtggttaagaatctccggcgctttagaagcagccagggatctgggtgcctggagaaaggagcagggaagatgaggctggaccaggcagaagccacatcccgtaggccttgcagccttgtagagggtctgcatagcatgctgagtgcagagagcagccacaggagggcaccacaggccaggaatgtgcttttcacccccagccctccagcagctctattccctgctttgcttttctccacaaaatttgctcccatctctgatatgctgtccagtttcctcattgatggtattcactgtgggtctccctcagtgtgagcactcttgagagcagggactttctctgagttcatttctgtgtccctagcaccaaagagcagtatctggcatattgatggctattttctaagagaaagacttaacatgatttgggttttagaaagatcccttcagctataagtttactggggaaggacccgctcctctgccttggggctaactgatcactgctaccctggggatgtggtcccaatagggctgtgacctttggaaggcacaccatgtccctccttggcatagctcaggctcagctcctttggcccagttctccaggtggatggataaggagtgggttttctcctgcccttatggtccctaaggtacggtccttaagctacggcaggttcttgttatctgacagaagtgcattccctcttgaaagtggctttttggaccttttgctcctaactgtgggttctgttactggtgataagggcagagctgggttccattcctggctcaagcgtctattcactgtggaatctcaggtgagacacttctttcagagccttggtctcctctgaaaataaaatagctgcctccaactgggagagcattcataaggcagcagctacaaaccagagtcacacacacttgcccaatatagtatgttttaaaggttggataagtggacaacatttcaagttttttaacacaaaaatccaaatgtcccttttgtttggagaagtgagaaattctctggcctctggggcccaaattcccctgtggcagtgaggggctgagcttagtgaaatttgtcaggcccgttgtggccagttcctcacacctgtgttgcctccctaatccctgtaggcagtggagtgggtggcctggatctatagtagatggtatgcaggtgtccgcccttggccaccagtgggtgtgcattaggaggtggtgtggccagtgtggggattttcactccaactgcatatcagaatcacctggtccctgtgcctcaccgcccccccaccgccacgcaagagaaagccaaatcagttgatctgggatgaaacttgggcattggcaattttgagactttttatattgaaataatttcagacttagaatagtacaaagagctcctatatacctatgtacctttcacatatttcacaaatgttagcttttttttcttttttttttttggacacagagtcttgctctgtcacccaggctgctggagtgcagtggcacagtctcagctcactgcaacttccacctcccgggttcaggtgattctcatgcctcagccccccaggtggctgggaccacaggcatgtgccaccatgcccagctagttttttgtgttttagtggagacggggttcatcatgttgcccaaggtggtcttgaactcctgagcttagacagtctgcctgcctcagcctcccaaagtgctaggattacaggtgcgagccactgcacttggccaaatgttagcattttaccacatttgctttatcattttttgtctatatacatattaatttgttctgaactatttgagaatcagttgtagacatgatgcccctatatctctaaatacttcacgccaggcatggtgattcacgcctgtaatctcagcactgtgggaggccttggaggcaggaagatcatttgaggtcaggagtttgagaccagcctggggaacatggcaaaaccctgtctctactaaaaatacaaaaattagccaggcctggtggcaggcgcctgtaatcccagctactcgggaggctgaggcaggagaatcgcttgaacccgggaggcagaggttgcagtgagccaagatcatgccactgcactccagcctgggtgacagagcaagagtccgtctc

SEQ ID NO: 14898 - DNA, 25934 bp, Homo sapiens
atcacagcccagaacagcagtggcctaacctgtgaccccggcacaggccatgtggcctacctggcagggtaagcagataagggcctcgacgtctaatcattgctagggaatttggagcttggaacctgaagccatccgtaaatcgctctgagcctcatatttttcacctgtagaatgtggagaatggggcctgcctctgagagctgtggagaggattccatagccccctctctgtctagaacagttcctggcatgtagtgagtgcaatgaaagcctttattatgactacaggggggaggtgacagcgattctgggaaagacaggtgattaaagtccacgctgtggtgtcaggtaacctggatttgtgtcccagctctgccatgtatgctgctctctgagcctcttcctctgcctctgtaaaacagagctggtgaccccctctgcttgcatagttgagaagactgaagaagatgctacagctgttcattccataaatactcatgtagcctggcactgtgctaaggacgtcccctctctgggtttgtttccttatctataaatgggcctaaatagtcgtgacctgacctggcagttgtgaggatttaaaacaattacatccctctttctctctttttgttttgttttgcttttttgagacagagtctggctgtgttgcccaggctagaatgcaatagtgtgaataacagctcactacagccccaacctcctgtgctcaagcgatcctcccatcttcacctcccatgtagctgggactacaggcacatgccaccacagccagctaattttttttagtggagatgagatctcactctgtcgcccaggctggtctaaaactcctgagctcaagtgatccctcctgccccatactcccaaagtgctgggattatagccagcttaaggtcttaattagcctagggcctgacagacattacctcagaggaagtgttggtttctatttaagaacatagcaatgttaaagtgccctagaattctcagcgtaaacacctggaggagggggaggaggaggagaccagagagaaccgagggagcttgtttatttgtgggcttttctggtgggaatagaatcatcccaggaccccaacactccccacagttgaggcacattttcctctttcttcccagctgtgtggtggtgattttggaccccaaggagaacaagcagcagcacatctttaacaccgccaggtaggctgaggcctgggcccggggcaggggtggaaccaggggcttggcacgcctcccctcccctacacagcctggagatactcatgggtaggtgctcactcattcacttacatgttggctcagcagcattcgcctgtgctgggtgctgttccgtgtgctggggacacagcagtgaccagaggagacgagaatctctgctggctagagcgagacagactgtaaactagtcagcaaattacgggctgatcatgatcagtgctatggaggaaatgatggaggatgtcttcgggcaggtttgtgggcagagaataggaggaaagccttatcagaaggctcagggaacgctgccttgactctgagacctgaaggaagcgagagggtgacccataagaagctgtagggagagcgcttcaggcagggggcacaggaagggcaaaggccctgcagtggttaagaatctccggcgctttagaagcagccagggatctgggtgcctggagaaaggagcagggaagatgaggctggaccaggcagaagccacatcccgtaggccttgcagccttgtagagggtctgcatagcatgctgagtgcagagagcagccacaggagggcaccacaggccaggaatgtgcttttcacccccagccctccagcagctctattccctgctttgcttttctccacaaaatttgctcccatctctgatatgctgtccagtttcctcattgatggtattcactgtgggtctccctcagtgtgagcactcttgagagcagggactttctctgagttcatttctgtgtccctagcaccaaagagcagtatctggcatattgatggctattttctaagagaaagacttaacatgatttgggttttagaaagatcccttcagctataagtttactggggaaggacccgctcctctgccttggggctaactgatcactgctaccctggggatgtggtcccaatagggctgtgacctttggaaggcacaccatgtccctccttggcatagctcaggctcagctcctttggcccagttctccaggtggatggataaggagtgggttttctcctgcccttatggtccctaaggtacggtccttaagctacggcaggttcttgttatctgacagaagtgcattccctcttgaaagtggctttttggaccttttgctcctaactgtgggttctgttactggtgataagggcagagctgggttccattcctggctcaagcgtctattcactgtggaatctcaggtgagacacttctttcagagccttggtctcctctgaaaataaaatagctgcctccaactgggagagcattcataaggcagcagctacaaaccagagtcacacacacttgcccaatatagtatgttttaaaggttggataagtggacaacatttcaagttttttaacacaaaaatccaaatgtcccttttgtttggagaagtgagaaattctctggcctctggggcccaaattcccctgtggcagtgaggggctgagcttagtgaaatttgtcaggcccgttgtggccagttcctcacacctgtgttgcctccctaatccctgtaggcagtggagtgggtggcctggatctatagtagatggtatgcaggtgtccgcccttggccaccagtgggtgtgcattaggaggtggtgtggccagtgtggggattttcactccaactgcatatcagaatcacctggtccctgtgcctcaccgcccccccaccgccacgcaagagaaagccaaatcagttgatctgggatgaaacttgggcattggcaattttgagactttttatattgaaataatttcagacttagaatagtacaaagagctcctatatacctatgtacctttcacatatttcacaaatgttagcttttttttcttttttttttttggacacagagtcttgctctgtcacccaggctgctggagtgcagtggcacagtctcagctcactgcaacttccacctcccgggttcaggtgattctcatgcctcagccccccaggtggctgggaccacaggcatgtgccaccatgcccagctagttttttgtgttttagtggagacggggttcatcatgttgcccaaggtggtcttgaactcctgagcttagacagtctgcctgcctcagcctcccaaagtgctaggattacaggtgcgagccactgcacttggccaaatgttagcattttaccacatttgctttatcattttttgtctatatacatattaatttgttctgaactatttgagaatcagttgtagacatgatgcccctatatctctaaatacttcacgccaggcatggtgattcacgcctgtaatctcagcactgtgggaggccttggaggcaggaagatcatttgaggtcaggagtttgagaccagcctggggaacatggcaaaaccctgtctctactaaaaatacaaaaattagccaggcctggtggcaggcgcctgtaatcccagctactcgggaggctgaggcaggagaatcgcttgaacccgggaggcagaggttgcagtgagccaagatcatgccactgcactccagcctgggtgacagagcaagagtccgtctcaaaaaaaaaaaaaaaaaaaaaaaaaacttaatcaaataaatacttcagtgtgtatttcctacaaaaaaaaatgacaatctttttaaactgtaatacatccagcaaaatcaggaaatgaaaattgatatatcactctcatccactccccagagggcaccattcaggagtcagcctttgtcccatgaatgtcctttatggccaaaggattctgtctagaatcacacattgcattgagttgtcccctcagtctctttcaggctgacgtggctcctctgtcttttcttgactttcaggatcttgacatttttttttttctttttgagatggagtctctgtcgtcaggctggagtgcagtggtgggatcctggctcactgcaacctgactccccagttcaagtgattctcctgcctcagcctcccgagtagctaggattacaggcatatgccaccatgtccggctaatttttgtatttttagtagagctggggtttccccatgttggccaggatggtctcgatctcctgaccttgtgatccgcccgccttggcctcccaaagtgctgggattacaggcgtgagccacagcacctggccacttttttttgtttttttgttttttgagacgaagtctcacactgtcgcccgggctggagtgcagtggggcgatcttggctcgctgcagcctccacctcctgggttcaagcgattctctgcctcagcctcctgagtagctgggactacaggcatgcgccaccgtgcctggctaatttttgtatttttttttagtagagacggggtttcactatgttggtcaggctggtcacgaactcctgacctcgtgatccacccgcctcggcctcccaaagtgctgggattacaggcttgagccactgcacccggccaatcttgacactgaggattgtagacgaggtattttgtagagtgtcccagcatttgggtttgtccaatgcctcctcacgggcagactcaggttctgcatctttggcaggaacagaccagaaggggtgctgtgttcttcctggtgcctcctctcaggaggtctcctatgactggtggtgttcactgggagcacttggccaaggtgttgcctgccagattcctccacttcaaagcctctcttttcacctttgtgattagcaggtatcctggggacatctttcctgagacagtgcaaatattatcttgttcctcaccaaactttcactcaactaatcttaggctttgacacttttcagatgctccccagggaaatctaatgtacagccaggactgagaactactggcttagaggtcagggctctgccctgtctggttaggtaactgcaggcaggggacttccttgtgttgcagtcacctcatctgccaagttggttcatgagagccctgactccatgaagcatgcttgaggaatcagtgcactgatggccagacagcatttgccagagggccaggcacaaggtcagggcatgcgacaggttagaggtggctacgggcaacagaaacccctccacagcatggcttaaaacccaagagcatgctcttcctgcatgtcataagtccagaggtgggcagcccaggggctgtgtctctgaacgccacattttttttttctgtctctctttttgagacagagtctcactctgttgcccaggctggagtgcagtggcgcgatcttggctcactgcaagctccgcctcctgggttcacaccattctcctgcctcagcctcccaagtagctgggactacaggcgcccaccaccacgcctggctaattttgtttttgtatttttagtatagacagggtttcaccgtgttagccagggtggtctcgatctcctgaccttgtgatctgcccacctcagcctcccaaagtgctgggattacaggcgtgagccaccgcgcccagccccacttctttttttctctagacggagtcttggtctgttgcccaggctggagtgcagcagcacgatcttggcttgctgcaacctctgcctcccgggttcaagcaattctcctgcctcagcctcccgagtagccgggattacaggctcctgccaccacacctggctattttttgtatttttagtagaggtggggttttgtcgtgttggccaggctgttcgcgaattcctgacctcaagtgaaccacccacccctctgcctcccaaagtgctgggattacaggcgtgaggcaccgcacccggcccccattccttctctcctgttccaccccatttattgtgaggcttctggtcttgaagtcacttcatggcccaagatggagttctggctgtcgtgtgcgtatttcaggaggggaactggtaggaagcagggcaaagggttccctttgacgagtatttcaggaagtcccacacagcatgtcagtttacttctccttggccagactaagtcatgtagctgtacctgcatagttgcaagcataaaactggggttatgtcagtaaggaaagagaggcgagtggatatccaggaggcagcttgccctgtttgttgcagtaaggagccacgggaagcctgggaagcaggttgacttgatgatgaatattccatgaagttgccaaagtctcacttagcgacatttacttagttatctacacaccaatttaccatctcacgtagggagacaattattagattgttaaggaacaaaggtaaaaataagattaaaagagagaagggagtagaaggaaaccatacaatctgggaacagtgaatcttgctgccagaaacctacgagctagcctgttcattcagtgcttgtgcaggctagctaggagtatcagaaacattttggctctttatggattttccagaacaccttgagtatttagcagtggagcacaggctgcaggctaccttgatgtgatgcctgccaggatcctcccatcagcaccacccgtttagttaggccaggcctgtaccatttcctgcatctctatttctcagtgttacagggtggatagggtcttaggatacccactgcggcagagggagaagaaagcagggtccgcatacagtgtctactccatttgggtttggtgtctcagggcggaaggggcctttgcatttacccccatttctctgtgtgctttgctgggcacaccagcggcactggctctgtgggagctgcttgagctcacctctgctggcctcttccgaggcttgggaggcagaagagggcagagtcctatcagagtcgccaggatggggtctggctggccaccctcagcggaaccagtgatcagctcttttctttatccccaggaagtctctcagtgctctggccttctcccctgatgggaagtacatagtgacaggggaggtgagtcgtgatcgtgactgagtgggagtcgggggctggggggtcttggaagccattccttctgctcccggcaggcctgggagtccctggaatagctccttcctgggccagaacagccctgtagcagatgggggaggtggcttttgggcacatcctgtggcaatgccatcttcggccttgacaaccctctagccctgcccagtacagagcccagcagcagtaacgaccccaccttccctagaatgggcataggcctgctgtgcgcatctgggatgtggaggagaagaatcaggtggcggagatgctaggccacaagtatggtgtggcgtgtgtggccttctcacccaatatgaagcacatcgtgtccatgggctaccaacatgacatggtgctcaacgtctgggactggaaggtaagagccgaccagcaggcctgtggcaggcagccagctgccacagcatcctatgtcttgggcacagggagagctacatgagaggacgcagtaaagtgctcactcacccaacagataacagctattgagcacctgtgacatgctgatcccttattgtagggcacaaggcaggctcccagctagaagcattatacatatttttatattgaccagctgtgaccttaggcaagtgacttaacatctctgtgagtctgtttcctcctctgttagatggatatagtagtacttatcttgttgagttgtgagactttaatgagttgataagcactggaaggctgggctttggaacagctgtggagctggcagaagtgggtaccaagtcctggctctgcccataacccactatgtgaccttgagcacatgacatctccccctctgagcctggtagggttggggagaagcgcctccctcgtggggcttttgagggattgaggaaatttcatgggttatcctgtgaagggctcagggcagggcccagagcaggagccccatctgtgacagccataggttgtgttgtccttacatcccagccgtgactgtccccaataccatgtgtgggctgcagagcttagacccttggagagagctctggaacatactgtcccatggggaccattccaagcctctgtcccttcctctgtcggtgaggaatgagcagggtgccccacataggtttccccatacagcagctccctggagggtcccaggaagacagacttggagtggggacgagcagggagttccagcctgagggcaaaggcacaaacagtccagtggaatgagtgctggcatgagcttctctgcacttattcttccagaaagacatcgtagtggcctccaacaaggtatcttgtagagtcattgccctctccttctcagaggacagcagctattttgtcactgttgggaaccgccatgtgaggttctggttcttggaagtctccactgagacaaaggtgagtttctgtccctgcccctttagccaggccctgagggagtcaccatcggtggcagcatggtctcctgtttctccctgagatttgagggcagcggtctcgggccatttggcctctcaggggcccagctgctgcttctgggcctactctcagggtgctgatgcacaggccctgccaggaaccccctgaccctgggaccagctctcattcttggactgctgctgtccagcccctctgtccagagtggcagggttctagtgttttcttcccttctccatttggaagagcttcttagagttctcctgttttgttgtgtcctatcatctggtcatgcagggcccagctgtgtggacaagtatctcactacgccctctgtgtctccaggtgacgagcacagtgccccttgtagggcgctcgggcatcctgggcgagctgcacaacaacatcttctgtggtgtggcctgcggtcggggccggatggcgggcagtaccttctgtgtgtcctactcgggcctcctctgccagttcaatgagaagagggtgctggagaagtggatcaacctgaaggtaccacctccctctctgccatcagctggacagactctttctcgtgatatgtgtctgcaggggtgctcatcagcattgaccacacaggttctgcttatgtgactagtggtgaatgacgcccactctctgagcttaaggttccacatctgtaaaatgggagtactgctgccctccccgcagagctgataaggaagtcacgtgagataacataggcaaggcagtgagcacggtgcttggtaccctgaaatgggctcaaggtgacagttgttttcccatgactatttgatctacttcacatttcttttctcctttgagcactctggctggtagaggattgcatttttttttaattaatttatttttttttattgatcattcttgggtgtttctcccagagggggtttggcagggtcttaggacaatagtggagggaaggtcagcagacaaacaagtgaacaaaggtctctggttttcctaggcagaggaccctgcgggcttccgcagtgtttgtgtccctgggtacttgagattagggagtggtgatgactcttaacgagtctgctgccttcaagcatctgtttaacaaagcacatcttgcaccgcccttaatgcatttaaccctgaatggacacagcacatgtttcagagagcacagggttgggggtaaggtcatagatcaacagcatcccaaggcagaagaatttttcttagtacagaacaaaatgaagtctcccatgtctacttctttctacacagacacagcaacaatctgatttctctatcttttccccacctttcccccttttctattccacaaaaccgccatcgtcatcatggcccgttctcaatgagctgttgggtacacctcccagacggggtggtggccgggcagaggggctcctcacttcccagaaggggcggccgggcagaggcaccccccatctcccggacggggcggcggcagggcggaggcggacccccacctccctccctgacgggccggctggctgggcaggggctgacccccacctccctcctggacggggcggctggccgggcgggggctaaccccccacctccctcccggacggagcggctggccgggcgggggctgactccccccacctccctcccggactgggcggctggccgggcgggggctgacccccacctccctccgggacggggcggctgctgggcggagacgctcctcacttcccagacggggcagctgccgggcggaggggctcctcacttctcagacggggcggctgccgggcggaggggctcctcacttctcagatgggacggccaggcagagacgctcctcacctcccagacagggtcgcggccgggtagaggcgctcctcacatcccagacggggtggcggggcagaggcgctccccgcatctcagacgatgggcggccgggcagagacgctcctcactttctagacggaatggcagccgggaagaggcgctcctcacttcccagattgggcagccgagcagaggggctcctcacatcccagacgatgggcggccaggcagagacgctcctcacttcccagacggggtggcggccgggcagaggctgcaatctcggcactttgggaggccaaggcaggcggctgggaggtggaggttgtagctagccaagatcgcgccactgcactccagcctgggaaacattgagcactgagtaaacgagactccgtctgcaatcccggcacctcgggaggccgaggctggcggaccactcgcggttaggagctggagaccagcccggccaacacagcgaaaccctgtgtttggtggagaccaaaaaaatacgaaaaccagtcaggcgtggcggcgcgcgcctgcaatcgcaggcactcggcaggctgaggcaggagaatcaggcagggaggttgcagtgagccgagagggcagcagtacagtccagctttggctcggcatcagagggagaccgtggaaagagagggagagggagaccgtggggagagggagagggagaccgtggggagaaggagagggagaggaggattgcattttttaaaaattggaggtaccattgatttaataacttttcagtcaaaaaagactacacaaaatacataaacttttatttatttttatttatttttactttttttttttttttgagatggcgtctcacttgttgccaaggctggagtgcagtggcgcaatctcagctcactacaagttccacctcccaggttcaagcaattctcctgcctcagcctcccaagtagctgggattacaggtgcctgccaccacgcacagctaatttttgtatttttagtagagacagggttttaccatgttggcctggctggtctcgaactcctgacctttagtgatccatccgtcttggcctcccactgcgcccggccataaacttttaaactaaagcatgatctatcgatacattgcagagcttctttcctttagtatctgaaggtttgagtcaaagctgttttcccatctggaatcagttgcccatttggctatccgcccgagcgttgtggtttcctctcctgttcctggcctgcctttgtgactcactctggagatcaccttcgaggttaatggcttgtggaagagttccaagttttatctctgtcctagttggttaaacatcattttctctttttcaagcaagtgaaaagctttcaatagatagatgtttatttcctaagcactaaatgactcataaattaagtccctgtagatttggaaaaactccttaaactgtatctagaggtctagcacttcctagtaggatagacagtcctttctagatactgtaacttttttctgtaccgctttggagtacagtctttatgaagttgtttgtaagcaaaagggaataaaatttaagcctaaaggctgggcgcgatggctcacatctgtaatcccaatgctttgggaggccaaggcaggtggatcacctgaggtcaggagttcaagaccagcctgaccaacatggtgaaaccccatctcaaaatacaaaaaattatctgggtgtggtggcggccgcctataatcccagctactctggaggccgaggcaggagaatcacttgaacccaggaggtggaagttgcagtgagccgagattgtgccattgcactccagcctgggcgcaacaaaaaactctatctcaaaaaaaaaaaaaaatttaagcctaaaattcaaccctgttactacaagtgacttacctgaagttgcagtctgctgaacaggtattttccatacacagctacgtttctctgtagacagcagtgacaattctgtttccgttcatgcctctgcctacctgctggcacatgtctttcaatagcagcagtatgctatatcctgatttcacaaatcttaaaatatgctaaaatgggtgtcttagacccaaggaactgtaagtcttctctggaggcctaaggctgctctgtcagtccccatatccccgggccaggccacgtgaagcaccaaatccactggggtcccttttgcccctacaggtctccctgtcttcctgcctctgtgtcagccaggagctcatcttctgtggctgcacagatgggatagtccgcatcttccaggcccatagcctgcactacctcgccaacctgcccaagccacactaccttggggtagacgtggcacagggcctggagcccaggtactgccctgtggggagagggaatgggaggggcccacccagagtctgtccactggcattcatccatgcttccagatccatctatctgtctgtccatcccacaaatacccatcatgactctcagccctgggcattacaaagcagaaaagtccttgccttccgaggcaagcctcacagtgagaagtgaggctgggtagggggaagaaacagtgagaaaacaaaggaataatatcatttcagatagcggtcagcatggtgaagaacagtgcagagcaggtgtgaatgtggcggagtgtttccatccacatggctgacccctactaagtggctgctaagtgccagccctgggctggaagcaggacatgcctattataatgaagcagcaaaatctctgcctctctgcagtatagcaagggggctcgatgataagcaagtacacgaaaaagataatttcaataggcatgagtgctttggggaacacagcagggactcgggaaggagagtgactggggtgggctgtgctgattgggtgcctggtgagaaggagctgctgtgtggagagctgggtcccagcagttgaggtgacagcacactgggcttgttacgttgcaggaatagtaagggactgtgtggccagagcccagtgtgtccggggaggatggtgggagatgaggccagtgtggggcgcctgtagtctatcctcaggtcagtgggcagttgctggggtttcgggcgttggggtaaatgaccaggccttacatgttaggtccctcagctgctgtgtcgagagtggatagaagcactaggctgtggctttcttctcctttgttgcaagtctgttttatggaattgggggctacctaaccagggggtgccaggtgcctagggctgcctctttgtggatttctggatgctagctcctgggtgccttttccacgacagggcctgaacaggggaactgggtgtcatgaaggaaaggagggggcgagcaacccacaggcagtgttgtgttgtagtagtcgggctcacagctctgctgtcttctgttgtgctctgtgaccttgggaaggtgactatacctccctgtgcttccgttttctcatgtgtaaaatacagtacctagctcttattgtggttgtgagaatttattgcaggtaaaactctcggcctggcacagtgtaaatgctcagtaaactgtagccttcatagggagaccccaggccaagggacagctccccagcctccttaggacacagaggctttttgatcatgcgttggtgaggccaagaagaggtgggacctgagatacatgcctattatctttctatgctcagagagagagcaggagcttgggttgggtgaaatgatgggcgataaatgttcataggaatcaaaaactcaattgctctcggggccaggcaaaaatttccggtttgtagcctctatatgaaaagcaaagcagaggaagagggaagagggaaaagtagaattggagcaggagagatggatggccacaaataccatgagggatggcattgccggggaggcatctccactgtcactagaggtggctgtcactactcagtgacattgatggtgattgattacccatgtggccttgttagcttcctcttccacaggaaggcggaagcagtctacccagatacagtggcactgaccttcgaccccatccaccagtggctgtcctgcgtgtataaggaccacagcatctacatctgggatgtcaaggacatcaacagagtgggcaaggtgtggtcagagctcttccacagctcctacgtttggaacgtggaggtgagccccccccccacccccttgcccctgcttggcctctgcacagttccccacagtttgggaacccattcagtaattccttcagaagatactcattgactccctcctatgcatcaggccctgtcctaggtgctgaggacacagacacaaaatccctgcccttaacaagctcacatttggatgggaaaggaaacctggaaacatcatcagtgaataacacgccaagcagcagtaaccctctgaagaaaaatgaggcggggaaggggaaggggaatgcaggtggtattctagagaggagaggggtcagggaaggcctccctgaggacatatgagcagagacctgcaggaaatcggggagtgagacctgcaactgctggggagaaccacaagcacagaggccctgcggcaggaacatgcactccacagagagctttgctgtggaggtcgtttatgtatttcactgctttttttaaaaaggagttgaagacggggcatggtggctcacacctgtaatcccaacactttgggaatctgaggcgggaggatcacttgagtccaggagtttgagaccagcctgggcaacacaagaccctgtctctacaaataatttttaaaaattagccaggcatggtagcacacacgtgtggtcccagctactcaagaggtggaggcaggaagatcacttgagcctgggatgtcaaggctgcagtgagctgtgattgtgccaccacactcccacactccagcctgggtaacagtgagaccatgtctaggaaaaaaaaaaaagttttgaagtttttattttctgagaatgaatttgtgggtttttaaaaattctctaaagttaaccaggcacagtggctcatgcctgtagtcccagcactttgggaaatcgaagtgggcagattgcttgagtccaggggttcgagatcagcctgggcaacatgaggaaaccccggctttacaaaaaatacataaaaattagccaggcgcgcctatagttgcagctactcggcaggggctgcggcaggggggctgaaaatttcttactgggaatgtttgtcctagagaaattgggttttcagtggccagattcaggatcgtgagaaagaactttgtccttttgaataggcagcattcagcctatgactctggttgaatctgtctgccttcatggggctgacgtttttgttgacagcactttttttccactcaaagaatgttttttaataacttttaaaattcctgtatgaaatttttaaaaatttgggataataggtgaaatattacagataaggctacagtccacattgatgacttccctgcccccagttctgctctctctcgccctcaccattatcaattttattatgggtgtcttcagttgattttctttgcatctccttattgtttatgtatatagctgttcaacaacagtatctgtggatagatcttttcatcagttctagaaaattctcagccaatactgcttctaccctcttctctctctttttttttttcagacggagtttcactcttgttgcccaggctggagtgcaatggtgtgatctcggttcactgcatcctccgcctcccgggttcaagtgattctcctgcctcggcctctcaggtagctgggattccaggcatgcgccaccacgccttgctaattttgtatttttagtagagacggggtttctccttgttggtcaggctggtcttgaactcccgacctcaggtgatccgcctgccttggcctcccaaagtgctgggattacaggcatgagccaccatgcccggcctattcgctctcttctaaggttctatctaactctaaggttctatctgtattcttcatgtttctgaaaataaaaatcacacaaaagatatgtagagtttatcaattattgttagcagctttttttcccccccaagacggaatctggctgtgttgcccagtctggagtgcaatggcacaatctaagctcactgcaacctccagctcctgcgttcaaacaattctcctgcctcagcctcccgagtagctgggattacaggcagccgccaccacgcctggctaatttttgtgtttttagtagagatggggtttaaccatgttggccaggctagtttcaaacccctgacctcaagtgatctgcctgcctcggcctcccaaagtgctgggattacaggcgtgagccactgtgcctggcctgttagcagctattgatgctcagttcctggacccttttatttattgagggttgcaatatggtgatattctaaatctataatttatttttattagttggactacttacgtgaagagatatttgctctcatctgccatttggtcacccagtgctatacttcatataggaaaggcaggagaaatacttgattctttccctttatttaccagttttcaagataatgaattggttccctatcctctaaaggtaactagttttatttaatatcattataaactcatatatatttaaatatatcagatatgttttaatctattgtaattattaactttattggagctcatatcatcccatctttggccagtgagagcctcttaacattggctcctgagccctttggacatgaccctagtatttcttgatagccaccttgctgcctgggatgccaatatgttccagtctcatcttgtacatttcctgtcacacatcaggaatcaaccatttctcgaaaagaccatgtttttttttttgggctgggtgcagtggctcatgcctgtaatcccagcactttggaaggctggggcaggggaattacccgagcccacgagtttgagaccaacctggccaacatggtgaaaccttgtctccactaaaatacaaaaaattagccgggcatggtggcaggcgcctgtagtcctagctacttgggaggctgaggcatgagaattgcttgaacccgggaggcagaggttgcagtaagccaagatcaagccactgcactccaatctgggtgacagagggagatcctatctcaaaaaaaaaaaaaagaaaaaagagaaagagaaggccagggtttttttttagtacaaattgggacttcagaatcacaggttgggtgttagggatgctcatcgctattgggtcgttcttccagaagcctagttcttaaggacacaggggatggtggaattagaatatccccagtaactcatttgctttttcccacattatacatgcaacagtctgagaatggacaacttttcaattctgaagatagttaaaacaattgtaatgcatatgttctctctgttctctccaatttttaaaatagttatactatatttacaggatctgaatatgtagccattatatactatagtgtctcccttttgacccctgtttattttggaatggggaattatatatgtgtgtatatatgtatgtgtgtgtgtgtatatatatatataaaatgataaaatatacatgacatcaagttcaccatttcaactattttaaattgtaccatttggtggcatttagtacacttacagtgtcatgcagccatcattactctctagtttcagaacattttcatcacccacccaccccaaaaaatcctgtatctgttaagcagtcctccccattccccactccccccatccatggaaatgactaatctgcttctgtctttatggatttgcctgttctgaatcttttcttttctctccttctttccttccttccttccttcctttttttttttttttttttgagatggagtctcactctgtcgcccaggctggagtgatgcagtggcacgatctcggctcactgcaagctccgcctcccgggttcacgccattcttcttcctcagcgtcctgagcagctgagactacaggcacacgccaccacacccagctaattttttgtatttttagtagagacgaggtttcaccatgttagccaggatggtctcgatctcctgacctcgtgatccgcccacctcagcctcccaaagtggtgggattacaggcatgagccaccatgccaggctgtttcctttcttttcctctttctttcttttttttttggatggagtctcgctttgtcacccagactggaatacagaggcacaatctcggctcactgcaacctccacctcccgagttaagctattcccatgcttcagtctctagagtagctgggattacaggcacatgccaccatgcctgatgaattttttgtattttagtagagacagggtttcaccatgttgcccaggctggtttcaaactcctgagctcaggtgatctgcccgcctcagcctcccaaagtgctaggattacaggcgtgagccaccatgcctgacctgaatattccttataagtgaaatcatagactatgtgggcttttgtgcctggctttcacttagcataatgttttcaagatttatccatgttgtagcatgtgtcagcacttcatgcctttttatggtggaataatatttcattgtacggatagaacacattttgttctctgttatcagttgacggccacttgggtttttttctaccttatggctgttgcgaataccactgctatgaacatgtaagtacaagtttttttgtttttttttttttgaaacggagtctcactctgtcgcccaggctggggtgcagtggtatgatctccgctcactgcaacctcaggctcccaggttcaagcgattcttctgcctcagactcctgagtagctgggattacaggcacgcaccaccatgcctggctaatttttgtttttttagtggagacacggtttcgccgtgttggccaggttggtctcaaactcctcgcctcaagtgatttgcccacctcggcctcccaaagtgcagggattacaggcgtgagccactgtgcctgacgtagttctttctttcagttacatcactttgtttctgagtttttgtaggttgtttttcataccttggatcattttttaaatatcttttaccttcttttgaaacagtaggcccagcgtggtggctcacgtcggtaatcccaacactttgggaggccgaggcaggtggatcacctgaggtcaggagtttgagaccagcctggccaacatggcaaaaccctgtctctgctaaaaatacaaaaaattagctggccgtggtggcgggcgcctgtaatcccagctacttggggggctgaggcaggagaattgcttgaacccgggaggcagaggttgcagtgagccaagatcgtgccattgcactccagcctgggcgacagggcgagactctgtcaaaaaaaaaaaaaaaaacaaagtaagttatagtttttatctttttttgtgaaaatatgtttctgctgtgcttttttttttttttcttttttaagagtaactattggatttgaccttggtcctttcctgttgttcatttttatgtgataccagtttttctgaaattttagaagttggtgtgcttcaggacagattttccaactacacaagaagaactctgtcttttcttttttttgtgggggtggggtggcatgttttgttttgtttttgaaaaggagtctcactgttacctaggctggagtgcagtggcatgatcacagctcactgaagcctcaacctcataggcacaagcagttctcctgcctcagcctcccgagtagctgggaccacaggcatgcactaccatgcccagctaattttttatttttggtagagatgggatctcattatactgcccaggcttgtttcaaacttgggctcaagcagtcctcctgcctcagcctcccaaagtgctgggattgcaggcttctgttatttttatactgtgttaaaatatggcagcctgctttctgatacttcctttttgtggtcctctttatctgttatgtctcttctttcgtctcaatctcctctttactttatttcttctgtccctgttgtgattggtcaatttcatttctactcttagcagtttctcttcagtgtggagctttgtcctggaaggacaaagttcacaggatcttctccagtccctttaggccttaccccttgcactcaactgctgttggggtggatgaaaccctcctactttcagctgctgttcagtttggcccagtgtgctttccaatgaacacctcttggctactttggaattatcctgttgctgggtctgtcagatgccttattacttctctgtctcccacatgcatgctgatgatatgtaggtcttgtgattggtggtggtttgtcccactcacttgtattttggggtttatgggagtattttgtcactgagttttgctataaatgttgtctgtaggtttgggttttgctatctggttgatgtttttcttatgtcgagattttgggagattaaaaaaattaatgccgctactatcatcttcccagttctcaatcttccgtattttgaaatctctttatatggtggctctttgtccttctcagcttcattctaaatatctttagttttgtctttcagttcacttaattttctcctcagttatatctaatctttggtttttaatgtttttatttttttattattttttttttgagacggagtctccctctgccgcccaggctggagtgcagtggcgtgatctcggctcactgcaagctccgcctcccaggttcacgccattctcctgcctcagcctcctgagtagctgggactacaggtgcctgccaccacgcccggctaattttttgtattttttttttttagtagagacggggtttcaccgtgttagtcaagatggtctcgatctcctgacctcgtgatcctcccgcctcggcctcccgaagtgctgggattacaggcgggagccaccatgcccggcctattttttatttttttatttttatttttttgagatggagtttcgctcttgttacccagactggagtgcaatggcgcgatcttggctcactgcaacctccgcctcccaggttcaagcaattctgctgcctcagcctcccaggttcaagcaattctgctgcctcagcctcccgagtagctgggattacaggtgtgcaccaccacgcccagctaattgtgtatttttagtagagacggggtttctccatgttgaggctggtctcaaactcctgacctcaggtgatccgcccacctcagcctcccaaagtgctgagattacaggcatgagccaccgcgcccggccaatatgtttttattattcatttctagaagctgttctgttttggtctttttcagccctgcttggttaatctttataatttctggttggctgcacacttttaatcttgtcaaaattatcttttagttcttcaaacatattgaatgtagttattttatattctgtctgataattccaatttgggtttttttattttgtttttggtttgtctgtctgtttgttttgagacacagtctcatatgttggccagagtagacttgaactgctggtctctagcagtcctcctgcctcagcctcccaagtagctgggactacaggcatgcgccacctcccctgatttaataattccagtatttaaagtcttgctagactctgttgcttctgctgcttcttgctgatggtacctcgttttcttttgtgcttagtcatgtttgattgagttccacatttcccttggaagtttatttgagggtatgtgttaaggcctaggctgaaggtgggacatggatgatatatggtagcattttgtgtcctttttttttcttgtttatttttagcatagaaggtattgcacgatacctgtttatctttaacttactttttttttttccatgaaaatgcaacagtaagtcatagtgctgtcattgagtcatcctttgccttgtcctctgggaactgtaggtgtatcctgagtttgaagaccagagagcttgtttgccatcaggatcctttctgacttgttcttcagacaacaccattcgcttctggaacttggacagcagccctgattctcactggcagaaaaacatcttcagcaatgtgagtggcttcctttgtgaaccatctttcaggaggaacaaagacctactgtaagcttgaatgcaggggcaggagagagtctgatggaccctagatgttaggttccatgagggcaagagccggcaaccaaggcaggtccctctctgcatcactgcctcttgtttctctttctcctgccccctctctgaggtggcacgctctatcctctctgattctttgccagttggctcctgctctgcagatgtgtggacgtggccactcccggcagcccaacacacccagcccaggtgaaattgcttcctaagtcttgagatggaattccctgggagagcacctgatgagccagcccattcagctgccacacagtgaggcctcacgggggtatgggcagaatgctggcgagagccatgatgggaggctgggaagaaaagtttgctgaggaaattttggttagtattgcaagcccagtgagagggcgtctctggggagctgagacctgagtcatgcattcatttattctgcagacacttattaacgtccatgccaggtgcttggctacatgctagggacacaacagtgactaagactcttctgtcctgtggcacacacaatctagtgagggccgacagtgaactgacagccgaccatgttaatgcacaatcacaagtgcgaaaagcactgtgaaggaaaatgtgcagggtgctagtaggacatagagcagcagcatgtgaacttatctgggacatccggagcagcttcccgcggaagggacagctaagttgagattgggaagagtaaagagggaaggggagagggtctatacttagggaatagcctgtatgaaggccctggggtgggaaacagctgggtgaattggaaaacctgaaagaggccagtgtgattggaactaaaaagaccctccatgcaggaggctgtagcaggtgccctgcaggtgcacctttattactcccctcattccctacccagtgctaccatcgtctcctctgtacctgtgacatacatgctgtttttggctgcacacaatagaaaaactcaaaacaagaggtaaaagttaggtttctgactcatgaaagtagtctgaaggtaaccagtttagaccgttctgcaggaagcccttagggatccaagggccttccagctctctactctgtcatttgagggagcaggctatgtcctcatgacccagtgtggctatgggggctcctgctatcatatctgagttccaggctgcaggatggagaaaagacagcagaagaatacgtgcttgctttatatttaatagttcagaatttattcacatattcttatctagctgcaggggaggcaaggaaataattattctgattggtgaaactcccagctcaaaattagagttgtattactaacgaagaagagactggctatggagggacacgatttcagaggtgcttctgagctgctcgtgctgacctcagccctgtccttcctgcagaccctgctgaaggtcgtgtacgtggagaatgacatccagcacctgcaggacatgtcacacttcccagaccgggggagcgagaatgggacacccatggacgtgaaagccggggtgcgggtcatgcaggtcagtcctgacggccagcatttggcttcaggcgaccgaagtggaaatctgaggcaagtgggccctggcagtgtccagtgtacacctcccagctccagctcaggttctcagggcagtgggcagaagccctggccttggcacctcctgctgcccattgggaatgaggggctgtgaatagtaatcccatgaacagctcccattgggaacttaagctcgtaagaggcttccagaagggctgagagcagagtaactaccaggacctcagcagctagggtgtgcagattttgcctatagagtgtacaggcaagctcacatgactctagggcagcgtgacactttcaccagccacatggtaccagtgctgaactgtcaccgaagatgccagctggaggagggtcctggtggctctgggagaggggctatgagggtgggatagctgagagttcaggctgcttatgtgccctgttgaggtttggcaggatgttaccaacccagtaggtgctagtgggacataggccctgttgctgggaccaggtttaagatgacaaatgacagctgtgaccacctgggtattggagccactggggaatggaggagagttgggggaaactagaggggacataaaggggcagcagccaccaggcagccccaggagagtaggctacaagttttcaaactttcctgttgtcaagaagagcagaaagtgccgatttttttctgtgaaattcgataatttttaaatattggcacctgttttgatatcagtcactgtatgagaccagctcagtgtgtcagtgagctgcttacattgacatggcactgtctggagtggcaaaacggtaccaagagccaacatggggatagtgctcttcccccttggtgggcgctggcctgagcactgtgttgactgatttaatcctctcactgacccctgatgtaagtgatgttattggcacaaggtgtctggagtaagatcacacgggtagaatgaagaagctgggatgactcgatgactgatttcatttggggagaatcaggaaggtctagatttgagactcttttaacaatgagagactggaatcaaatgttctcatccatagctcctatcctggactatgacctctggcccctagcccctggcccctgtcctaccccagggaccacctctgatgcagccctacgtaaacacctgcccccctagaagactgtcctagatccctggggctctgttctggcccaggcaccacaaggggctgctgcctgctgaggtgctccctggttcaacacggctccctttacgatggcaggtttctaaatgagaaaagtggttgtgcatgtctagagtatttggccatgataaggggttctcattgttggtggcctggccattctgacctattctagaagtggtagagcacatggggctggggtgtggggcttcagcgggcggtgtgtgtctcccaggatccacgagctgcacttcatggacgagctggtcaaggtggaggcccatgatgctgaggtgctgtgcctggagtactccaagcca

SEQ ID NO: 14899 - DNA, 1418 bp, Homo sapiens
atcacagcccagaacagcagtggcctaacctgtgaccccggcacaggccatgtggcctacctggcaggctgtgtggtggtgattttggaccccaaggagaacaagcagcagcacatctttaacaccgccaggaagtctctcagtgctctggccttctcccctgatgggaagtacatagtgacaggggagaatgggcataggcctgctgtgcgcatctgggatgtggaggagaagaatcaggtggcggagatgctaggccacaagtatggtgtggcgtgtgtggccttctcacccaatatgaagcacatcgtgtccatgggctaccaacatgacatggtgctcaacgtctgggactggaagaaagacatcgtagtggcctccaacaaggtatcttgtagagtcattgccctctccttctcagaggacagcagctattttgtcactgttgggaaccgccatgtgaggttctggttcttggaagtctccactgagacaaaggtgacgagcacagtgccccttgtagggcgctcgggcatcctgggcgagctgcacaacaacatcttctgtggtgtggcctgcggtcggggccggatggcgggcagtaccttctgtgtgtcctactcgggcctcctctgccagttcaatgagaagagggtgctggagaagtggatcaacctgaaggtctccctgtcttcctgcctctgtgtcagccaggagctcatcttctgtggctgcacagatgggatagtccgcatcttccaggcccatagcctgcactacctcgccaacctgcccaagccacactaccttggggtagacgtggcacagggcctggagcccagcttcctcttccacaggaaggcggaagcagtctacccagatacagtggcactgaccttcgaccccatccaccagtggctgtcctgcgtgtataaggaccacagcatctacatctgggatgtcaaggacatcaacagagtgggcaaggtgtggtcagagctcttccacagctcctacgtttggaacgtggagttttcaagataatgaattggttccctatcctctaaaggtgtatcctgagtttgaagaccagagagcttgtttgccatcaggatcctttctgacttgttcttcagacaacaccattcgcttctggaacttggacagcagccctgattctcactggcagaaaaacatcttcagcaataccctgctgaaggtcgtgtacgtggagaatgacatccagcacctgcaggacatgtcacacttcccagaccgggggagcgagaatgggacacccatggacgtgaaagccggggtgcgggtcatgcaggatccacgagctgcacttcatggacgagctggtcaaggtggaggcccatgatgctgaggtgctgtgcctggagtactccaagcca

SEQ ID NO: 14900 - DNA, 1908 bp, Homo sapiens
gtggagccggcgcgggcgggctgctgaggtggctgtcgccggctccgagctgcggcttcccgggccgagcccccgatggaggccgaggccgcggacgctcccccgggcggggttgagtcggcgctcagctgcttctctttcaaccaggactgcacatccctagcaactggaactaaagccgggtataagctgttttctctgagttctgtggagcagctggatcaagtccacggaagcaatgaaatcccggacgtctacatcgtggagcgcctcttctccagcagcctggtggtggtagtcagtcacacaaaaccacggcagatgaacgtgtatcacttcaagaaaggcacagagatctgtaattacagctactccagcaacatcttgtccataaggctgaaccggcaaaggctgctggtttgcctagaagagtccatttatattcacaacattaaagacatgaagctgttgaagaccctcctggatattcctgcaaacccaacaggtctatgtgctctctctatcaaccattccaattcttacctggcctatcctggaagcctgacttcaggggagattgtgctttatgatggaaactccctgaaaacagtctgcactattgctgcccatgagggaacactagctgccatcaccttcaatgcctcaggctccaaactagcaagtgcgtctgaaaaaggcacagtcatccgggtgttctctgtccctgatgggcaaaagctctatgagttccggagagggatgaaaaggtatgtgacaatcagctctctagtgttcagtatggattcacaattcctctgcgcctccagtaacaccgagacggtacacatcttcaagctggaacaggtcaccaacagtcgaccagaagagccttcgacctggagtggctacatgggaaagatgtttatggctgctaccaactacctccctacccaggtgtcagacatgatgcatcaggacagggcttttgccactgcacgcttgaacttctccggacagaggaacatctgtaccctctcaacgatccagaagttgccacggctgctagttgcgtcatccagtggacacctttatatgtacaatttggatcctcaggatggaggagagtgtgtcttaatcaaaacccacagcttgcttggctcaggaacaacagaagagaataaagaaaatgacctcagaccttccttacctcagtcttatgcagcgaccgtagccagaccaagtgcatcttcagcctccacggtgccaggttattctgaggacggcggggcgctgcgaggagaagttattcctgaacatgagtttgcgacgggaccagtgtgtcttgatgatgagaatgagtttcctcctataatcttgtgccgtggaaatcagaagggcaaaacgaagcagtcatgatgagaagcacacctcagaaatcaggacatcccccctatcaggtggttttggagaaaacaaggaaggcggaagaatggagtgcaattgtgtgagcagaaaggggggcaggaatcccgggtgctccactgcttaaaccacaggacctggttaactcctcaccaagcttcccacgaccctggttgccaatgggcgcgggagacattgtatacacatcatgctatttaaaatacgttcaaactatagtgtaaatgctaattaaccatattggtatataaccggaattttatattaaaaggggcctcctttttaaatatatgccgtgtaaaaaatgtacttataggaacatctctttgaattgtatttcttgtatattacatacttagagagagactcttttagccaggcaaagtcttttttggctgtggctggaataaatcatttattacttgggagtcccattttggacactaataataaaatcatggcaatgca

SEQ ID NO: 14901 - DNA, 1575 bp, Homo sapiens
gggctgctgaggtggctgtcgccggctccgagctgcggcttcccgggccgagcccccgatggaggccgaggccgcggacgctcccccgggcggggttgagtcggcgctcagctgcttctctttcaaccaggactgcacatgaaatcccggacgtctacatcgtggagcgcctcttctccagcagcctggtggtggtagtcagtcacacaaaaccacggcagatgaacgtgtatcacttcaagaaaggcacagagatctgtaattacagctactccagcaacatcttgtccataaggctgaaccggcaaaggctgctggtttgcctagaagagtccatttatattcacaacattaaagacatgaagctgttgaagaccctcctggatattcctgcaaacccaacaggtctatgtgctctctctatcaaccattccaattcttacctggcctatcctggaagcctgacttcaggggagattgtgctttatgatggaaactccctgaaaacagtctgcactattgctgcccatgagggaacactagctgccatcaccttcaatgcctcaggctccaaactagcaagtgcgtctgaaaaaggcacagtcatccgggtgttctctgtccctgatgggcaaaagctctatgagttccggagagggatgaaaaggtatgtgacaatcagctctctagtgttcagtatggattcacaattcctctgcgcctccagtaacaccgagacggtacacatcttcaagctggaacaggtcaccaacagtcgaccagaagagccttcgacctggagtggctacatgggaaagatgtttatggctgctaccaactacctccctacccaggtgtcagacatgatgcatcaggacagggcttttgccactgcacgcttgaacttctccggacagaggaacatctgtaccctctcaacgatccagaagttgccacggctgctagttgcgtcatccagtggacacctttatatgtacaatttggatcctcaggatggaggagagtgtgtcttaatcaaaacccacagcttgcttggctcaggaacaacagaagagaataaagaaaatgacctcagaccttccttacctcagtcttatgcagcgaccgtagccagaccaagtgcatcttcagcctccacggtgccaggttattctgaggacggcggggcgctgcgaggagaagttattcctgaacatgagtttgcgacgggaccagtgtgtcttgatgatgagaatgagtttcctcctataatcttgtgccgtggaaatcagaagggcaaaacgaagcagtcatgatgagaagcacacctcagaaatcaggacatcccccctatcaggtggttttggagaaaacaaggaaggcggaagaatggagtgcaattgtgtgagcagaaaggggggcaggaatcccgggtgctccactgcttaaaccacaggacctggttaactcctcaccaagcttcccacgaccctggttgccaatgggcgcgggagacattgtatacacatcatgctatttaaaatacgttcaaactatagtgtaaatgctaattaa

SEQ ID NO: 14902 - DNA, 5690 bp, Homo sapiens
cgtagccagaccaagtgcatcttcagcctccacggtgccaggtgggtggacacggggccaacaggggagcatctccaacagtgacctccctccccttctccctgcacgctccctccccttcccccttcactgttacctgggggtggagtgccctccctccccttcccccttcactgttacctgggggtggagtgctctccttgaattttttattttctcacaggtgaggccatggtaatagcctttaaacctgggaccctcaacctggcaaggcatcacacgatacggtctttttcctaacaagtggtgttaaccctttgcctcttcaaaaattccaatgaggccaggcacattggctcacacctgtaatcccagcactttgggaggctgaggccagcggatcactggaggccaggggtttgagaccagcctagccaacatggtgaaaccccatctctacttaaaaaatagaaaaattagctgggcatgttggcacacacttgcaatcccagctactccggaggctgaggcaggagaattgcttgaaccagagaggcggagattgcagtgagctgagatcataccactgcactccagcctgggtgaaagagtgagactctgtttcaaaaaataaaaactaaactaaaatttccaaagagcctgtagtcctagccactcaggaagttaaattgaggcagaaggatcccttaggctcaggagttcgagaccagcctgggcaacatactgagaccctacctcaacaaagaaaaattcaaagaggtaggatgcctcaggcatctgaagtggaaaggcaggtcaggcttaaagatggcagatggtgaggattatgacttgtcctaggcacagtacctccagggggaagacagacagcccctttgcttcctttgccctttatttgagcccccgctccccacccgccaggtcatggcataaaagcagatccccagtgcttgtttcatgtctctttcttggtttccaggttattctgaggacggcggggcgctgcgaggagaagttattcctgaacatgagtttgcgacgggaccagtgtgtcttgatgatgagaatgagtttcctcctgtgagcattaggaacccgtaactgggcggctcagtctgtgtgcttagaaggaaaccttcgcctcatacgagaggcagagtccctttccctgttttctaatctataacaactaattctctgctctagtatttggaaagccataggatatttgttgtactgtgtgcttcgaatcctacagagtaggctttaggtgtcgagctaaaccctgatggcattagagtcaccgaatactaatccagggagtcttggtggcctccctccagccagaggcctgcgatcccttactttgcttctgtagcactgactttgctgcctggaaggtaggaacacgtgacttgtctaaaacttattttcctgaggctcccatggatgcgtttgcagaatgctgccttccttgtgctggaggggatggtttcagagggctgggctgtgtgttcaggactctgagctgagttgctgcactctgtgaaccagcttgaccctcacttacctgcagctctggccggcagacccgcacctccccagcagttgcagacactcattaagaaacaagtggccgggtgcggtggctcacacctgtaatcccagcactttgggaggccgaggctggaggattgcttgagcccaggagttagagaccagcctgggcaacacagcaaaaccccatctccaccaaaaaaaaaaaaaaaaaagaaaagaaaaaattagccgggtgtggtgtcacgtgcctgtagtcccagctattcgggacgctgagatgggaggatcacctgagcctgggaggtcgaggctgcagtgagctctgattgtgccactgcactccagcctaggtgaaagagtgagactctatctcaaaaagaaaagaaaagcaattgtgtgctctgtggagggcagcaggtgcagggcaggagcttgcccgagcacctttagctgggtttcccagcaacctgctcagcctgttcccacagctagggccctcggggctggctgagtgctgggcgtggcttcttccatcacctggaactgaagacaagattccctcctgagagcctgctggggcttccttaactgctgattcttcaggctcccatctggagtaacatatagaccgctcttgtgagcttcagtcaaaacatcccagatagtcaacctgaaatcatttcgagatggaagtactgatttgttttgttttgtttttgagacggagtcttgctctgtcacccaggctggagtgcagtggtgtgatctcggctcgctgcagcctctgcctcctgggttcaagcaattctcctgcctcagcctcccgagtagctgcaattacagatgtgcgccaccatgcccaactaatattttgtatttttagtagagacggggtttcaccatgttggtcacgctggtctcaaactcctgacctcaagtgatccactcgtctcggcctcccaaagtgctaggattacaggcgtgaaccgccgcacccggccggaagtagtgtttgggccaagacttggagcatcagctcctagagccagagaggagctgccacttgggcactgaaacaatgtccattaggctttgttatggaaacttctcctgatcattgttttgtgtccattgagcttccaattgtaaaaggatggagtgcaggtctggcttctttctcccgcagatccgtggaaccctctagtgagcacatttggcttagaaaacaaagctgcggtggggccctgcatgcagggctggggctgttgttttgtgatttcccacatcggctctgcgggtcggtcgcagcgtgagcttttacatttctggctttcaataggcaggttgtcagagacgtggctggcaagtgaagtttatatctcagtggcggagagcagttgttcttaaaaatactaattataaacttcaaaacctctgttggcatgctgcctaactataaaccagttgttttacctttgggttctcatggccccaactggccttaaagggcgttcttctgcaccctcaagaggcggtggttatttacctgaagtcgaggcttccaggatccagagcactctaggtcagacaccgtggggacaaatgtgaccattctactctgtcagggtttaccacatccagacactcactaggttccgtttcactaattttggtaaaagtctgtaactactataaaatattattagattcttaattgtaatcgcagtaagccttgcaacctcttatagttacagaattggggtaatgtggatattagtatctaggaggtagttccttgccaaagaacctgtataaaataataggtaccttgtgcagatcatttatttggggtaaaaaggaaaaggggaggtgcttaattgaagaaccagtaagaaagtttgtcctgaggcctgtgtgcccattcagtgccaggaagctgggcatgagccagttgtttcttctccctcctaaggaccaaatgagtgaaagttggttgaaattgcatcaggaattcttatttatacgcaagaaatacttcctgccagtgagagtggtcactgaacaaggtccctagaacaggtgttagacccttgtgagtgtcaagcagcccctgtgtgcagggctgtgtcgtggcagccaccaacctctcagtctgccctccagcctgcaggtagatggtgatgaggggcagtgctcccactaaggcactgtctcagtagcaggcaggcttctccatctcaccatgtaaggaccagaggcatgcatgctcctgggatgctctatcaatatggcccatctcagtcatgcctgaattggcagaaatgttcagcgagggatgctagggaacttcctctctgtctccttattctgaattgtcatgcctattgcaaatctctgtgcagaattcacatctttactcacattccttaaaatcttctaggaccacaaaaggctcttggagtctcagcttggttaaaatcgcctctcttgtagtgacgaacaaacataggcttgcctgagtagtctgctacaggagctctgtgagccgctgccttaagaacgcgggtcatcactagtgatcttttcagaacacatactgacacttccctgcgtaggatcacgcttgcctccttgggatttacttttgctctgagagcagtgaaagaaaagagacttgatcatttctggtgccttagaaagctgctacattcgggaggatgagaagcttttgtttcaggaacaagccaacctgtacaagtctctgtattttgtgagactagtcccaatcttgtgagcaagagtcaggaaatcaggcccaagggtataaactgaccttcccttttttttttttttttttttttttgagatgatagagtctcactctgtccctcaggctagaatgtgttggcgtgatctccactcactgcaacctccacctcctaggttcaagtgattctagtgcctcagcctcccaagtagctggggtttcaggcatgctaccatgcccagctaaattttgtatttttagtagagacaggatttcaccatgttggccaggctggtctcaaactcctgacctcaggtgatcacccccctcagcctcctaaagtgctgggattacaggtgtgagccactgcgcccagcctaaactgacttttttttttttgagatggagtcttgctccatcgcccaggctggagtgcagtggtgcgatctcggctcactgcagcctccacctccccggttcaagcgattctctcctgcctcagcctcccgagtagctgggattacaggtgagcgccaccatgcccggctaatttttgtattttttagtagcgatggggtttcaccatgttggccaggctggtctcaaactcctgacctagtgatccacccacctcagcctcccaaagttctgggattacaggcgtgagccaccgcgcccagcctaaactgactttttaatagtgattgagcagtccatgtttacaagtaagatgagccttttaaaaatatatacatatacatataaatacatacacacacacacagagacatttttatagtcagtattttctagaactgtgtcatacttgtctacacctaaataagctgggtgaccattctgtggccatgagcgagttcagacagaaaaattccacagtgcccagcctctccctgctcactctgcatgggcacagacctgttgataatgcacctgcctaccagcctcttcctgagaagagtaaggccattctgttttgattttggtagataatcttgtgccgtggaaatcagaagggcaaaacgaagcagtcatgatgagaagcacacctcagaaatcaggacatcccccctatcaggtggttttggagaaaacaaggaaggcggaagaatggagtgcaattgtgtgagcagaaaggggggcaggaatcccgggtgctccactgcttaaaccacaggacctggttaactcctcaccaagcttcccacgaccctggttgccaatgggcgcgggagacattgtatacacatcatgctatttaaaatacgttcaaactatagtgtaaatgctaattaaccatattggtatataaccggaattttat

SEQ ID NO: 14903 - DNA, 494 bp, Homo sapiens
cgtagccagaccaagtgcatcttcagcctccacggtgccaggttattctgaggacggcggggcgctgcgaggagaagttattcctgaacatgagtttgcgacgggaccagtgtgtcttgatgatgagaatgagtttcctcctgtgagcattaggaacccataatcttgtgccgtggaaatcagaagggcaaaacgaagcagtcatgatgagaagcacacctcagaaatcaggacatcccccctatcaggtggttttggagaaaacaaggaaggcggaagaatggagtgcaattgtgtgagcagaaaggggggcaggaatcccgggtgctccactgcttaaaccacaggacctggttaactcctcaccaagcttcccacgaccctggttgccaatgggcgcgggagacattgtatacacatcatgctatttaaaatacgttcaaactatagtgtaaatgctaattaaccatattggtatataaccggaattttat

SEQ ID NO: 14904 - DNA, 24005 bp, Homo sapiens
gaccggcgacccggcccgtggagccggcgcgggcgggctgctgaggtggctgtcgccggctccgagctgcggcttcccgggccgagcccccgatggaggccgaggccgcggacgctcccccgggcggggttgagtcggcgctcagctgcttctctttcaaccaggactgcacgtaagctgcgactcggcccctgccagggaggtgggggacagagtgtcaggacccaggggtgtcgtcctgagagcagcttgtggcttccgcctcgaggcggcctcggcgggagggccggtgtctgcttcggacgcattgggatcttgttatccccgtaccccttcagtggggtttgccgcaccccccaccccaccccactcccagtgtcctcccagagcgacaaggttgggccaagggtgaaagcagggagttcgcaaagggagtggtggggctgcgggggccacggaatatggggggagcagggcggtgggaaagccagtgaccaaagtgggtgtctggggaagagagacagtggccaaaagaaagagatgagaaaggagaggaagttgcaagttgacccaggactctgtagttggggcccaggaagatgagagtacaggaaaaactttcccatttgtccttgagcatctcaacgtggcatctgggcagggcctcggacaaagaggcagcctatccctgcggccaggccagcccctgtcccatccccgacgcagggcatcgtgcctgcccgctctggatggaagaaacctttggatttctttggctgttttcacatcgcccacccagccaggcaggatctccttctcggagtccaagactcttttcccgggcgcagactgctttctctccaggaaacaggagctccaccctgttgtttttgagtggatttttaatgttttacttcgatgttcacatttgggctttgagagggagctgggctgaagtgtgtttcaggcatctgcaggattctgtgacttacaggcaaacgcctgtttctttccctattttcatggaagcgagccctggggaccatatggaatcatctttttggaatgtgcaccctgagcatcaggcggggatgaccgattcccagtttcccacttcctgctgtaccagtttctgtgccttggctgctggtgactgagctacgctaatattgatccttcagtggtgtaattaaggccattatgtaccattagccaccctggcttccattccctttatgtttctgtttaaaaacacccggtgctgaacaatatgcctttgtttgaaaaacccatatgtgtaatcatgtaatcgagtagctctacagcttggttatttgagtgactttcaagtttttcttgaccacaatccacaatacgaaatatgtattgcaacatcacccaatacccataacacatacactattcacaaaatatcatgtgcaattttctgtgtcctttttttctaagctgcttgtgactcactgaattgcgttttaggatccactcatgagttgagacctgcagtttataaaaatgctggtatagataaaatcctgatgttctgtaagaaacattttgcaagagggcatggctgttgaaatgcctgggtgatgttttccttcccaattgaacacaagttaagaaagggggttagtttgcttgtaagtagtaaatgttctaaattctgctttgtaacatcattagatttgacaaaaaagggtgttaatttatactctagccattaaataacgcaaagtcccagctttctacagaaattgaataagaatgttattttcaaaacggtagggtgctttgaaagttaatttccttactccctactgttagttttattttcttggatggaagctctgctgggcagctttgccttgcctataaataaaagttcttgtcacagtcagttgctttgagccacagagggtatgacattggattttaaaataagtcaagccccttactgaatacatttaggtgtattgccatgtctttttctataaatgtaggctgaatttgggatccagtatttccaaagaaggtaggtgaaaacagcaaacccttaccagtcccctacgctcatacttcgtgattggtacttgtgctatacactttgggtactttttttttttttttttttgagacagtcttgctctgtcacccaggctggagtgcagtggtgtggtcttggctcagtgcagcctctgcctcccagggttcaagcgattctcctgtctcagcctctcaagtagctaggattacaaacgtgtaccaccacactcagctaattttttgtatttttagtagagacggggttttgccacattgcccagcttggtcttgaactcctgacctcaagtgatccacccacctcagcctcccaaaatgctgggattacagatgtgacacactatgcccagcctactttgggtacattttaaatttgattaatgataaatatttgtcccaagctctgtttccatgagtggtgattagaattttgtttctacagaaagactttatggatgaaataaggtctaagtctaaattccttgattcagagtcttttgtggccattgatcaatcacgtaaaacatcacataaaacatcactctgtgattttctcatatgtagaattcttctggtccaggagcagggcttatgtttgaaaattactttaaattgctgtcactttgcattaatgttataagactctagttacagtatttctttccttacttgcaaactttacaaacctcatttcgcagccaaacacatctatatttatgtgaaaaagtttatgtgaagaaagtttaaaaacaataacactacaaaatacattttgaagttttaagatgctctgggcttacttttccagttgctgtttgtcatcatgaatacctcagtctaggtactaaatgccagttctaagtgcacagctgcaaatgtctaacccaccagtttagctacttagcaggttggagggctgcgagacgtcaccagctaccttgtggattaaaagtttactgtagttgccctatccctgtgtcccagggaagaacaaatgtctgggtagggaaaaaaaattccagggaaaatcatgtgaccttctcttttttaggctagtgaaacaagagccttggccatccaggcttgtaatagtaagttgcttattttagtatatgcttccctgtaaagagtgaatttcaccttgccttccagagaagcacacttctgtgagtgtgctccgggtcagattctgttcatcacttaggtgcggagggcacagctggaaagagctgggtgaggattcccagctgctgaacaaagttgactttgatgtttactttcaacacaaggccaagaaaatctggattcacgtcctgtctttatctcctcattgaaaaatgaaaaattaagagaaccagattttttttaagaggcactttgattgtcctagataaatgtttagtttgtattttgtttgttggttgtgatgattgctttgtaggatatagtagaaagcagagttctccaacttgggctgctcattagaatacttgaacttcaaatccaattaaacttcccagctgagtttaatatacatccaggtgtgagagctactagtatgaagtatcaggacatttttctggaaactgatgaaaggaagcatctattaaattttacctactaatgacctactatgcctactttgaaagtgtatttcttagaccaggcatggtggctgatgcctaagcactttgggaggccgaggcaggtggattacttgaggccaggagttcaagaccagcctagtcaacatggtgaaaccctgtctctactaaaaatacaaaaattagcctggcgtggtggtgcatgcctgtaatcctcactgctcgggaggctgaggcaggagaattgcttgaacccaggaggcggaggttggagtgagctgtgatggcaccactgcactccagcccgggtgacagagcgagactccctctcaaaaaaaaaaaaaaaaaggaaaagaaaagcaaagcatgtttcttcttataagcaacaaacaaataaagttatgaaggaaagaaaaactgatttatctggtaaagtgcctctcagacaacaagaaggccccctcgttgtgttggaggtagagctttcagctattatgaatattcttaaacattcaatttttcctgttatctgcccagtgggaaaaacatgtctgctagatttgacattttgttggatgacagagctcatgcagtttcatgccccttgatcatttcacttttttttttaagttgcctttgactttttcttcttttcttttgctcttcctgcctgtcaagacatgcgtcaccatttaggaagttaccaaggatctaagctcctgcagatgcttgtttactgtacccctgaggctagggggcaaaaggcatctatttgcagacagatctgttgttagaatacctgtcgttattcccatgctgtcattatcctccacagatccctagcaactggaactaaagccgggtataagctgttttctctgagttctgtggagcagctggatcaagtccacggaagcagtaagtgtgtgtgagagagacctcagggatctgcaggagaaccagagcctccttctaggctttaatctgcggtgctaccaagctgcctatttttcccttccttagccatcaaacttagggagtcaagatttttagatttaaatataaatcgttgccactacttgctttaaaccacaagcacttagatctggcaacagtttaagtaacattttctttttatagaagaaattatttgtgtgaaatcatattattgagactttttcacatgcttatatgcacagtcattaatttttataactgtcaaacctaaaggacacttgtgacattttctttctttctttttttgagatggagtcttgctctatcacccaggctggagtgcagtggcacgatcttggctcactgcaacctccacctcctgggttcaagtgattctcctgcctcagcctcccaagtagatgagattacaggcacatgccaccaaacccagctaatttttgtatttttagtagagacggggtttcaccacgttggccaggctggtctccaactcctgactttgagttatctgcccattttggcctcccaaagtcctgagattacaggcgtgagccacctcacccagccacctgtgacttatttttgccattatattggcaccataagatactgataacattgattcagttttggaagtatttgtttgaagaaggcaacggtatcctatttacatagcccatgtcaatgatgttgaagcatgtctagtgaacactgtaaataattcactagaaatgtgacttccttattttgtcagggtgatggtttatgccatcataatagcgaacaatatacaacctttcagtttcctggaaaaaaagtggttcagtaaataatattttgggctcctactttatttgtaagatgttattgttattacaccatttttgtgaattttttgctctatgtctgtcccacattgttccctgtgggccttttccaagtggaagaaaggcacacatatgaaaagaatgtgctcagaaagataccaaagccgtaacctttgtgctcaggagggtcattaactaacttcttcctgagtacagaagtactttcctcgtcataatactgatgtccagatggttttcagcaggaaagagatccagggagcacagcaagatagggggtggggggagtacagatttaactgtgttactgtcccctcccatattggcacccctctagcaggacaagaagaattctgaagcagaagttcccaactgagaagtcacgcctttgaaatctctcagggaaagggtagatgaaaattgttcaaatattccaaacatgtttgacagagcaaacagtggagccctagggtctggaggggagattctgccactcagacagcatcagaggcagctgtctgcctttgctctgacttgcagtctagtcactagtgttttctttttcttttcttgagacggagtcttgcttgtcgcccaggctggagtgcagtgttgtgatctcggctcactgcaatctcttcctcctgggttcaggtgattctcatgcctcagcctcccgagtagctgagattacaggtgtgcaccaccatacctggctaatttttaaaatatttttagtagagatggggtttcgccatgttggccaggctggtcttgaactcctggcctcaagtgattctcctgcctcagcctcccaaagtgctgggattactaggcgtgagccgccatgccaggccactagtgttttctttactttagatatttggaaaggactctgaaagtgctccctgggagagggtaaaaagccacctggcagggtggggggcatggtggatcactgtcaatgcaagctcagagagggcgcctggccggcaagacccggagaacctttggaacctggcctgcgccgggcccagtgtcatggaggctggaatccttcttggaagtgatcaatccatgtaacctcccggctgcttttcctcccagatgaaatcccggacgtctacatcgtggagcgcctcttctccagcagcctggtggtggtagtcagtcacacaaaaccacggcagatgaacgtgtatcacttcaagaaaggcacagagatctgtaattacagctactccagcaacatcttgtccataaggctgaaccggcaagtaagtggggaaatccctcagggtttcaaagcttctgctaacgggagccaaacaaaaagatggacatctttcaagatcaatgtctgtaaaacaagcttccaattctaatgagaatgttaacactcaggccccgtgtcccgggggtattgtaaacagagtctactccaggtgctggttgtaacgttgttttccctagacctctggctcatgtttccagaacgttggtccctgactggtaggctgcaccctctccctagggtacagattgggcaccgcagggatgggtcagagctctggcttggacagtcccatgagccaccgcaagagcaccttaaatcagaggagcgactcttctggttttgccctagatagtgtcattcattgcagatgttggggcaataccactgagcaggagatgcctgagagtgaagtgggggctccctgggtcaggaaagctgcccttctcccaccacgtcctcagctctcctggaaggtctgctattcagccttgggttctcatttttctttttcccagctaacccttgaagactttttgttttttttgtagcattttctttgttgaaggattattctgatctcaaataggcaatatgttctcttttaaaatataaattcttattcagtaagtattgggggtgttagcagatttccttttgaattgctgggttttcattttgggttgttgtttctgtttttgagacagggtcttgccctattgcccaggctggaatgcagtggcacaatcttggctcactgcagcctccatctcccaggctcaaacaatcctcccacctcaacctcctgagtagctgggactacaggtgggcaccaccacgcccagctaatttttctgtatttttttatattgccagagtgtattcgtctattctcacattactctaaagaactaccggagattgggtaatttataaagaaaataggtttcactgggtcaaggttctgcaggctgtacaggaagcacggcagcatctgcttctggggagggctcagggagctttgattcatggcggaaggcaaagcgggagcaggcgtcttacgtggcaggagcaggaccaagagacgggtggggggtactacccactattaaacaaccaggtctcgtgagaactcactcactctatggtgggggatggtactaaaccattcataagaactctgccaccttcctccaacactgaagattacaattcgacatgagatttggggagggacactgatctgaatcatattacagtgtttccccatgttgcccagtctggtctcaaactcctgggctcaaggatcctccttggcctcgcagagtgctggaattacaggcatgagccaccacgcttggccaaattactgtgaaggcaggcactgtgctggtgtgttcaccattatacgacctggtagaaaaggcagtgcttggtagatacgtgctcataaatatctgtttcctgactgactgttaaataagtaaataaacaaagagattctttatgtgaccatgcagatttatctattcaattaagtattcccagagcggttgctgcattcattgaggacaatgttttcttctgtctttgtctaaactcttaagtactaattaattttttttaacaaatgagacaaataaatgctttttaaatttatgagaaggaagggattgtttctttgaattgatcaactctttcaaatgaaaatccacttaagtccacctaaagcagtgcggtgaaaaatagctggagaaagagaagtgggaccttttaagtagggagtagcaggagtaagaaagaaaagaaacctgcattcttggcaagggagggaaaggcagtttgagagttttctgattgaaggcttttagatgaaattcttgactcaggtgttttcactgaaatctgttggtagcagattaagtttcgctgctaaactttttatccttgcatatagtagtaatccgtatacaaggttaaatgtctgtttttggcacctgatgatctttttaagattgtttaggcaaatgatctgtaaagaccggaaccctcaaatagcgtctattgtatttgcttgtatgatttctctctttctgtctggtatattcattagcaaatgggacaaggaaggcctatttgagtgtccgagtctgttaacctttaggtgccagcctccccttaatataatactcattaactgtgaggttctcctcccccaccttctaaagaacactgatgcaccaggaactgtcagcaattcatggcaaagccacgaaccaagatctaacagttctcggaaccaagatctaacgtcggaaccaagatgagcatcggttcattggaaccaatatctaagagttctcccttcctttacatttcttctccgacaagaatgatttgaaacaggtctgggaagtattgggggtttgcttttcttaaaactttcaggtttgggacttaaattttggtttaagcaactcagctgctgcagcctctcttgccaggtagggattctgtggtgtccgggaggactgcccactctggggaaatgataaaggcccaaggggagtgtgtcctgttctattctgtagcactcagtctgctacttcctcaggccttcagacagcacagtttcttttttgaaaaacaggaaaaagttaaagatttggataaggtgttataaggatccaaaatcccttttatcttttttttttttttttttttttgagatagagtctcactctgttgcccaggctggagtgcagtctcagctcaccacaacctctacctcccgtgttcaagcaattctcctgcctcaccctcccaagtagctgggactacaagcacctgccaccacgcccggctaatgtttttgtatttttagtagagatggggtttcaccatgttagccaggatgttctcgatctcctgacctcgtgatccacccacctcggcctcccaaagtgcagggattacaggtgtgagccaccgcacctggccccaaatcccttttttctaagtatataggaaggaaagggccaagtgtggtcccagcacttcaggaggccgaggcaggaggatcgcttgagcccaggagtttgagtccagcttgggcaatgtaacgagacctagtctttactaggtctttactataaaaataaattagctgggcatggtggcacttgcccgtaggcctagctacttgggaggctgaggcaggaggatcgtttaagcccaagagttgaaggctgcagtgagctatgatcacgctgctgcattccagcctaggtgacacagcaagaccctgtctctataaaaaataaaaatttaaaaatttaaaaaagaagaacacttaggaattgtcatatgtttcatttttagttaatgttatttctcttgtattgaactgaggaaatatattttatggaatcaagacagctgtatgatgtatttagatttgcatacttttacagttcttttgcagtctcctcccaggggcccttgctatccagatggaggctgattggctcgaagcctctgaggccaaatctgtggtgttctagggcagatgctataaatattttgtaattgataaaaggagttattgcttataaaacctagaaaagtagatgaaattcaaagcaacagacaaggagctgagttgaaggcaagaccatggttctgcgggggctgaaaactgatagttaaaaaagcaatcagcagcatcgtgcccaccccagaagcatgctctcacacgaactaagagtgcatcctcgttccctcccagtgttttctctctgtttccctctgcgtttagtcttatctgcagccagcatgagggtgacctgaaattcagctgagtgagccgcagagcagatggtgccatcagagctcttgggaaaaaaatgcagatcagatcagatgggctagatgtagatgctgtttctaggagaggcatatgtcaaggccccgctatcccagggattgggtgtggggctgggaggggacacaagaggatatcagaaacctctgaacagaaggaagcatagaaccacgtagttctaaccacggcatgtgctggcaaaaggcacagtgattggataagtcagagaatatttcacagaggaacactcatatttatcatcaattttgagaacctgttagaatttttttaaccctcagtccccagtctcagacctacgacagagccttaggtaaaactgagaaagggctgggcacagtagctcatgcttgtaatcccagcactttgggaggccgaggcaggaggagctcttgagctcaggaggtagactaacctggacaacatagtgaaacccgggtctctacaaaaaataccaaaaaattagccaggcatggtggcgcacacctgtagtccctgccacccgagaggctggggtgggaaaatggactgagccccagaggttgaggctacagtgatctgtaatcctgccactgcactgcagcctgggtgacagaacgagaccctgtctgaaaaaaaaaaaattgagaaatgtgtttaaattttatttttctgcttggttaacactgatgaccttcatcattctgagccatggatagtcttccttggggaatagcagggcaggcttttcccaggagcagagcctgcctcttttgtgtggtattttttggtaccttcccttctagctgatgttccctggaataaaaggagctggctgagaccagtggttcttgagcctcagtgtgcatcgcaatcacctggtattcgtctaaaaacttcccaaaccagaatctccggggagagcccagggcttgctccttgggcagctccttgggcatccaggtctaagaaacactggcctgaggggagccaagtcaggcatgtgcaggggtggtcggcagctgctcagatgtgcgaggagctgcccaaccagaaatgccttcctgacacctcctcaccagcaccgatgtctgcccttgtactgggctatgcgttatattcctttaaacacccgatacatcaaccctgtggcctgttttcacttagctgagagcacagccattgggaagaggctctgaacctgacaagctttcatgtggagaggaagagaagggtctggcagcagtggggagagcaagcaccagagagaggagcccaggaaggaacagtggggacgtggggcactggggtgttcaaatggggccgaagcccttctccttttccctttgccagggctcagacagcggcccaaaagcaggcctggaggagagtctgagtagaaataagttagagctggtaattattcagagaggggtaaaacctaagatttggtgatggagagaaagcaaagaaacccatttttatataggagggagacctgtgctataaacactgaaaggcagcctgttagatggcagtggaaactacagaaggcacatgaaattgtcttacatggcacagggggtctgatcagaaagtgttcagaagtcctgttgaacgcggtggctcaggcctatcatcccagcactttgggaggccgaggcgggcagatcacctgaggtcgggagttcgagaccagcctgatcaacatggtgaaaccccgtctctactaaaaatacaaaattagccaggtgtggtggtgcatgcatgtaatcccagctactcaggaggctgatgcaggagaattgtttgaaccctggaggcagaggttgcagtgagctgagattgcgccactgcactccagtctgggtgacagagtgagactccttctcaaaaaaaaaaaaaaaaaaaaaaagtgttcaggatccctgttctaaggaaagaaggagaaggaagagagggagggaggaatggagggagggaagaaggaaggagagaagtaaaaacaatcttaatttctaataaaatttcttaagatcttgcattttatgcttgtgttcaggtggatgattacatgtgtatgtgtgtacatccataaacacaatcttcaaaatgcatcatcaaaattctgctttaggcttagaatcaagttaggactcatatgaaagatgaatgatttggatttggtcagggtctttgtaaggaacggttcggtagactgataagtctgtgtgattacagaggctgctggtttgcctagaagagtccatttatattcacaacattaaagacatgaagctgttgaagaccctcctggatattcctgcaaacccaacaggtgagctccaaaaatggaacaaatgtccctgaaatttcatgtcctggtgcttctttcccaagctttattttcctccaaattgcgaacgtgaagcagtgtttgctttttgagtcttagtgaggtttatctcgaagctttgtcttaatggcggcagattcaaattatgtcaggctgtgtgtcctgcaggggggctgtgtgcccttcattgcagtccaagaataacaacaccctttgtctgggacccatatcagcaaatgtgtcaaggcacgtaaggtagacatgtaaaagatttcaagcatctgctgttgaaaagtgtttacccctaattgttttttgtggttcgttcagtacagagtaggcgtgataattagaagcaggtttcaacttggcgtgtctgcatggccagcaaaaagacaatctgaaccataaagaatatgttttattacatgacaaagaaatctctctacttcgacgatatgctaggatattaaaccttactgaattctcgggatttaacactatttaatacattcctggtgtataagaagaggaatggtttggatttgttatattgaaatagcagatgacattatatgaattcatcaagctaggagtaaacaagaaagaattccttcattgtgtggtggggtgaggagtcagcacactggaacaacttgtacatttaatgactccagattaatatttgcagattatatttcagtttggtatcattgaacaactgcttctattatatttcagtttagtatcattgaacaactgcttctatttgctgtttctgagttatttggctttcactgaatttcaagatctatctgggtgccatccaagtcacctagactttttgaaccttggttcccttatgaataatacccatctcccagggttggctgagaattaaacaaggtaatgtttgtgaaagtgaccagcacaggaactgccatgcatgaaatacttctgatgccttctcttcattccaattctataaatggcccttggctgttgatttcagtgctttcacatttcagctatggcaaaaggatattttaaaagaacaaagctagccgggtgcggtggctcacacctataatcgcagcacattgggaggccgaggcgggtggatcacctgaggttaggagttcaagaccagcctgaccaacatgaagaaaccctgtctctaccaaaaaaatacaaaaattagctgagcatggtggcgagtgcctgtaatcccagctacttgggaggttgagacaggaaaattacttgaacccaggaggcggaggcttcagtgagctgagatcgcaccactgcactccagcctgggcaacagatcgagactctgtctcaaaaaacaatgaataaattaaaaataaataaataaataaaagaacaaagccattgaggctgttagggagttctgtgagataatgactttgaagcacattttctgaaatggaagacggtacgtgaagaagctgtgggtggtaagtttttcccttagaaatgagaggctgaaatcatctggacaagtatctattgcagacattctttgtgcttggcaccatagtaggcaccattaggcaacctcataccaggagcccaaaatctagttgtcacgagttcccttcaacagtctgtctgaggtggtctgagacaggtgcgccagcagcctttggcaggggtggaaccatgtttaactctggggtgcggacacagttgaagggagcatgtgctcttctgatcaggaatgagaggcccctgaatctgcatagagcttgaggctggcagggcctgagctgggccttcagggatttggggagggacatcgggcatgcagaaagctagaagctgcctgtggctctcagtttctctgaagagaggggagtggacagtaaatgccacttactcctcacacctgttgcacacttgacccccagaggacagggttgcttcaggactgagcaccctcccttgcaaacagatgtttctcctttttttttttttttttttgagacacagtctcactctgttgcccaggctggagtgaggtggtgcaatctcagctcactgcaaccttcgcctcccggattcaagtgattctcattcctcagcctcctgagtagctgggactacaggtgcctaccaccacacccagctaattttttgtatttttagtagagataggatttcaccatgttggccaggctggtcttgaactcctgtcctcaagtgatccgcccgccttggcctcccaaagtgctggaattataggcatgagtcagcatacttagccaccatttactcttattttttagcaaatatagttgtttttctgtagttcagaaaactcactggttgccttactttctgcagcttaaacagagagaaaataaggtttaaaagtgcagggctatttgtgttccctgttagagacagtgtatattgtttgtaaagggaatcgattttatctcaagaaaaatgagaaacaatagcagagacttcctctgtctcagataaaagaatgcctccttatgaaaggatccagggataggttgagtatttcttctgaaagaccaggagcaaactgtgtctttttagacctctgatgttctttggagatatagcccaaggtgttttaaatgctcacgtttataattatcacctcaacttctcctgagctccctttctactgcagtaaaatggagatgatcatttttagcccccagagttgccacggagagcgttacctgaggttgtggcctgggtgggcaaaggtgggtccgccctgtccatgcgggcagtcagactcactccgcagccctctctgtcccataggacagccttgcacaggtcagagctgcgcttcagtgacatgaccaggtcctcactcgggaaccttcagaggactccgccctgccaattatacattccccagaggccaggagtcgccttatctgttctcatcctctagtttattttctgaacaaagaaataagatggaaactgtgactgttgattttataaatccttgctgggtacagaaggaagacacaatcactcgtctaattgtcttcagcacacaaatcctgaatgcattttgacttcataaactacaagtaaattagctatacagagttcgcctgttgcctcacacttggtatctaacgcagctgtaaatttccttctttctgtctgtttgtgtcatgcccgttcctgttgtgtcagagattgcaggctgtttcctttaaagagcttggccagacaggggctcgaagttaatttcctgctagcacagcagtctgctctgagcagtcaagggtggaaatctccatgaaagtcctgccaactgcagacctcccagtatggaggaggtggtcacagagctgaccaccttttatgggatattgagggagcgttccataccacacagcaatgcagatcattgaacagttcatggtttcttccccagcaagacctctttcttgtttgaaaatgctaataaaagtggtataaatgcttcccttttgtaggagcatagggcatttgctgtacaaagaagatgtctttctatttttgaaaatcggaaagcgtaacctgagacattaatcaactcagagggaactgcattttataaatcactgttaacttacctaaagtttgacatgcaatactttaaataccaagatgagaatcatttagaatcatgggacttcctttgaattccactgatgatgccattggttcttgagttgagagcaggcacttcttttccagctgtagaagaattacagccaaacaattacagtggaattatagctgccagtgacttatgaaaatatgtgtcaagctataacacatccaaaagccccatcagaacctcattcctaggtagaaaaaagactggaagaaaatatgctcagatgttcagaacagtgaaaagcctctgggttttagaattgtgggtgattttttttctccttatattttctaggctttgcaaatgttctacaccatcacttttatattatacaataatatttttaaagcccatatccttccttaaaaaggctttgtgtaacacctgtaacagaaagaggagactggcagaatggcaatagccaagctaaggaaaactcttcttgcttgccttgggtggttcccaagatacgaagatacattcgtgtggctcgttggatttttctgacacttgggccatagggaagtcacagtaggcttttctggggaccttcattaagtctgtaagggtaggaaggcaggattccttgtctaaattcagatggattggtagaggtgcgagcctggaggcaaaactgtcaaataagtggtatgtgtcagagtatgcctgccctcactcttatcctttgtccctttcttgttagcatctagtgtcaaccagttctataataggtattgcagaaagttcaatattagcttagaaagtttaaacgtttcttcccttctgggaatatttatgttttaacataagactctgaagcacagctggaggtatgcgtccaaggcttctgctccaagactgcttagctctctctgccacaaagacacgcccagtattttcagagggaagaagtaagaaacgaaggcttggcatcttgaagtgttaaatctggaaagacctctatatcacggtagccttcatttcacagacaggaaacaggcctgaaagagcagcaaataactcggccagagtttcacagtacatagcagacctcagtcttgaactcatgtcctcagcctatctctaaccagataaatattcctgaaacatgccttaaaataaaatttgaaaatcttttttgagataaaattcacatcctatacaattcacccgtttaaaatgcatggttcaatagcttttggtatattcacggaattgtgtaaccatcaccacaattaattttagagcattttcatcgccccaaaccttgtacctctaagccatcactccctatgcccccagccataggcaacccctaatctactttctgtctctattagattatggatttctctattctggacattttatatcaggagactcatacaatatcggttcctttgtgactgacttctttcacatagcctaatgtttccaaggttcttctgtgttgtagcatgtatcaatactttatttttcttgctggataatattctattataaaaatatatcacattttctttatccatttatcagttgataacatttgggttatttccactttttgacttatgaataatgctgccatgaacattcatatacaagtttttgtgtggacatatgttaaatttctcttgggtgtatatgtaggagtggaatttctaggtcatatgagaactttatgtttagcttttgaagaactgctaaacgttccagagcactgccccattttacattcccaccagcggtgcataagatcccagtttctccatatcctcaccaacatttatctgtctttttcactatagtcatcctagtggttgtacagtggtatctcatcgtgtttttaacacagcctttttaaaaacatatgtgctaggccaggcacgatggctcacgcctgtaatcccagcactttgggaggccgaggcagatggatcacctgaggtcacgagttcgagacagcctggccaacatggtgaaaccctgtctctactgaaaatacaaaaattagctgggcgtggtggcacacgcctgtaatcccagctacttggcaggctgagacaggagaatcgcttgaaccaaagaggcggaggttgcagtgagccaagatcgcaccactgcactgcagcttgggcaacagagtaagactccatctcaaaaaacaaagcaaaacatatgtgctgagaaaccttcagcagttacacactgcatttgtaaggtcttaactctttagtttggtacgctagtccttgtaagatttccacagtcttcacatcttttctgccagccgcctctttgggaacccagcacacaagacaaccagatctcctgactgccttccctccccagtttcacaagactagaatcccttctgcctgcctagctgttcttgaaatttcatttggatagcaaagaattcagaaggggtgaggaattggggtttccagagcaaaactggaaatggacgagtggcctcttctaaggctggggccaggaatgaccttgtatcgccaaaggggtggcagggctgccagaacgtgcagttaaaggttccggggctcagccacttcctcccgtagctatgcatggcaagtgataagaggacagccctgctgtggactcagcaaagccagagcaggaaatgagacctaggttccaactctaaatgtttactttctttttcctttgctctccttcctcagcagattagttgaggtatgtttcagcctgacctaaagttttttcttatacttttagaagaaacccacttaatatactaacttgtaatagacgccagtcactttttttttttttttttttttttttaagagagatgtctctcttgcgtgatctcaaagtttctggtaacactttggtttctatggaattgctggaattcactgctatcatgtgcacctctattcatctaaaccattgttttgaaaatcctttacttaaatgctcccttcttgaatccccttataaataaaaacagcttatgttggttcagtggtttgatgggctgtttactcttccggaatattattgaagcatcttaaatccaaaatgtcctctttatttagtttgtctcaatgtctaggcacaccatcttgactgcagacgcagacctcaaataaacttcctcctcgggaggtacccatttcccttatcaaggcagggcatttggctcagaaattgctcggtttctttttttttttttcttaagacagaacctcactctcacccaggctggagtgcagtggcactatcttcactcactgcagcctccacctccaggtttaagcaattctcctgcctcagcctcccgagtagctgggactacaggcacatgcaaccacacctgactaatttttgtatttttaatagagacagggtttcactatgttggccagcccgatctcgaactcctgacctcaggtgacccacctgcctcggcctgccaaagtgctgggatcacaggtgtgggccaccttgcctggcctgaaatttctcagtttctaaataggttcttggcagctcctcttctccaacttgaagttactggccaacagtatataatcatctgcagaaagaccaatatgtactgacttttcactataggaagatttatttcagttttgaggaaatctcttgtaaccctagaggataatggaattggaagaaaagtagatgctgtttcagagtcctggggtaaaatgtaaaaatgagcaatatatacacacacacacacacacacatatatatatatttttttttttttgagacggggtctcactctgtagcccaggctggagtgcagtggcacgatctccactcactgcaacctttgcctcctgggttcaagcgattctcctgcctcagcctcccaagtagctgggactataggcacgcaccaccatgcccagctatttgtatttttagtagagatggggtttcaccatgttggccaggcttgtctggaactcctgacctcaagtgatccgcccgcctcaaagtgctggaattacaggcatgagccactgtgcccggcaagtctcattgtttcactgtagcaaggacgcagccagtgttaaatcaggaggtcttcccctgtgaagttgctttattggaagccttaatcagaagaatcatcagcggaaagcagttgtctgcaaagccattcctccccttgccagtaggtggcactgtagctgtactgttttcagatgccctctccagccgtgcaatctctcccttggccccaggcttctcatgttctgtttcttctttgccaggtctatgtgctctctctatcaaccattccaattcttacctggcctatcctggaagcctgacttcaggggagattgtgctttatgatggaaactccctggtaagttgacggtgacctggctgagccaacccacctgccttggctgtgtggtcatggaaggagatagataaggacgccctgccgtcgggggctggaggcggtgggagtaagcaatactggggagttgttcaagagaaggtgatactatttcccctcgggcttgctgtgagtcaacctcaccataagccagctggccaggccaagttagacatctgcagcataatgaaaaccacttgccagcagggggccagttgtctccctgaatgtgtcaccctgtcccatgccacagcctgagacagtgtgcaggtgtttcatattccctgccctctggtctctgaggcatccctgagcgggacaagattgctgtgggaagttgcctaaagatgcgtgcagggcgcgcctgcgacggcatcacactgcatcaggtgctccgttcgtggccaccttcccaagggcaggaaaagggatggaaatggagtggcccttgaagccaaatcttgattcaccagaaaatgacacacagcttacatgcagatggcctgggggacagaggaagagacagggagctggacaaaggagggagaaaggagaaaagaggaaggggagggaggtgaaatccatcttccctcctccgcagcatctgtatccatttttccttttcaccaacagaaaacagtctgcactattgctgcccatgagggaacactagctgccatcaccttcaatgcctcaggctccaaactagcaagtgcgtctgaaaaagtgagtccactcccaccaacacctctgtctgggtttcgctggatggctcctgccgtgcgcagggatgggattgaacaaacctggtgacatgaagactgactggtctctgggcccactcagaatttgtttcagagggagaatttctggcctctgcatgtgtggtatattcatgcatttgttaattcaataggccaggggcctgcaatatgcaagatacaagacactttgcatgaaaactcgtggtcttatgaagaaatgtacgtgtacatcagccgtagagacggacaaatgctacaccttataaacacagtacagtgcaaaccaaatgctttactttgctatttagagaaattgatgtcttctgcctggaataatcagagaaagtgatccaattgaattttttttttttttttgaggtggagtctagctctgtcgcccaggctggagtgcaatggcgcaatctcggctcactgcaacctccgcctcccaggtttaagtgattctcctgcctcagcctcccgagtagctgagattacaggcacatgctgccacgcctggctaattttttgtattttagtggagacggggtttcacttcactgtgttgcccaggctggtcttgaattcctgagctcaggcaatccacccgccttggcctcccaaagtgctaggattacaggcgtgagccaccacacccggcctcaaattgaaattctaagaaaccagagcagttgggtgaacacacacatgcacacacacatacacgcagagccttgggcacaggtggaagggaaaaggtagacagagggtgtttataacattttccaagaattgttgatatggcacataaataaacatgcctctatgctcaacgtggtgttcttcctcctcagagacagatgttcaaaaccaataaaacaaactcctctctaaagggacatctctgtgtaaagccactaatggttatgaaatgtccacctgctttcttttccagggcacagtcatccgggtgttctctgtccctgatgggcaaaagctctatgagttccggagagggatgaaaaggtctgtgttcaatgtcaaacccattttaaagtccccgcagaagtcccgcagggaccgctggcagctgtctagggagaggacagagagtggctctgtgccctccactcacctggaggaagtgtaactactctcccaggtaattgactcccaggctttacttagggctcagcaaaactgaaagccgagatgctgttttaacacagttcagccgtgagagtccctttttgatgtgtgtgtgggcggccggcacaggagaaatgagagagccagggagtcacaatccaaaaataatttctgatttccttccatggaaataaaggacgatgtaaagtgtgactgtttgggatcttatcggatgtaggtttgcagccagatcagtgcacagagcaactggaagattccaagatgccaggaaggcacagttcctcccttctgctgacagaggcagggctataccttgtttcttctcacataaataagactatgggccgggcgcggtggctcacgtctgtaatcccagcactctgggaggccaaggcaggcagatcacctgaggaccagcctggccaacatggtgaaacaccgtctctactaaaaatacaaaaattagctgggtgtggtggtgtgtgcctgtaatcccagctacttgggaggctgaggcaggagaatcgcttgaacccaggaggtagaggttgcagtgagttgagatcaagccaccgtactccagcctgggcaacagagcgagagactctgtctcaaaaaaaaaaaaaaaaaaaaaaaaaaaaaaaaaaaaaactatgaccctttgtgaatctttctgacattaatttctaaatatgagcaccacagtgtttaagggatctgggtctacctaggctcttcaggatacatctgattttcttataaagctgatctctgagttataaggccataactcccatttctcttgctcactgacccatgtgttgctgtgcttgtaggtatgtgacaatcagctctctagtgttcagtatggattcacaattcctctgcgcctccagtaacacc

SEQ ID NO: 14905 - DNA, 780 bp, Homo sapiens
gaccggcgacccggcccgtggagccggcgcgggcgggctgctgaggtggctgtcgccggctccgagctgcggcttcccgggccgagcccccgatggaggccgaggccgcggacgctcccccgggcggggttgagtcggcgctcagctgcttctctttcaaccaggactgcacatccctagcaactggaactaaagccgggtataagctgttttctctgagttctgtggagcagctggatcaagtccacggaagcaatgaaatcccggacgtctacatcgtggagcgcctcttctccagcagcctggtggtggtagtcagtcacacaaaaccacggcagatgaacgtgtatcacttcaagaaaggcacagagatctgtaattacagctactccagcaacatcttgtccataaggctgaaccggcaaaggctgctggtttgcctagaagagtccatttatattcacaacattaaagacatgaagctgttgaagaccctcctggatattcctgcaaacccaacaggtctatgtgctctctctatcaaccattccaattcttacctggcctatcctggaagcctgacttcaggggagattgtgctttatgatggaaactccctgaaaacagtctgcactattgctgcccatgagggaacactagctgccatcaccttcaatgcctcaggctccaaactagcaagtgcgtctgaaaaagtatgtgacaatcagctctctagtgttcagtatggattcacaattcctctgcgcctccagtaacacc

SEQ ID NO: 14906 - DNA, 1888 bp, Homo sapiens
ggctacatgggaaagatgtttatggctgctaccaactacctccctacccaggtgtcagacatgatgcatcaggacagggcttttgccactgcacgcttgaacttctccggacagaggaacatctgtaccctctcaacgtacgtacaatgacacccactctgaacaagaccacactttcgtcaatgtatttttccaaagcacaaaaatccccaaacctgaaaagaaaaaaagaaaacttgccccaggctgggcacggtggcttacatctgtaatcccggaaccttgggaggccaaggcaggcagatcatctgaggtcaggagtttgagaccagcctggccaacgtggtgaaatcccgtctctactaaaaatacaaaaattagccgggtatggtggtgcgtgcctgtagtcccagctacttgggaggttggggcaggagaatcgcttgaacccaggaggcggaggttgcagtgagccgagatcatgccactgcactccagcctgggcgacagagcaagactccatctcaaaaaagaaaaagaaaacttgccccaaaggaagggtgagcggaatcaaacccctgcttttcctatctgacttcaatacggattctcagggggcagccagaagttggcatgggaattttagccttctggttataatgacactgtcttaaaaacaattcttatttttatgtaattatgtaaaaagcctccagatctgttttctaggttcggactcctatggggctgacagatgttttaagaagtttaaaggagtttattcaaaagttgaacatttttaaaatttcacaaaactaaccagcaaagacagtaagccaatcctccatttaccccctttctgtcttggttaagggcagagacacatgtcagagggagactgcgtcccatgtagggagctaatgtgttcactagctattgcttctcgcagggtcgcagcatctacactcacttgcctcatccacactgtcacgttcaaagacaagaaataatcctgaaagtagatcccaaggccagaatgcaaaggaatagccagaagcccagaccagatcagtgggctaagggtttgtcaaaggcagaatctggtgacagctagggtgaggggggctttgtcattggaagcgaatccatcgcccatcttcgttgtcatcacggtttatgttttccttggcccttaggatccagaagttgccacggctgctagttgcgtcatccagtggacacctttatatgtacaatttggatcctcaggatggaggagagtgtgtcttaatcaaaacccacaggtgaagagactgcttttcaaaagacagcctttcgagagctggtcgtgtagagttgtcccttcgccaagaacgacaagcttcagtgcccttgcattgatttgttcttcactggcagtctcagtggcaaacctctagtgggcaagtgctctgcaccgggctctgtgtcaggtgccctcagcatgtggtaatcatctggaaaagtgccaggattaataacacacaagatggtctccccctcagcctatgctcctaacacagccctgagctcacagtgggtgttcaaaaatattccctgccaccaggtgtggcggctcacacctgtaatcccggcactttgggaggccgaagcgggtggatggcttgagtccaggtgttcaagaccagcctgggcaacatggtgaaaccccatctataccaaaaacaaatacaaaaattagccggttgtggtggcacacacctgtagtcccagctactcaggaggctgaggtgggagaatcacctgagcctggagaggttgaggcagtgagccatgatcacaccattgcactccagcctggacaacagagtgagaccctgtctcaaaa

SEQ ID NO: 14907 - DNA, 829 bp, Homo sapiens
ggctacatgggaaagatgtttatggctgctaccaactacctccctacccaggtgtcagacatgatgcatcaggacagggcttttgccactgcacgcttgaacttctccggacagaggaacatctgtaccctctcaacgatccagaagttgccacggctgctagttgcgtcatccagtggacacctttatatgtacaatttggatcctcaggatggaggagagtgtgtcttaatcaaaacccacaggtgaagagactgcttttcaaaagacagcctttcgagagctggtcgtgtagagttgtcccttcgccaagaacgacaagcttcagtgcccttgcattgatttgttcttcactggcagtctcagtggcaaacctctagtgggcaagtgctctgcaccgggctctgtgtcaggtgccctcagcatgtggtaatcatctggaaaagtgccaggattaataacacacaagatggtctccccctcagcctatgctcctaacacagccctgagctcacagtgggtgttcaaaaatattccctgccaccaggtgtggcggctcacacctgtaatcccggcactttgggaggccgaagcgggtggatggcttgagtccaggtgttcaagaccagcctgggcaacatggtgaaaccccatctataccaaaaacaaatacaaaaattagccggttgtggtggcacacacctgtagtcccagctactcaggaggctgaggtgggagaatcacctgagcctggagaggttgaggcagtgagccatgatcacaccattgcactccagcctggacaacagagtgagaccctgtctcaaaa

SEQ ID NO: 14908 - DNA, 1886 bp, Homo sapiens
cccgtggagccggcgcgggcgggctgctgaggtggctgtcgccggctccgagctgcggcttcccgggccgagcccccgatggaggccgaggccgcggacgctcccccgggcggggttgagtcggcgctcagctgcttctctttcaaccaggactgcacatccctagcaactggaactaaagccgggtataagctgttttctctgagttctgtggagcagctggatcaagtccacggaagcaatgaaatcccggacgtctacatcgtggagcgcctcttctccagcagcctggtggtggtagtcagtcacacaaaaccacggcagatgaacgtgtatcacttcaagaaaggcacagagatctgtaattacagctactccagcaacatcttgtccataaggctgaaccggcaaaggctgctggtttgcctagaagagtccatttatattcacaacattaaagacatgaagctgttgaagaccctcctggatattcctgcaaacccaacaggtctatgtgctctctctatcaaccattccaattcttacctggcctatcctggaagcctgacttcaggggagattgtgctttatgatggaaactccctgaaaacagtctgcactattgctgcccatgagggaacactagctgccatcaccttcaatgcctcaggctccaaactagcaagtgcgtctgaaaaaggcacagtcatccgggtgttctctgtccctgatgggcaaaagctctatgagttccggagagggatgaaaaggtatgtgacaatcagctctctagtgttcagtatggattcacaattcctctgcgcctccagtaacaccgagacggtacacatcttcaagctggaacaggtcaccaacaggcaatcgaccagaagagccttcgacctggagtggctacatgggaaagatgtttatggctgctaccaactacctccctacccaggtgtcagacatgatgcatcaggacagggcttttgccactgcacgcttgaacttctccggacagaggaacatctgtaccctctcaacgatccagaagttgccacggctgctagttgcgtcatccagtggacacctttatatgtacaatttggatcctcaggatggaggagagtgtgtcttaatcaaaacccacagcttgcttggctcaggaacaacagaagagaataaagaaaatgacctcagaccttccttacctcagtcttatgcagcgaccgtagccagaccaagtgcatcttcagcctccacggtgccaggttattctgaggacggcggggcgctgcgaggagaagttattcctgaacatgagtttgcgacgggaccagtgtgtcttgatgatgagaatgagtttcctcctataatcttgtgccgtggaaatcagaagggcaaaacgaagcagtcatgatgagaagcacacctcagaaatcaggacatcccccctatcaggtggttttggagaaaacaaggaaggcggaagaatggagtgcaattgtgtgagcagaaaggggggcaggaatcccgggtgctccactgcttaaaccacaggacctggttaactcctcaccaagcttcccacgaccctggttgccaatgggcgcgggagacattgtatacacatcatgctatttaaaatacgttcaaactatagtgtaaatgctaattaaccatattggtatataaccggaattttatattaaaaggggcctcctttttaaatatatgccgtgtaaaaaatgtacttataggaacatctctttgaattgtatttcttgtatattacatacttagagagagactcttttagccaggcaaagtcttttttggctgtggctggaataaatcatttattacttgggagtcccattttg

SEQ ID NO: 14909 - DNA, 1804 bp, Homo sapiens
cccgtggagccggcgcgggcgggctgctgaggtggctgtcgccggctccgagctgcggcttcccgggccgagcccccgatggaggccgaggccgcggacgctcccccgggcggggttgagtcggcgctcagctgcttctctttcaaccaggactgcacatgaaatcccggacgtctacatcgtggagcgcctcttctccagcagcctggtggtggtagtcagtcacacaaaaccacggcagatgaacgtgtatcacttcaagaaaggcacagagatctgtaattacagctactccagcaacatcttgtccataaggctgaaccggcaaaggctgctggtttgcctagaagagtccatttatattcacaacattaaagacatgaagctgttgaagaccctcctggatattcctgcaaacccaacaggtctatgtgctctctctatcaaccattccaattcttacctggcctatcctggaagcctgacttcaggggagattgtgctttatgatggaaactccctgaaaacagtctgcactattgctgcccatgagggaacactagctgccatcaccttcaatgcctcaggctccaaactagcaagtgcgtctgaaaaaggcacagtcatccgggtgttctctgtccctgatgggcaaaagctctatgagttccggagagggatgaaaaggtatgtgacaatcagctctctagtgttcagtatggattcacaattcctctgcgcctccagtaacaccgagacggtacacatcttcaagctggaacaggtcaccaacaggcaatcgaccagaagagccttcgacctggagtggctacatgggaaagatgtttatggctgctaccaactacctccctacccaggtgtcagacatgatgcatcaggacagggcttttgccactgcacgcttgaacttctccggacagaggaacatctgtaccctctcaacgatccagaagttgccacggctgctagttgcgtcatccagtggacacctttatatgtacaatttggatcctcaggatggaggagagtgtgtcttaatcaaaacccacagcttgcttggctcaggaacaacagaagagaataaagaaaatgacctcagaccttccttacctcagtcttatgcagcgaccgtagccagaccaagtgcatcttcagcctccacggtgccaggttattctgaggacggcggggcgctgcgaggagaagttattcctgaacatgagtttgcgacgggaccagtgtgtcttgatgatgagaatgagtttcctcctataatcttgtgccgtggaaatcagaagggcaaaacgaagcagtcatgatgagaagcacacctcagaaatcaggacatcccccctatcaggtggttttggagaaaacaaggaaggcggaagaatggagtgcaattgtgtgagcagaaaggggggcaggaatcccgggtgctccactgcttaaaccacaggacctggttaactcctcaccaagcttcccacgaccctggttgccaatgggcgcgggagacattgtatacacatcatgctatttaaaatacgttcaaactatagtgtaaatgctaattaaccatattggtatataaccggaattttatattaaaaggggcctcctttttaaatatatgccgtgtaaaaaatgtacttataggaacatctctttgaattgtatttcttgtatattacatacttagagagagactcttttagccaggcaaagtcttttttggctgtggctggaataaatcatttattacttgggagtcccattttgg

SEQ ID NO: 14910 - DNA, 1644 bp, Homo sapiens
gcctggccaacatggtgaaacccagtctctactaaaaatacaaaaattagccaggcgctgtggtgggtgcctgtagtcgcagctactcgggaggctgaggcaggagaatcgcttgaacccaggaggcggaggttgcagtgagccgagattgcgccactgcactccagcctgggcaatagagcaagaccctgcctcaaaaataaataaataacccacagagctgagcacaggcttcttcatgcttttcctttggaaggtgtcctagatatatgatgatttcttttttctttcacctcctcttgattgtcacaagtagcttgcttggctcaggaacaacagaagagaataaagaaaatgacctcagaccttccttacctcagtcttatgcagcgaccgtagccagaccaagtgcatcttcagcctccacggtgccaggtgggtggacacggggccaacaggggagcatctccaacagtgacctccctccccttctccctgcacgctccctccccttcccccttcactgttacctgggggtggagtgccctccctccccttcccccttcactgttacctgggggtggagtgctctccttgaattttttattttctcacaggtgaggccatggtaatagcctttaaacctgggaccctcaacctggcaaggcatcacacgatacggtctttttcctaacaagtggtgttaaccctttgcctcttcaaaaattccaatgaggccaggcacattggctcacacctgtaatcccagcactttgggaggctgaggccagcggatcactggaggccaggggtttgagaccagcctagccaacatggtgaaaccccatctctacttaaaaaatagaaaaattagctgggcatgttggcacacacttgcaatcccagctactccggaggctgaggcaggagaattgcttgaaccagagaggcggagattgcagtgagctgagatcataccactgcactccagcctgggtgaaagagtgagactctgtttcaaaaaataaaaactaaactaaaatttccaaagagcctgtagtcctagccactcaggaagttaaattgaggcagaaggatcccttaggctcaggagttcgagaccagcctgggcaacatactgagaccctacctcaacaaagaaaaattcaaagaggtaggatgcctcaggcatctgaagtggaaaggcaggtcaggcttaaagatggcagatggtgaggattatgacttgtcctaggcacagtacctccagggggaagacagacagcccctttgcttcctttgccctttatttgagcccccgctccccacccgccaggtcatggcataaaagcagatccccagtgcttgtttcatgtctctttcttggtttccaggttattctgaggacggcggggcgctgcgaggagaagttattcctgaacatgagtttgcgacgggaccagtgtgtcttgatgatgagaatgagtttcctcctgtgagcattaggaacccgtaactgggcggctcagtctgtgtgcttagaaggaaaccttcgcctcatacgagaggcagagtccctttccctgttttctaatctataacaactaattctctgctctagtatttggaaagccataggatatt

SEQ ID NO: 14911 - DNA, 685 bp, Homo sapiens
gcctggccaacatggtgaaacccagtctctactaaaaatacaaaaattagccaggcgctgtggtgggtgcctgtagtcgcagctactcgggaggctgaggcaggagaatcgcttgaacccaggaggcggaggttgcagtgagccgagattgcgccactgcactccagcctgggcaatagagcaagaccctgcctcaaaaataaataaataacccacagagctgagcacaggcttcttcatgcttttcctttggaaggtgtcctagatatatgatgatttcttttttctttcacctcctcttgattgtcacaagtagcttgcttggctcaggaacaacagaagagaataaagaaaatgacctcagaccttccttacctcagtcttatgcagcgaccgtagccagaccaagtgcatcttcagcctccacggtgccaggttattctgaggacggcggggcgctgcgaggagaagttattcctgaacatgagtttgcgacgggaccagtgtgtcttgatgatgagaatgagtttcctcctgtgagcattaggaacccgtaactgggcggctcagtctgtgtgcttagaaggaaaccttcgcctcatacgagaggcagagtccctttccctgttttctaatctataacaactaattctctgctctagtatttggaaagccataggatatt

SEQ ID NO: 14912 - DNA, 19564 bp, Homo sapiens
cacgaaccaagatctaacagttctcggaaccaagatctaacgtcggaaccaagatgagcatcggttcattggaaccaatatctaagagttctcccttcctttacatttcttctccgacaagaatgatttgaaacaggtctgggaagtattgggggtttgcttttcttaaaactttcaggtttgggacttaaattttggtttaagcaactcagctgctgcagcctctcttgccaggtagggattctgtggtgtccgggaggactgcccactctggggaaatgataaaggcccaaggggagtgtgtcctgttctattctgtagcactcagtctgctacttcctcaggccttcagacagcacagtttcttttttgaaaaacaggaaaaagttaaagatttggataaggtgttataaggatccaaaatcccttttatcttttttttttttttttttttttgagatagagtctcactctgttgcccaggctggagtgcagtctcagctcaccacaacctctacctcccgtgttcaagcaattctcctgcctcaccctcccaagtagctgggactacaagcacctgccaccacgcccggctaatgtttttgtatttttagtagagatggggtttcaccatgttagccaggatgttctcgatctcctgacctcgtgatccacccacctcggcctcccaaagtgcagggattacaggtgtgagccaccgcacctggccccaaatcccttttttctaagtatataggaaggaaagggccaagtgtggtcccagcacttcaggaggccgaggcaggaggatcgcttgagcccaggagtttgagtccagcttgggcaatgtaacgagacctagtctttactaggtctttactataaaaataaattagctgggcatggtggcacttgcccgtaggcctagctacttgggaggctgaggcaggaggatcgtttaagcccaagagttgaaggctgcagtgagctatgatcacgctgctgcattccagcctaggtgacacagcaagaccctgtctctataaaaaataaaaatttaaaaatttaaaaaagaagaacacttaggaattgtcatatgtttcatttttagttaatgttatttctcttgtattgaactgaggaaatatattttatggaatcaagacagctgtatgatgtatttagatttgcatacttttacagttcttttgcagtctcctcccaggggcccttgctatccagatggaggctgattggctcgaagcctctgaggccaaatctgtggtgttctagggcagatgctataaatattttgtaattgataaaaggagttattgcttataaaacctagaaaagtagatgaaattcaaagcaacagacaaggagctgagttgaaggcaagaccatggttctgcgggggctgaaaactgatagttaaaaaagcaatcagcagcatcgtgcccaccccagaagcatgctctcacacgaactaagagtgcatcctcgttccctcccagtgttttctctctgtttccctctgcgtttagtcttatctgcagccagcatgagggtgacctgaaattcagctgagtgagccgcagagcagatggtgccatcagagctcttgggaaaaaaatgcagatcagatcagatgggctagatgtagatgctgtttctaggagaggcatatgtcaaggccccgctatcccagggattgggtgtggggctgggaggggacacaagaggatatcagaaacctctgaacagaaggaagcatagaaccacgtagttctaaccacggcatgtgctggcaaaaggcacagtgattggataagtcagagaatatttcacagaggaacactcatatttatcatcaattttgagaacctgttagaatttttttaaccctcagtccccagtctcagacctacgacagagccttaggtaaaactgagaaagggctgggcacagtagctcatgcttgtaatcccagcactttgggaggccgaggcaggaggagctcttgagctcaggaggtagactaacctggacaacatagtgaaacccgggtctctacaaaaaataccaaaaaattagccaggcatggtggcgcacacctgtagtccctgccacccgagaggctggggtgggaaaatggactgagccccagaggttgaggctacagtgatctgtaatcctgccactgcactgcagcctgggtgacagaacgagaccctgtctgaaaaaaaaaaaattgagaaatgtgtttaaattttatttttctgcttggttaacactgatgaccttcatcattctgagccatggatagtcttccttggggaatagcagggcaggcttttcccaggagcagagcctgcctcttttgtgtggtattttttggtaccttcccttctagctgatgttccctggaataaaaggagctggctgagaccagtggttcttgagcctcagtgtgcatcgcaatcacctggtattcgtctaaaaacttcccaaaccagaatctccggggagagcccagggcttgctccttgggcagctccttgggcatccaggtctaagaaacactggcctgaggggagccaagtcaggcatgtgcaggggtggtcggcagctgctcagatgtgcgaggagctgcccaaccagaaatgccttcctgacacctcctcaccagcaccgatgtctgcccttgtactgggctatgcgttatattcctttaaacacccgatacatcaaccctgtggcctgttttcacttagctgagagcacagccattgggaagaggctctgaacctgacaagctttcatgtggagaggaagagaagggtctggcagcagtggggagagcaagcaccagagagaggagcccaggaaggaacagtggggacgtggggcactggggtgttcaaatggggccgaagcccttctccttttccctttgccagggctcagacagcggcccaaaagcaggcctggaggagagtctgagtagaaataagttagagctggtaattattcagagaggggtaaaacctaagatttggtgatggagagaaagcaaagaaacccatttttatataggagggagacctgtgctataaacactgaaaggcagcctgttagatggcagtggaaactacagaaggcacatgaaattgtcttacatggcacagggggtctgatcagaaagtgttcagaagtcctgttgaacgcggtggctcaggcctatcatcccagcactttgggaggccgaggcgggcagatcacctgaggtcgggagttcgagaccagcctgatcaacatggtgaaaccccgtctctactaaaaatacaaaattagccaggtgtggtggtgcatgcatgtaatcccagctactcaggaggctgatgcaggagaattgtttgaaccctggaggcagaggttgcagtgagctgagattgcgccactgcactccagtctgggtgacagagtgagactccttctcaaaaaaaaaaaaaaaaaaaaaaagtgttcaggatccctgttctaaggaaagaaggagaaggaagagagggagggaggaatggagggagggaagaaggaaggagagaagtaaaaacaatcttaatttctaataaaatttcttaagatcttgcattttatgcttgtgttcaggtggatgattacatgtgtatgtgtgtacatccataaacacaatcttcaaaatgcatcatcaaaattctgctttaggcttagaatcaagttaggactcatatgaaagatgaatgatttggatttggtcagggtctttgtaaggaacggttcggtagactgataagtctgtgtgattacagaggctgctggtttgcctagaagagtccatttatattcacaacattaaagacatgaagctgttgaagaccctcctggatattcctgcaaacccaacaggtgagctccaaaaatggaacaaatgtccctgaaatttcatgtcctggtgcttctttcccaagctttattttcctccaaattgcgaacgtgaagcagtgtttgctttttgagtcttagtgaggtttatctcgaagctttgtcttaatggcggcagattcaaattatgtcaggctgtgtgtcctgcaggggggctgtgtgcccttcattgcagtccaagaataacaacaccctttgtctgggacccatatcagcaaatgtgtcaaggcacgtaaggtagacatgtaaaagatttcaagcatctgctgttgaaaagtgtttacccctaattgttttttgtggttcgttcagtacagagtaggcgtgataattagaagcaggtttcaacttggcgtgtctgcatggccagcaaaaagacaatctgaaccataaagaatatgttttattacatgacaaagaaatctctctacttcgacgatatgctaggatattaaaccttactgaattctcgggatttaacactatttaatacattcctggtgtataagaagaggaatggtttggatttgttatattgaaatagcagatgacattatatgaattcatcaagctaggagtaaacaagaaagaattccttcattgtgtggtggggtgaggagtcagcacactggaacaacttgtacatttaatgactccagattaatatttgcagattatatttcagtttggtatcattgaacaactgcttctattatatttcagtttagtatcattgaacaactgcttctatttgctgtttctgagttatttggctttcactgaatttcaagatctatctgggtgccatccaagtcacctagactttttgaaccttggttcccttatgaataatacccatctcccagggttggctgagaattaaacaaggtaatgtttgtgaaagtgaccagcacaggaactgccatgcatgaaatacttctgatgccttctcttcattccaattctataaatggcccttggctgttgatttcagtgctttcacatttcagctatggcaaaaggatattttaaaagaacaaagctagccgggtgcggtggctcacacctataatcgcagcacattgggaggccgaggcgggtggatcacctgaggttaggagttcaagaccagcctgaccaacatgaagaaaccctgtctctaccaaaaaaatacaaaaattagctgagcatggtggcgagtgcctgtaatcccagctacttgggaggttgagacaggaaaattacttgaacccaggaggcggaggcttcagtgagctgagatcgcaccactgcactccagcctgggcaacagatcgagactctgtctcaaaaaacaatgaataaattaaaaataaataaataaataaaagaacaaagccattgaggctgttagggagttctgtgagataatgactttgaagcacattttctgaaatggaagacggtacgtgaagaagctgtgggtggtaagtttttcccttagaaatgagaggctgaaatcatctggacaagtatctattgcagacattctttgtgcttggcaccatagtaggcaccattaggcaacctcataccaggagcccaaaatctagttgtcacgagttcccttcaacagtctgtctgaggtggtctgagacaggtgcgccagcagcctttggcaggggtggaaccatgtttaactctggggtgcggacacagttgaagggagcatgtgctcttctgatcaggaatgagaggcccctgaatctgcatagagcttgaggctggcagggcctgagctgggccttcagggatttggggagggacatcgggcatgcagaaagctagaagctgcctgtggctctcagtttctctgaagagaggggagtggacagtaaatgccacttactcctcacacctgttgcacacttgacccccagaggacagggttgcttcaggactgagcaccctcccttgcaaacagatgtttctcctttttttttttttttttttgagacacagtctcactctgttgcccaggctggagtgaggtggtgcaatctcagctcactgcaaccttcgcctcccggattcaagtgattctcattcctcagcctcctgagtagctgggactacaggtgcctaccaccacacccagctaattttttgtatttttagtagagataggatttcaccatgttggccaggctggtcttgaactcctgtcctcaagtgatccgcccgccttggcctcccaaagtgctggaattataggcatgagtcagcatacttagccaccatttactcttattttttagcaaatatagttgtttttctgtagttcagaaaactcactggttgccttactttctgcagcttaaacagagagaaaataaggtttaaaagtgcagggctatttgtgttccctgttagagacagtgtatattgtttgtaaagggaatcgattttatctcaagaaaaatgagaaacaatagcagagacttcctctgtctcagataaaagaatgcctccttatgaaaggatccagggataggttgagtatttcttctgaaagaccaggagcaaactgtgtctttttagacctctgatgttctttggagatatagcccaaggtgttttaaatgctcacgtttataattatcacctcaacttctcctgagctccctttctactgcagtaaaatggagatgatcatttttagcccccagagttgccacggagagcgttacctgaggttgtggcctgggtgggcaaaggtgggtccgccctgtccatgcgggcagtcagactcactccgcagccctctctgtcccataggacagccttgcacaggtcagagctgcgcttcagtgacatgaccaggtcctcactcgggaaccttcagaggactccgccctgccaattatacattccccagaggccaggagtcgccttatctgttctcatcctctagtttattttctgaacaaagaaataagatggaaactgtgactgttgattttataaatccttgctgggtacagaaggaagacacaatcactcgtctaattgtcttcagcacacaaatcctgaatgcattttgacttcataaactacaagtaaattagctatacagagttcgcctgttgcctcacacttggtatctaacgcagctgtaaatttccttctttctgtctgtttgtgtcatgcccgttcctgttgtgtcagagattgcaggctgtttcctttaaagagcttggccagacaggggctcgaagttaatttcctgctagcacagcagtctgctctgagcagtcaagggtggaaatctccatgaaagtcctgccaactgcagacctcccagtatggaggaggtggtcacagagctgaccaccttttatgggatattgagggagcgttccataccacacagcaatgcagatcattgaacagttcatggtttcttccccagcaagacctctttcttgtttgaaaatgctaataaaagtggtataaatgcttcccttttgtaggagcatagggcatttgctgtacaaagaagatgtctttctatttttgaaaatcggaaagcgtaacctgagacattaatcaactcagagggaactgcattttataaatcactgttaacttacctaaagtttgacatgcaatactttaaataccaagatgagaatcatttagaatcatgggacttcctttgaattccactgatgatgccattggttcttgagttgagagcaggcacttcttttccagctgtagaagaattacagccaaacaattacagtggaattatagctgccagtgacttatgaaaatatgtgtcaagctataacacatccaaaagccccatcagaacctcattcctaggtagaaaaaagactggaagaaaatatgctcagatgttcagaacagtgaaaagcctctgggttttagaattgtgggtgattttttttctccttatattttctaggctttgcaaatgttctacaccatcacttttatattatacaataatatttttaaagcccatatccttccttaaaaaggctttgtgtaacacctgtaacagaaagaggagactggcagaatggcaatagccaagctaaggaaaactcttcttgcttgccttgggtggttcccaagatacgaagatacattcgtgtggctcgttggatttttctgacacttgggccatagggaagtcacagtaggcttttctggggaccttcattaagtctgtaagggtaggaaggcaggattccttgtctaaattcagatggattggtagaggtgcgagcctggaggcaaaactgtcaaataagtggtatgtgtcagagtatgcctgccctcactcttatcctttgtccctttcttgttagcatctagtgtcaaccagttctataataggtattgcagaaagttcaatattagcttagaaagtttaaacgtttcttcccttctgggaatatttatgttttaacataagactctgaagcacagctggaggtatgcgtccaaggcttctgctccaagactgcttagctctctctgccacaaagacacgcccagtattttcagagggaagaagtaagaaacgaaggcttggcatcttgaagtgttaaatctggaaagacctctatatcacggtagccttcatttcacagacaggaaacaggcctgaaagagcagcaaataactcggccagagtttcacagtacatagcagacctcagtcttgaactcatgtcctcagcctatctctaaccagataaatattcctgaaacatgccttaaaataaaatttgaaaatcttttttgagataaaattcacatcctatacaattcacccgtttaaaatgcatggttcaatagcttttggtatattcacggaattgtgtaaccatcaccacaattaattttagagcattttcatcgccccaaaccttgtacctctaagccatcactccctatgcccccagccataggcaacccctaatctactttctgtctctattagattatggatttctctattctggacattttatatcaggagactcatacaatatcggttcctttgtgactgacttctttcacatagcctaatgtttccaaggttcttctgtgttgtagcatgtatcaatactttatttttcttgctggataatattctattataaaaatatatcacattttctttatccatttatcagttgataacatttgggttatttccactttttgacttatgaataatgctgccatgaacattcatatacaagtttttgtgtggacatatgttaaatttctcttgggtgtatatgtaggagtggaatttctaggtcatatgagaactttatgtttagcttttgaagaactgctaaacgttccagagcactgccccattttacattcccaccagcggtgcataagatcccagtttctccatatcctcaccaacatttatctgtctttttcactatagtcatcctagtggttgtacagtggtatctcatcgtgtttttaacacagcctttttaaaaacatatgtgctaggccaggcacgatggctcacgcctgtaatcccagcactttgggaggccgaggcagatggatcacctgaggtcacgagttcgagacagcctggccaacatggtgaaaccctgtctctactgaaaatacaaaaattagctgggcgtggtggcacacgcctgtaatcccagctacttggcaggctgagacaggagaatcgcttgaaccaaagaggcggaggttgcagtgagccaagatcgcaccactgcactgcagcttgggcaacagagtaagactccatctcaaaaaacaaagcaaaacatatgtgctgagaaaccttcagcagttacacactgcatttgtaaggtcttaactctttagtttggtacgctagtccttgtaagatttccacagtcttcacatcttttctgccagccgcctctttgggaacccagcacacaagacaaccagatctcctgactgccttccctccccagtttcacaagactagaatcccttctgcctgcctagctgttcttgaaatttcatttggatagcaaagaattcagaaggggtgaggaattggggtttccagagcaaaactggaaatggacgagtggcctcttctaaggctggggccaggaatgaccttgtatcgccaaaggggtggcagggctgccagaacgtgcagttaaaggttccggggctcagccacttcctcccgtagctatgcatggcaagtgataagaggacagccctgctgtggactcagcaaagccagagcaggaaatgagacctaggttccaactctaaatgtttactttctttttcctttgctctccttcctcagcagattagttgaggtatgtttcagcctgacctaaagttttttcttatacttttagaagaaacccacttaatatactaacttgtaatagacgccagtcactttttttttttttttttttttttttaagagagatgtctctcttgcgtgatctcaaagtttctggtaacactttggtttctatggaattgctggaattcactgctatcatgtgcacctctattcatctaaaccattgttttgaaaatcctttacttaaatgctcccttcttgaatccccttataaataaaaacagcttatgttggttcagtggtttgatgggctgtttactcttccggaatattattgaagcatcttaaatccaaaatgtcctctttatttagtttgtctcaatgtctaggcacaccatcttgactgcagacgcagacctcaaataaacttcctcctcgggaggtacccatttcccttatcaaggcagggcatttggctcagaaattgctcggtttctttttttttttttcttaagacagaacctcactctcacccaggctggagtgcagtggcactatcttcactcactgcagcctccacctccaggtttaagcaattctcctgcctcagcctcccgagtagctgggactacaggcacatgcaaccacacctgactaatttttgtatttttaatagagacagggtttcactatgttggccagcccgatctcgaactcctgacctcaggtgacccacctgcctcggcctgccaaagtgctgggatcacaggtgtgggccaccttgcctggcctgaaatttctcagtttctaaataggttcttggcagctcctcttctccaacttgaagttactggccaacagtatataatcatctgcagaaagaccaatatgtactgacttttcactataggaagatttatttcagttttgaggaaatctcttgtaaccctagaggataatggaattggaagaaaagtagatgctgtttcagagtcctggggtaaaatgtaaaaatgagcaatatatacacacacacacacacacacatatatatatatttttttttttttgagacggggtctcactctgtagcccaggctggagtgcagtggcacgatctccactcactgcaacctttgcctcctgggttcaagcgattctcctgcctcagcctcccaagtagctgggactataggcacgcaccaccatgcccagctatttgtatttttagtagagatggggtttcaccatgttggccaggcttgtctggaactcctgacctcaagtgatccgcccgcctcaaagtgctggaattacaggcatgagccactgtgcccggcaagtctcattgtttcactgtagcaaggacgcagccagtgttaaatcaggaggtcttcccctgtgaagttgctttattggaagccttaatcagaagaatcatcagcggaaagcagttgtctgcaaagccattcctccccttgccagtaggtggcactgtagctgtactgttttcagatgccctctccagccgtgcaatctctcccttggccccaggcttctcatgttctgtttcttctttgccaggtctatgtgctctctctatcaaccattccaattcttacctggcctatcctggaagcctgacttcaggggagattgtgctttatgatggaaactccctggtaagttgacggtgacctggctgagccaacccacctgccttggctgtgtggtcatggaaggagatagataaggacgccctgccgtcgggggctggaggcggtgggagtaagcaatactggggagttgttcaagagaaggtgatactatttcccctcgggcttgctgtgagtcaacctcaccataagccagctggccaggccaagttagacatctgcagcataatgaaaaccacttgccagcagggggccagttgtctccctgaatgtgtcaccctgtcccatgccacagcctgagacagtgtgcaggtgtttcatattccctgccctctggtctctgaggcatccctgagcgggacaagattgctgtgggaagttgcctaaagatgcgtgcagggcgcgcctgcgacggcatcacactgcatcaggtgctccgttcgtggccaccttcccaagggcaggaaaagggatggaaatggagtggcccttgaagccaaatcttgattcaccagaaaatgacacacagcttacatgcagatggcctgggggacagaggaagagacagggagctggacaaaggagggagaaaggagaaaagaggaaggggagggaggtgaaatccatcttccctcctccgcagcatctgtatccatttttccttttcaccaacagaaaacagtctgcactattgctgcccatgagggaacactagctgccatcaccttcaatgcctcaggctccaaactagcaagtgcgtctgaaaaagtgagtccactcccaccaacacctctgtctgggtttcgctggatggctcctgccgtgcgcagggatgggattgaacaaacctggtgacatgaagactgactggtctctgggcccactcagaatttgtttcagagggagaatttctggcctctgcatgtgtggtatattcatgcatttgttaattcaataggccaggggcctgcaatatgcaagatacaagacactttgcatgaaaactcgtggtcttatgaagaaatgtacgtgtacatcagccgtagagacggacaaatgctacaccttataaacacagtacagtgcaaaccaaatgctttactttgctatttagagaaattgatgtcttctgcctggaataatcagagaaagtgatccaattgaattttttttttttttttgaggtggagtctagctctgtcgcccaggctggagtgcaatggcgcaatctcggctcactgcaacctccgcctcccaggtttaagtgattctcctgcctcagcctcccgagtagctgagattacaggcacatgctgccacgcctggctaattttttgtattttagtggagacggggtttcacttcactgtgttgcccaggctggtcttgaattcctgagctcaggcaatccacccgccttggcctcccaaagtgctaggattacaggcgtgagccaccacacccggcctcaaattgaaattctaagaaaccagagcagttgggtgaacacacacatgcacacacacatacacgcagagccttgggcacaggtggaagggaaaaggtagacagagggtgtttataacattttccaagaattgttgatatggcacataaataaacatgcctctatgctcaacgtggtgttcttcctcctcagagacagatgttcaaaaccaataaaacaaactcctctctaaagggacatctctgtgtaaagccactaatggttatgaaatgtccacctgctttcttttccagggcacagtcatccgggtgttctctgtccctgatgggcaaaagctctatgagttccggagagggatgaaaaggtctgtgttcaatgtcaaacccattttaaagtccccgcagaagtcccgcagggaccgctggcagctgtctagggagaggacagagagtggctctgtgccctccactcacctggaggaagtgtaactactctcccaggtaattgactcccaggctttacttagggctcagcaaaactgaaagccgagatgctgttttaacacagttcagccgtgagagtccctttttgatgtgtgtgtgggcggccggcacaggagaaatgagagagccagggagtcacaatccaaaaataatttctgatttccttccatggaaataaaggacgatgtaaagtgtgactgtttgggatcttatcggatgtaggtttgcagccagatcagtgcacagagcaactggaagattccaagatgccaggaaggcacagttcctcccttctgctgacagaggcagggctataccttgtttcttctcacataaataagactatgggccgggcgcggtggctcacgtctgtaatcccagcactctgggaggccaaggcaggcagatcacctgaggaccagcctggccaacatggtgaaacaccgtctctactaaaaatacaaaaattagctgggtgtggtggtgtgtgcctgtaatcccagctacttgggaggctgaggcaggagaatcgcttgaacccaggaggtagaggttgcagtgagttgagatcaagccaccgtactccagcctgggcaacagagcgagagactctgtctcaaaaaaaaaaaaaaaaaaaaaaaaaaaaaaaaaaaaaactatgaccctttgtgaatctttctgacattaatttctaaatatgagcaccacagtgtttaagggatctgggtctacctaggctcttcaggatacatctgattttcttataaagctgatctctgagttataaggccataactcccatttctcttgctcactgacccatgtgttgctgtgcttgtaggtatgtgacaatcagctctctagtgttcagtatggattcacaattcctctgcgcctccagtaacaccgagacggtacacatcttcaagctggaacaggtcaccaacaggcaagtactccgcggggcaccaaatgctcattaaacgaaaggagtcaggcctaggctcttctactggcatgaatgatctcttttctttctgaacacccaatcttggcttcacttgggacttcacctaagtgatggagtgtgtgttagcaaaactttggaggcatgatgcacaaaagcaaaaaactgggagccacccacgtgagttcacgtcctggctctgcctcttaggagcccagagatcccgggaagataatttagatctgtgtccttcagtttcctcatctgcaaaatgaacataacagtagtattaaatgagtctgcagatctaaagtgttcagcatcgtgcctggcacataggaagcactaagaagtgttagctgatatagctgtaaatataacaatatatttatttatcattgttgccagcagcaccactgagcgcttgggaagcacctgcaatttctcagggcttaagaagctgtctgaaaagtgaaagaaaagcctaaaaaatggataaaatctctagggaaagagtaaaaagaacttcagggcagacaatgagctttgagttacacctgtgcagaatgggggttggaaaattctggaaagatggaggagtgagaaaggagcagcccccagtgtttcataccccacggtggggggcaaggattctagagaaagagcgctttgaaaacgttaccccaacctgcagagaaaggcaggatcaggacagaaagcctactgtatctggggagttggttgctggtacccttggatggagtttcagaagaggaaggtgtagaggctgggcaccatatcacgctgatacatgctaacacatacgtaacagaggccgggcaccttatcacgctgatacatgctaacacatacatgacagaggccgggcaccttatcaatgctgacacatgcggacctcatgatccacccgcctcaacctcccaaagtgctgggactataggcaaacagccacatttatgatttcacagttctgcagcccagaatggcaggactgggtcttcttctcagcatgacacaaggctgaaagagaggtgccaagatttctctgacttgcccttctgccatctttttctgccaccagttggagaaagctatttttaaaggcatgtgtgattaaagcaagcccacgctgcctgaggtcacctgagccatgtcacatatcacagccatgggactgacgtcccctcatctctagaatccttgtctccccccacccccagtggtgtatgaaacactgggggcggctcccttctcgctccttcatctttccagaactttccaacccccaatctgcacaggtgtaacccaaagctcattgtttgtcctgaggttctttttactctttccctggagattatatccactttttaggattttctttcacttttcagacagcttcttaagccctgatcttttttggagccttaattcatcatctgttgtcatgggtttgagcactagagggcggctgagctgttaagatgccgttcaaccccaaggttccacgagtgagtgatcgcaattgctgctgcagccccgcctccactggggattattatcagagattgattttccactccaggctctcccgtttctgtctgtgagcacaggtgaccaggagcagaacctccaagctgttctgggttctccgctcaacctgtccacgggtgttcatatgtccccggcggttacggctcacacgtgcctcttcagccctgcttcgctggccagggcccttgaacgtgtctttagcacctcgtgctggtccagccgttactcttacatttggtctgactttccagtctctttcaaccaataccagtccatcctatatcatcttgctgattaatcttctgaaaatgtccctttgaacatgacacctcctcctcagacacctttattcccctttgaccttgggaatgaagtcccagctcctcccgtccccctgagtcagacctgctgcagagcccagcagccaccacccccagaacctcctcatttcctccagccacagagacaccatcccataaaacagtatgcgccacgtgccgggctccatgctcagtccccagcatccttagttctcccagcaaccctgtcagggaggttgtgatgatgattcctgtttcccaaatgaggaaatctggacacggaaacgttaaggaacctcatccgcctctcccttcctctgtggtcctggactagctcctgcctggaccatctgtgcagcaccgcatattaactgctcacgtggtttttctttgtatacacccgtgctctctcaatctggaatgcagggtctggatcgtacacctctttgtaaaccccagcccggagcacagggctgtgggacagacagtacaaggatgtctcaggatgcttcggatcacagaaccctagcagtgcacctagcatagtcactttcagatgagaacatgaaggcccagagaggtttgtccaaagaccccctagcccattggtagcatagtaaagaatacctcccagagctctgagctgcagggcgagcttcccaccaggacctaatcctgcagacaagcagcctctcagcagttgcctgctcctgggaactcatatggcaaccttggttctcaatgtgccaccctctgtgtggggcagagctgggggttgtctctcaccaacagaacagtcaccccctttgtctggcagaggccttgggatgaagttccatgactgtaggcgacatcccaggtccctttgcatgatctccatcattacacatgctgggtacctgggtgactccagggttatctacaatcaaacaccacccaaagtgtcttgcccggaggtttgctacccactcagtctggctcaggaggccttcacgttgagatctgtctgttcttccatgagcccggcacagtcccaagcttatttaatggtacctggatatcaagtccatctcactctctaccctaactctcttctggaaatctaggaatcagactagtcatcagataagccttctttaataggggaaagcagtagcattgggaaccttttaacagctttacaatggctcttctgaagaacaaacaagcccttgatgctctttagttattgccagaataatacgtcctggattgttctcagtgggcagaacattatgctaaggcacagtctctccctgctgcggggagtgtggctaatgacgcttgggtgtggagattcctgggtgcgtgtggggcctgcagcccagtcccatcgttgcctgtgcattactccctagtcgaccagaagagccttcgacctggagtggctacatgggaaagatgtttatggctgctaccaactacctccctacccaggtgtcagacatgatgcatcaggacagggcttttgccactgcacgcttgaacttctccggacagaggaacatctgtaccctctcaacgtacgtacaatgacacccactctgaacaagaccacactttcgtcaatgtatttttccaaagcacaaaaatccccaaacctgaaaagaaaaaaagaaaacttgccccaggctgggcacggtggcttacatctgtaatcccggaaccttgggaggccaaggcaggcagatcatctgaggtcaggagtttgagaccagcctggccaacgtggtgaaatcccgtctctactaaaaatacaaaaattagccgggtatggtggtgcgtgcctgtagtcccagctacttgggaggttggggcaggagaatcgcttgaacccaggaggcggaggttgcagtgagccgagatcatgccactgcactccagcctgggcgacagagcaagactccatctcaaaaaagaaaaagaaaacttgccccaaaggaagggtgagcggaatcaaacccctgcttttcctatctgacttcaatacggattctcagggggcagccagaagttggcatgggaattttagccttctggttataatgacactgtcttaaaaacaattcttatttttatgtaattatgtaaaaagcctccagatctgttttctaggttcggactcctatggggctgacagatgttttaagaagtttaaaggagtttattcaaaagttgaacatttttaaaatttcacaaaactaaccagcaaagacagtaagccaatcctccatttaccccctttctgtcttggttaagggcagagacacatgtcagagggagactgcgtcccatgtagggagctaatgtgttcactagctattgcttctcgcagggtcgcagcatctacactcacttgcctcatccacactgtcacgttcaaagacaagaaataatcctgaaagtagatcccaaggccagaatgcaaaggaatagccagaagcccagaccagatcagtgggctaagggtttgtcaaaggcagaatctggtgacagctagggtgaggggggctttgtcattggaagcgaatccatcgcccatcttcgttgtcatcacggtttatgttttccttggcccttaggatccagaagttgccacggctgctagttgcgtcatccagtggacacctttatatgtacaa

SEQ ID NO: 14913 - DNA, 828 bp, Homo sapiens
cacgaaccaagatctaacagttctcggaaccaagatctaacgtcggaaccaagatgagcatcggttcattggaaccaatatctaagagttctcccttcctttacatttcttctccgacaagaatgatttgaaacagaggctgctggtttgcctagaagagtccatttatattcacaacattaaagacatgaagctgttgaagaccctcctggatattcctgcaaacccaacaggtctatgtgctctctctatcaaccattccaattcttacctggcctatcctggaagcctgacttcaggggagattgtgctttatgatggaaactccctgaaaacagtctgcactattgctgcccatgagggaacactagctgccatcaccttcaatgcctcaggctccaaactagcaagtgcgtctgaaaaaggcacagtcatccgggtgttctctgtccctgatgggcaaaagctctatgagttccggagagggatgaaaaggtatgtgacaatcagctctctagtgttcagtatggattcacaattcctctgcgcctccagtaacaccgagacggtacacatcttcaagctggaacaggtcaccaacagtcgaccagaagagccttcgacctggagtggctacatgggaaagatgtttatggctgctaccaactacctccctacccaggtgtcagacatgatgcatcaggacagggcttttgccactgcacgcttgaacttctccggacagaggaacatctgtaccctctcaacgatccagaagttgccacggctgctagttgcgtcatccagtggacacctttatatgtacaa

SEQ ID NO: 14914 - DNA, 7642 bp, Homo sapiens
gtgacaatcagctctctagtgttcagtatggattcacaattcctctgcgcctccagtaacaccgagacggtacacatcttcaagctggaacaggtcaccaacaggcaagtactccgcggggcaccaaatgctcattaaacgaaaggagtcaggcctaggctcttctactggcatgaatgatctcttttctttctgaacacccaatcttggcttcacttgggacttcacctaagtgatggagtgtgtgttagcaaaactttggaggcatgatgcacaaaagcaaaaaactgggagccacccacgtgagttcacgtcctggctctgcctcttaggagcccagagatcccgggaagataatttagatctgtgtccttcagtttcctcatctgcaaaatgaacataacagtagtattaaatgagtctgcagatctaaagtgttcagcatcgtgcctggcacataggaagcactaagaagtgttagctgatatagctgtaaatataacaatatatttatttatcattgttgccagcagcaccactgagcgcttgggaagcacctgcaatttctcagggcttaagaagctgtctgaaaagtgaaagaaaagcctaaaaaatggataaaatctctagggaaagagtaaaaagaacttcagggcagacaatgagctttgagttacacctgtgcagaatgggggttggaaaattctggaaagatggaggagtgagaaaggagcagcccccagtgtttcataccccacggtggggggcaaggattctagagaaagagcgctttgaaaacgttaccccaacctgcagagaaaggcaggatcaggacagaaagcctactgtatctggggagttggttgctggtacccttggatggagtttcagaagaggaaggtgtagaggctgggcaccatatcacgctgatacatgctaacacatacgtaacagaggccgggcaccttatcacgctgatacatgctaacacatacatgacagaggccgggcaccttatcaatgctgacacatgcggacctcatgatccacccgcctcaacctcccaaagtgctgggactataggcaaacagccacatttatgatttcacagttctgcagcccagaatggcaggactgggtcttcttctcagcatgacacaaggctgaaagagaggtgccaagatttctctgacttgcccttctgccatctttttctgccaccagttggagaaagctatttttaaaggcatgtgtgattaaagcaagcccacgctgcctgaggtcacctgagccatgtcacatatcacagccatgggactgacgtcccctcatctctagaatccttgtctccccccacccccagtggtgtatgaaacactgggggcggctcccttctcgctccttcatctttccagaactttccaacccccaatctgcacaggtgtaacccaaagctcattgtttgtcctgaggttctttttactctttccctggagattatatccactttttaggattttctttcacttttcagacagcttcttaagccctgatcttttttggagccttaattcatcatctgttgtcatgggtttgagcactagagggcggctgagctgttaagatgccgttcaaccccaaggttccacgagtgagtgatcgcaattgctgctgcagccccgcctccactggggattattatcagagattgattttccactccaggctctcccgtttctgtctgtgagcacaggtgaccaggagcagaacctccaagctgttctgggttctccgctcaacctgtccacgggtgttcatatgtccccggcggttacggctcacacgtgcctcttcagccctgcttcgctggccagggcccttgaacgtgtctttagcacctcgtgctggtccagccgttactcttacatttggtctgactttccagtctctttcaaccaataccagtccatcctatatcatcttgctgattaatcttctgaaaatgtccctttgaacatgacacctcctcctcagacacctttattcccctttgaccttgggaatgaagtcccagctcctcccgtccccctgagtcagacctgctgcagagcccagcagccaccacccccagaacctcctcatttcctccagccacagagacaccatcccataaaacagtatgcgccacgtgccgggctccatgctcagtccccagcatccttagttctcccagcaaccctgtcagggaggttgtgatgatgattcctgtttcccaaatgaggaaatctggacacggaaacgttaaggaacctcatccgcctctcccttcctctgtggtcctggactagctcctgcctggaccatctgtgcagcaccgcatattaactgctcacgtggtttttctttgtatacacccgtgctctctcaatctggaatgcagggtctggatcgtacacctctttgtaaaccccagcccggagcacagggctgtgggacagacagtacaaggatgtctcaggatgcttcggatcacagaaccctagcagtgcacctagcatagtcactttcagatgagaacatgaaggcccagagaggtttgtccaaagaccccctagcccattggtagcatagtaaagaatacctcccagagctctgagctgcagggcgagcttcccaccaggacctaatcctgcagacaagcagcctctcagcagttgcctgctcctgggaactcatatggcaaccttggttctcaatgtgccaccctctgtgtggggcagagctgggggttgtctctcaccaacagaacagtcaccccctttgtctggcagaggccttgggatgaagttccatgactgtaggcgacatcccaggtccctttgcatgatctccatcattacacatgctgggtacctgggtgactccagggttatctacaatcaaacaccacccaaagtgtcttgcccggaggtttgctacccactcagtctggctcaggaggccttcacgttgagatctgtctgttcttccatgagcccggcacagtcccaagcttatttaatggtacctggatatcaagtccatctcactctctaccctaactctcttctggaaatctaggaatcagactagtcatcagataagccttctttaataggggaaagcagtagcattgggaaccttttaacagctttacaatggctcttctgaagaacaaacaagcccttgatgctctttagttattgccagaataatacgtcctggattgttctcagtgggcagaacattatgctaaggcacagtctctccctgctgcggggagtgtggctaatgacgcttgggtgtggagattcctgggtgcgtgtggggcctgcagcccagtcccatcgttgcctgtgcattactccctagtcgaccagaagagccttcgacctggagtggctacatgggaaagatgtttatggctgctaccaactacctccctacccaggtgtcagacatgatgcatcaggacagggcttttgccactgcacgcttgaacttctccggacagaggaacatctgtaccctctcaacgtacgtacaatgacacccactctgaacaagaccacactttcgtcaatgtatttttccaaagcacaaaaatccccaaacctgaaaagaaaaaaagaaaacttgccccaggctgggcacggtggcttacatctgtaatcccggaaccttgggaggccaaggcaggcagatcatctgaggtcaggagtttgagaccagcctggccaacgtggtgaaatcccgtctctactaaaaatacaaaaattagccgggtatggtggtgcgtgcctgtagtcccagctacttgggaggttggggcaggagaatcgcttgaacccaggaggcggaggttgcagtgagccgagatcatgccactgcactccagcctgggcgacagagcaagactccatctcaaaaaagaaaaagaaaacttgccccaaaggaagggtgagcggaatcaaacccctgcttttcctatctgacttcaatacggattctcagggggcagccagaagttggcatgggaattttagccttctggttataatgacactgtcttaaaaacaattcttatttttatgtaattatgtaaaaagcctccagatctgttttctaggttcggactcctatggggctgacagatgttttaagaagtttaaaggagtttattcaaaagttgaacatttttaaaatttcacaaaactaaccagcaaagacagtaagccaatcctccatttaccccctttctgtcttggttaagggcagagacacatgtcagagggagactgcgtcccatgtagggagctaatgtgttcactagctattgcttctcgcagggtcgcagcatctacactcacttgcctcatccacactgtcacgttcaaagacaagaaataatcctgaaagtagatcccaaggccagaatgcaaaggaatagccagaagcccagaccagatcagtgggctaagggtttgtcaaaggcagaatctggtgacagctagggtgaggggggctttgtcattggaagcgaatccatcgcccatcttcgttgtcatcacggtttatgttttccttggcccttaggatccagaagttgccacggctgctagttgcgtcatccagtggacacctttatatgtacaatttggatcctcaggatggaggagagtgtgtcttaatcaaaacccacaggtgaagagactgcttttcaaaagacagcctttcgagagctggtcgtgtagagttgtcccttcgccaagaacgacaagcttcagtgcccttgcattgatttgttcttcactggcagtctcagtggcaaacctctagtgggcaagtgctctgcaccgggctctgtgtcaggtgccctcagcatgtggtaatcatctggaaaagtgccaggattaataacacacaagatggtctccccctcagcctatgctcctaacacagccctgagctcacagtgggtgttcaaaaatattccctgccaccaggtgtggcggctcacacctgtaatcccggcactttgggaggccgaagcgggtggatggcttgagtccaggtgttcaagaccagcctgggcaacatggtgaaaccccatctataccaaaaacaaatacaaaaattagccggttgtggtggcacacacctgtagtcccagctactcaggaggctgaggtgggagaatcacctgagcctggagaggttgaggcagtgagccatgatcacaccattgcactccagcctggacaacagagtgagaccctgtctcaaaataaaaaaaaaaaaaaacctattccctgcatggaattgaaaagtgctctaccagtcatgttgactcacgcctgtaatcccaatactttgggaggccaaggagggcggatggcttgagctcaggagtttgagaccagcctgagaaacatggtgaaaccccatccttacaaaaagaaaaaatataaaaattagccaggcatggtggtacatgccttgtagtcccagctacttgggaggcagaggtggggggatcacctgagcccaggaaggtcaagactgcagtaagctgtggtcacaccactgcactgcagcctgggcaacagagtgagaccctgtctcaaaaaagaaaagaaaacaaaagaaaagcactcatgccttctgtgaacaggcacagactgagctctcctgctgtggccagggcaccagagctgccaccgccccccaccgatggctgctctccttgctagcatgtcctcacctgtgtgtactgggaagagcagaggactaatctttgtctagccaatgtaagagaaagaggccattttgacggtgtgtgactgcccctggcagttgcaggtcacttcagctcatcctggcccagcagcgtgtgggtaggtctacaatttaaacccacagagttggcgggcggatcacctgaggtcaggagttcgagaccagcctggccaacatggtgaaacccagtctctactaaaaatacaaaaattagccaggcgctgtggtgggtgcctgtagtcgcagctactcgggaggctgaggcaggagaatcgcttgaacccaggaggcggaggttgcagtgagccgagattgcgccactgcactccagcctgggcaatagagcaagaccctgcctcaaaaataaataaataacccacagagctgagcacaggcttcttcatgcttttcctttggaaggtgtcctagatatatgatgatttcttttttctttcacctcctcttgattgtcacaagtagcttgcttggctcaggaacaacagaagagaataaagaaaatgacctcagaccttccttacctcagtcttatgcagcgaccgtagccagaccaagtgcatcttcagcctccacggtgccaggtgggtggacacggggccaacaggggagcatctccaacagtgacctccctccccttctccctgcacgctccctccccttcccccttcactgttacctgggggtggagtgccctccctccccttcccccttcactgttacctgggggtggagtgctctccttgaattttttattttctcacaggtgaggccatggtaatagcctttaaacctgggaccctcaacctggcaaggcatcacacgatacggtctttttcctaacaagtggtgttaaccctttgcctcttcaaaaattccaatgaggccaggcacattggctcacacctgtaatcccagcactttgggaggctgaggccagcggatcactggaggccaggggtttgagaccagcctagccaacatggtgaaaccccatctctacttaaaaaatagaaaaattagctgggcatgttggcacacacttgcaatcccagctactccggaggctgaggcaggagaattgcttgaaccagagaggcggagattgcagtgagctgagatcataccactgcactccagcctgggtgaaagagtgagactctgtttcaaaaaataaaaactaaactaaaatttccaaagagcctgtagtcctagccactcaggaagttaaattgaggcagaaggatcccttaggctcaggagttcgagaccagcctgggcaacatactgagaccctacctcaacaaagaaaaattcaaagaggtaggatgcctcaggcatctgaagtggaaaggcaggtcaggcttaaagatggcagatggtgaggattatgacttgtcctaggcacagtacctccagggggaagacagacagcccctttgcttcctttgccctttatttgagcccccgctccccacccgccaggtcatggcataaaagcagatccccagtgcttgtttcatgtctctttcttggtttccaggttattctgaggacggcggggcgctgcgaggagaagttattcctgaacatgagtttgcgacgggaccagtgtgtcttgatgatgagaatgagtttcctcctgtgagcattaggaacccgtaactgggcggctcagtctgtgtgcttagaaggaaaccttcgcctcatacgagaggcagagtccctttccctgttttctaatctataacaactaattctctgctctagtatttggaaagccatagga

SEQ ID NO: 14915 - DNA, 742 bp, Homo sapiens
gtgacaatcagctctctagtgttcagtatggattcacaattcctctgcgcctccagtaacaccgagacggtacacatcttcaagctggaacaggtcaccaacagtcgaccagaagagccttcgacctggagtggctacatgggaaagatgtttatggctgctaccaactacctccctacccaggtgtcagacatgatgcatcaggacagggcttttgccactgcacgcttgaacttctccggacagaggaacatctgtaccctctcaacgatccagaagttgccacggctgctagttgcgtcatccagtggacacctttatatgtacaatttggatcctcaggatggaggagagtgtgtcttaatcaaaacccacagcttgcttggctcaggaacaacagaagagaataaagaaaatgacctcagaccttccttacctcagtcttatgcagcgaccgtagccagaccaagtgcatcttcagcctccacggtgccaggttattctgaggacggcggggcgctgcgaggagaagttattcctgaacatgagtttgcgacgggaccagtgtgtcttgatgatgagaatgagtttcctcctgtgagcattaggaacccgtaactgggcggctcagtctgtgtgcttagaaggaaaccttcgcctcatacgagaggcagagtccctttccctgttttctaatctataacaactaattctctgctctagtatttggaaagccatagga

SEQ ID NO: 14916 - DNA, 6285 bp, Homo sapiens
agaagagaataaagaaaatgacctcagaccttccttacctcagtcttatgcagcgaccgtagccagaccaagtgcatcttcagcctccacggtgccaggtgggtggacacggggccaacaggggagcatctccaacagtgacctccctccccttctccctgcacgctccctccccttcccccttcactgttacctgggggtggagtgccctccctccccttcccccttcactgttacctgggggtggagtgctctccttgaattttttattttctcacaggtgaggccatggtaatagcctttaaacctgggaccctcaacctggcaaggcatcacacgatacggtctttttcctaacaagtggtgttaaccctttgcctcttcaaaaattccaatgaggccaggcacattggctcacacctgtaatcccagcactttgggaggctgaggccagcggatcactggaggccaggggtttgagaccagcctagccaacatggtgaaaccccatctctacttaaaaaatagaaaaattagctgggcatgttggcacacacttgcaatcccagctactccggaggctgaggcaggagaattgcttgaaccagagaggcggagattgcagtgagctgagatcataccactgcactccagcctgggtgaaagagtgagactctgtttcaaaaaataaaaactaaactaaaatttccaaagagcctgtagtcctagccactcaggaagttaaattgaggcagaaggatcccttaggctcaggagttcgagaccagcctgggcaacatactgagaccctacctcaacaaagaaaaattcaaagaggtaggatgcctcaggcatctgaagtggaaaggcaggtcaggcttaaagatggcagatggtgaggattatgacttgtcctaggcacagtacctccagggggaagacagacagcccctttgcttcctttgccctttatttgagcccccgctccccacccgccaggtcatggcataaaagcagatccccagtgcttgtttcatgtctctttcttggtttccaggttattctgaggacggcggggcgctgcgaggagaagttattcctgaacatgagtttgcgacgggaccagtgtgtcttgatgatgagaatgagtttcctcctgtgagcattaggaacccgtaactgggcggctcagtctgtgtgcttagaaggaaaccttcgcctcatacgagaggcagagtccctttccctgttttctaatctataacaactaattctctgctctagtatttggaaagccataggatatttgttgtactgtgtgcttcgaatcctacagagtaggctttaggtgtcgagctaaaccctgatggcattagagtcaccgaatactaatccagggagtcttggtggcctccctccagccagaggcctgcgatcccttactttgcttctgtagcactgactttgctgcctggaaggtaggaacacgtgacttgtctaaaacttattttcctgaggctcccatggatgcgtttgcagaatgctgccttccttgtgctggaggggatggtttcagagggctgggctgtgtgttcaggactctgagctgagttgctgcactctgtgaaccagcttgaccctcacttacctgcagctctggccggcagacccgcacctccccagcagttgcagacactcattaagaaacaagtggccgggtgcggtggctcacacctgtaatcccagcactttgggaggccgaggctggaggattgcttgagcccaggagttagagaccagcctgggcaacacagcaaaaccccatctccaccaaaaaaaaaaaaaaaaaagaaaagaaaaaattagccgggtgtggtgtcacgtgcctgtagtcccagctattcgggacgctgagatgggaggatcacctgagcctgggaggtcgaggctgcagtgagctctgattgtgccactgcactccagcctaggtgaaagagtgagactctatctcaaaaagaaaagaaaagcaattgtgtgctctgtggagggcagcaggtgcagggcaggagcttgcccgagcacctttagctgggtttcccagcaacctgctcagcctgttcccacagctagggccctcggggctggctgagtgctgggcgtggcttcttccatcacctggaactgaagacaagattccctcctgagagcctgctggggcttccttaactgctgattcttcaggctcccatctggagtaacatatagaccgctcttgtgagcttcagtcaaaacatcccagatagtcaacctgaaatcatttcgagatggaagtactgatttgttttgttttgtttttgagacggagtcttgctctgtcacccaggctggagtgcagtggtgtgatctcggctcgctgcagcctctgcctcctgggttcaagcaattctcctgcctcagcctcccgagtagctgcaattacagatgtgcgccaccatgcccaactaatattttgtatttttagtagagacggggtttcaccatgttggtcacgctggtctcaaactcctgacctcaagtgatccactcgtctcggcctcccaaagtgctaggattacaggcgtgaaccgccgcacccggccggaagtagtgtttgggccaagacttggagcatcagctcctagagccagagaggagctgccacttgggcactgaaacaatgtccattaggctttgttatggaaacttctcctgatcattgttttgtgtccattgagcttccaattgtaaaaggatggagtgcaggtctggcttctttctcccgcagatccgtggaaccctctagtgagcacatttggcttagaaaacaaagctgcggtggggccctgcatgcagggctggggctgttgttttgtgatttcccacatcggctctgcgggtcggtcgcagcgtgagcttttacatttctggctttcaataggcaggttgtcagagacgtggctggcaagtgaagtttatatctcagtggcggagagcagttgttcttaaaaatactaattataaacttcaaaacctctgttggcatgctgcctaactataaaccagttgttttacctttgggttctcatggccccaactggccttaaagggcgttcttctgcaccctcaagaggcggtggttatttacctgaagtcgaggcttccaggatccagagcactctaggtcagacaccgtggggacaaatgtgaccattctactctgtcagggtttaccacatccagacactcactaggttccgtttcactaattttggtaaaagtctgtaactactataaaatattattagattcttaattgtaatcgcagtaagccttgcaacctcttatagttacagaattggggtaatgtggatattagtatctaggaggtagttccttgccaaagaacctgtataaaataataggtaccttgtgcagatcatttatttggggtaaaaaggaaaaggggaggtgcttaattgaagaaccagtaagaaagtttgtcctgaggcctgtgtgcccattcagtgccaggaagctgggcatgagccagttgtttcttctccctcctaaggaccaaatgagtgaaagttggttgaaattgcatcaggaattcttatttatacgcaagaaatacttcctgccagtgagagtggtcactgaacaaggtccctagaacaggtgttagacccttgtgagtgtcaagcagcccctgtgtgcagggctgtgtcgtggcagccaccaacctctcagtctgccctccagcctgcaggtagatggtgatgaggggcagtgctcccactaaggcactgtctcagtagcaggcaggcttctccatctcaccatgtaaggaccagaggcatgcatgctcctgggatgctctatcaatatggcccatctcagtcatgcctgaattggcagaaatgttcagcgagggatgctagggaacttcctctctgtctccttattctgaattgtcatgcctattgcaaatctctgtgcagaattcacatctttactcacattccttaaaatcttctaggaccacaaaaggctcttggagtctcagcttggttaaaatcgcctctcttgtagtgacgaacaaacataggcttgcctgagtagtctgctacaggagctctgtgagccgctgccttaagaacgcgggtcatcactagtgatcttttcagaacacatactgacacttccctgcgtaggatcacgcttgcctccttgggatttacttttgctctgagagcagtgaaagaaaagagacttgatcatttctggtgccttagaaagctgctacattcgggaggatgagaagcttttgtttcaggaacaagccaacctgtacaagtctctgtattttgtgagactagtcccaatcttgtgagcaagagtcaggaaatcaggcccaagggtataaactgaccttcccttttttttttttttttttttttttgagatgatagagtctcactctgtccctcaggctagaatgtgttggcgtgatctccactcactgcaacctccacctcctaggttcaagtgattctagtgcctcagcctcccaagtagctggggtttcaggcatgctaccatgcccagctaaattttgtatttttagtagagacaggatttcaccatgttggccaggctggtctcaaactcctgacctcaggtgatcacccccctcagcctcctaaagtgctgggattacaggtgtgagccactgcgcccagcctaaactgacttttttttttttgagatggagtcttgctccatcgcccaggctggagtgcagtggtgcgatctcggctcactgcagcctccacctccccggttcaagcgattctctcctgcctcagcctcccgagtagctgggattacaggtgagcgccaccatgcccggctaatttttgtattttttagtagcgatggggtttcaccatgttggccaggctggtctcaaactcctgacctagtgatccacccacctcagcctcccaaagttctgggattacaggcgtgagccaccgcgcccagcctaaactgactttttaatagtgattgagcagtccatgtttacaagtaagatgagccttttaaaaatatatacatatacatataaatacatacacacacacacagagacatttttatagtcagtattttctagaactgtgtcatacttgtctacacctaaataagctgggtgaccattctgtggccatgagcgagttcagacagaaaaattccacagtgcccagcctctccctgctcactctgcatgggcacagacctgttgataatgcacctgcctaccagcctcttcctgagaagagtaaggccattctgttttgattttggtagataatcttgtgccgtggaaatcagaagggcaaaacgaagcagtcatgatgagaagcacacctcagaaatcaggacatcccccctatcaggtggttttggagaaaacaaggaaggcggaagaatggagtgcaattgtgtgagcagaaaggggggcaggaatcccgggtgctccactgcttaaaccacaggacctggttaactcctcaccaagcttcccacgaccctggttgccaatgggcgcgggagacattgtatacacatcatgctatttaaaatacgttcaaactatagtgtaaatgctaattaaccatattggtatataaccggaattttatattaaaaggggcctcctttttaaatatatgccgtgtaaaaaatgtacttataggaacatctctttgaattgtatttcttgtatattacatacttagagagagactcttttagccaggcaaagtcttttttggctgtggctggaataaatcatttattacttgggagtcccattttggacactaataataaaatcatggcaatgcatttttgaggtttttatatatttttttgtttccttgtggttataggggacaggaggaactctttaacttcttttaaatgcagtcatttcacccttaaaaggagaggaaggggattgggccacagacttatccatggactcgtctgctctgagatctggaaaacgacctaactttggtctaaatctgtgctcctcaaggcattgtttgatagaaatgtaggatttcaggatctactcgagccctactgagacggaatccggattctcacaagatcccaggtgatttgtttgcatattaaagatggagaccagtgagtacactggtttgtggaagg

SEQ ID NO: 14917 - DNA, 624 bp, Homo sapiens
agaagagaataaagaaaatgacctcagaccttccttacctcagtcttatgcagcgaccgtagccagaccaagtgcatcttcagcctccacggtgccaggttattctgaggacggcggggcgctgcgaggagaagttattcctgaacatgagtttgcgacgggaccagtgtgtcttgatgatgagaatgagtttcctcctataatcttgtgccgtggaaatcagaagggcaaaacgaagcagtcatgatgagaagcacacctcagaaatcaggacatcccccctatcaggtggttttggagaaaacaaggaaggcggaagaatggagtgcaattgtgggacaggaggaactctttaacttcttttaaatgcagtcatttcacccttaaaaggagaggaaggggattgggccacagacttatccatggactcgtctgctctgagatctggaaaacgacctaactttggtctaaatctgtgctcctcaaggcattgtttgatagaaatgtaggatttcaggatctactcgagccctactgagacggaatccggattctcacaagatcccaggtgatttgtttgcatattaaagatggagaccagtgagtacactggtttgtggaagg

SEQ ID NO: 14918 - DNA, 17202 bp, Homo sapiens
ttctttttttttttcctccgggaagatgagatatactcattcttgaaaatacctccgggcttgccttctgcacacttctttccctccctgtctcacgccatggtagcgtccgcctaggttgcaggcgacccgcggggtggggcacaccattcaaagaaggggagggattgaggtttgcatcaaaacaaatacccctgcctttgcaaaggccataactaagtaatccagaaaaagaaatgcaggcggagaatagcagcctccctctgccaagtaagaggaaccggcctaaaggacattttctctctctctcctcccctctcatcgggtgaatagtgagctgctccggcaaaaagaaaccggaaatgctgctgcaagaggcagaaatgtaaatgtggagccaaacaataacagggctgccgggcctctcagattgcgacggtcctcctcggcctggcgggcaaacccctggtttagcacttctcacttccacgactgacagccttcaattggattttctccatctagcggagccgggggctgcctggaaagatcgctccaggaaggacaaaggtccggaagttgtgggaccttagcagcttgggctccccggatcacccccaaatgatcatttcggaatggagccccagttttcactaggatgccatgggctctaaaatatacagctatgagttctcaatgtttcgagatccaaaagtctcagacctcaatgctttgtgcatcttttatttcagggattccctacgcccagcaccgggtggatgtgcaaagaagtacgctttaggccggctcaaggttccccaaagctccactcctctgcctaggcgttcaactttgagttcggatggtcctaacatccccatcatctacacccaggtctcccaacaatgcaactcctatgatgatccctctagccaagcttccatcccactcacccccaaactcgctaagtccccactgccccacccccagccccagcgattttcccgagctgaaaatacacggagccgagagcccgtgactcagagaggactcatcaagttcagtcaggagcttacccaatccagggaagcgtgtcaccgtcgtggaaagcacgctcccagcccgaacgcaaagtgtccccggagcccagcagctacctgctccctggacggtggctctagacttttgagaagctcaaaacttttagcgccagtcttgagcacatgggaggggaaaaccccaatcccatcaacccctgcgaggctcctggcacaaagctggacagtcgccatgacaagtaagggcaagtaatccgcctgccggaggaagcaaaggaaatggagttggggaggagggtgcagagtcaggattctcgccgacctggtgccgtagatactaacattttggggtggaaaattctgcaagccagagctgtgagggcagaattggtggaaatcattttggaggaatcctgcattgtgtcaaatatgaagggtggaaggaagaaagcttttgcgtttgctctcagctggatcctttcttctcatcagttaaaatgtcattttttaggaaggctttccgtaatatcacaccctaacgttttctcccagatactttatatcacaccatcttatttaatctccttcacaacccttatcactctgataagatttatttgttcattgctttcagtacatggaaacgtaagccttatgaggatatagaatttttctactatcttattcattgttgtattcctgagtgcctatatcagtgctgggtagcaagtaagagctcgataataaatattttttgaatgagggagacaggtctgaagcctggagaatgagatgcagaagaggtgcaagacctgctgcgccctctgcaggcggcgggggggcggtgcaggtgctttaagaattaccgcgggactcggtagggggagcgtaggcgcttctcgccaagatagaagcgttcagactacaactcccagcagccacgaggagccctagggcttgatgggaacgggaaaccttctaacctttcacgtcccggctccgcgggttccgtgggtcgcccgcgaaatctgatccgggatgcggcggcccaatcggaaggtggaccgaaatcccgcgacagcaagaggcccgtagcgacccgcggtgctaaggaacacagtgctttcaaaagaattggcgtccgctgttcgcctctcctcccgggagtcttctgcctactcccagaagaggagggaagcacaggtgggtttctttagctctgcgtcggatccctgagaacttcgaagccatcctggctgaggctaatctccgctgtgcttcctctgcagtatgaagactttggagactcaaccgttagctccggactgctgtccttcagaccaggacccagctccagcccatccttctccccacgcttccccgatgaataaaaatgcggactctgaactgatgccaccgcctcccgaaaggggggatccgccccggttgtccccagatcctgtggctggctcagctgtgtcccaggagctacgggagggggacccagtttctctctccactcccctggaaacagagtttggttcccctagtgagttgagtcctcgaatcgaggagcaagaactttctgaaaatacaagccttcctgcagaagaagcaaacgggagcctttctgaagaagaagcgaacgggccagagttggggtctggaaaagccatggaagatacctctggggaacccgctgcagaggacgagggagacacgtaagtggtgatggcagtggagtgtggagtctggggagatgaagtgtgaggtcgatctgtcctctggtcctgagacccacttctccaggcctctgccccctttgcttggcgacccaggtttattgtcccccatcttcctttcagcgcttggaactacagcttctcccagctgcctcgatttctcagtggttcctggtcagagttcagcacccaacctgagaacttcttgaaaggctgtaagtggtaaggataacaacggggcagggagctgaccacccccgagattttcactgtaaaacagtccagttttctaggagagggatgccccagagctgggagaagcggcacgtagcccttttagactgagcttacattttatctagcagtttgtgtcttctacttccctcaaggattcaggggggcttacctaccccagaggcaggctcagccctagccctacacttgaaaagcataggtctggccagctttctaactctcccctgtttctagggctcctgacggttcctgcatcttgaccaatagtgctgataacatcttgcgaatttataacctgcccccagagctgtaccatgagggggagcaggtggaatatgcagaaatggtaaggactggggctaactgcctcttcatcaatgctgcacatttaagtccttcgtggagatggaaaaagtgtagtccaagtgtttcctgttcacaaacgggactgtttttcaagacgagtttccacatgtagcgttttctgccccgaattctgaagttatttagagagaggtttcccctttctttaattaggaatctgtgttttttgctaaaaagtagtgaatttcttgtggcagcatatatatatttctatttcttatttttttgagacaaggtcttgctctgtcacccaggctggagtgctgtggtgtgatctcggctcactgcaacctctgcctcccgggttcaagcgattctcctgcctcagcctcacaagtagctggtattacaggcgcacgccatcacactcgactaatttttatagttttagtagagacggggtttcgccatgttgggcaggctgatatcaaattcctgacctcagaggatccgcccaccttggcctcccaaagtgcggggatcacaggtgtgagtcaccgtgcctggcttatagctatttattgattgactactgatatatgttagtcactgtgctgggataaagtggtggacaagacagatgaagggctggtttgctttctgtgtgggagacagacaacaaacatgtaaaccagcaagcatcaggaccaagatgatgataaatgctctgaaggaaatacacagaatgaagagagactaactagaggaaagcacattgcataaaatggtcaggaaggagctctctgaaaaggaggcatttgagctaagacctgaaggaggataagggatcagtcatgtgaaggcttctggaaagagctttccaggaactggcaatgatactataaacacccagaactgggaaatagctttgtgcgttaaaagaccagaaaggccctgcatggtggctcacgcctgtaatcccagctactcaggaggccgaggtgtgcagatcacttgaggccaggagttcgagaccagcctggccaatatggcaaaaccccatcgctactaaaaataccaaaattagacgcatgtggtggcacgcgcctgtaatcccagctacttgtgtggctgaggcaggagaatctcttaaactcaggaggtggaggctgcagtcagacaaaattgtaccactgcactccagcctgggcgacagagtgagactccatctcaaaaaacaacaaaacagactgggctcagtggctcacacctgtaatcccagcactttgggaggctgaggtgggcagatcacctgaggtcaagagtttgagaccagcctggccaacatggcaaaacctcatctctacaaaaatacaaaaattagctgggtgtgatggtgggtgcctgtaatcccagctacttgagaggctgaagcagaagaatcatttgaacccaggagatggaggttgcagtgagccaagatcatgtcactgcactccagcctgggtgacagagtgagactccatcccaaaacaaacaaacaaacaaacaaacaaacaaacaaacacaaaacaaaaaacccagaatgctggtatagccagactgaggcaagtgagggggacagaggggtgaggacagagaagagcagccacgtcgtgttggttcttatgggtaaggcatttggagtttatttgggaagtcatgagagaggtgttttttttttttttttgagacgagtcttgctctgtcgcccaggctggagtgcaatggcgtgatctcggctcactgcaacctctgcctcctggattcaagcgattctcctgcctcagcctcccgagtagctgggattacaggcacccgccaccatgcccagctaatttttgtatttttttaaatagagacggggttttaccatattggccaggatggtctcgtactcctgacatttgatccgccggtctcggcctcccaaagtgctgggattataggcatgagccaccgcgcctggcttaatttttgtatttttagtagagacaggttttgccacgttggcctggctggtctcaaactcctgacctcaggtgatccacctgcctcagccttccaaagtgctaggattacaggcgtgagccaccatgccaggccatgagagaggttttttttgtttgtttgtttgagacagagtcttgctctgttgtccaggctggagtgcagtggcaccatctcagctcaccgcaacctccgcctcccaggtttaagtgattctcctgcctcaaccttccgagtagctgggattacaggcatgtgccaccacacccggctaatttttttgtatttttttagtagagatggggggttcatcatattggccaggctggtctcgaactcctgaccttgtgatctgcccaccttggcctcccaaagtgctgggattacaggcatgagccactgcgcccggccaagagagttttaaaacagaagagtgaatggtttatgggtgggcaagagtgaaatccagggccaggcacggtggctcacgcctgtaatcccaacactttgggaggctgagatgggtggatcacctgaggtgaagagttttagaccagcctggccaacatggtaaaaccctgtctctactcaaatacaaaaattagttggggctgggtgcggtggctgactcctgtaatcccagcactttgggaggctgaggcaggtggatcacctgaggtcaggagttcgagaccagcctggccaacatgatgaaaccccatctctattaaaaatacaaaaaattagctgggcgtggtggcgggcgcctgtaatcccagctactctggagtctgaggcaggagaattacttgaaccaaggagatggaggttgcagtgagccaggattgcaccactgcactccagtccaggcaacagtgtaagactccgtctcaaaaaaaaaaaaaaaaaaaaaagattggctatagttttctcccacccatcctaatcaggttctgcctccatcgcttcctgaaagtgctcttgtcaaggtcactaatgtcctcttgggtcattctccttttttttttttttttttttttttgagacagagtctcgctctgtcacccagctggagtgcagtggcgccatctcagctcactgcaagctctgcctcccgggatcacgccattctcctgcctcagcctctcccgagtagctgggactacaggcgcccgccaccacgcctggctaattttttgtatttttagtagagacggggtttcaccatggtctcgatctcctgacctcgtgatcctcctgcctcggcctcccaaagtgctgggattacaagcatgagccaccgcgcccagcccctcttgggtcattctctaaattcgcctcactgcatctcttagcagcatgagtcactgtctccacctccctgcgctggagcactcaggcactcagggctctgctgggccttctcctcctccatcagcactctttcttttttttcttttttttgagacggagtttcaaaaaatcagacccaccaaggcatgtggcagttgtgttgctctttgctcggtacccgctagaggtctgttgccattaatttgaaatgagaccagttagtgtgactgtgcatctttcctggcaagttaaatgactatagtttctctgtttgtaaaatggggatgattataatagcacctgcctcacagagttgtgagaattaaaataatcagtaatgaattaaagcacttaaggccgggtgcggtggctcacgcctataatcccagcactttggggggccgaggcaggtggatcgcctgaggtcaggaattcaagaccgacctggccaacatagtgaaaccctgtctttactaaaaatacaaaaattagccgggcttagtggcgggcgcctgtaatcccagctacttgggaggtttgaggcaggagaattgcttgaatccaggaggcgaaggttgcagtgagctgatcgcaccactgcactccagcctgggcaagagagcaagacttagtctcaaaaaaaaataataaaattaaaaaaaagtacttaaaacagcacctagcatatagtaagtgttcggtaaacactagtagtcactggtatcagttgtgtgcaagccaagaataggaggatggtatggttgaggtttaccaggagagaaagacaagggtatcctgagagtgtcttcaagagtgtgcatgccatggtggactagaatctacagtgggtaaggaactggactgtaaataagtttttgatgaagctgaataaattgtcatggtagaaatagcagagcagggtcaggcctggtggctcacgcctgtaatcccgacactttgggaggccgaggcgggtggatcacctaaggtcaggagttcgagaccagcctggccaatatggtgaaaccccgtctctactaaaaaagatacaaagttagccaggcatggtcgtgattatgatattaatgattataatattaaaacattttaaaaaatatatcttgcaatacagatagtcaatttgttttctttttttctttctttttttttttttttttttgagacagagtctcgctctgtggcccaggctggagagcagtggtgtgatcttgcctcactgcaacctctgtttcccggttcaagcgattctcctgcctcagcttcctgagtagctgggattacaggcacgcaccaccgcacccggctaatttttgtatttttagtagagatggggtttcgccaagttggccaggctggtctcaaactcccgacctcaagtgatccacccatttccgcctcctaaagtgctgggattacaggcgtgagccactgctcctggccagtcagtttgttttcaaaagatttttgtggctggtgtggtggctcatgcctataatcccagcactttgggagaccaaggtgggaggaatgcttgagcccaggagtttgagaccagccttggtaacacagccagatcctgtctctatcaaaaaagttgggcctatggtcccagctacttgggaggctgaggtgggaggatcgcttgagcctgcgaggttgaggctgccatgacctttgattgcaccattgtactctagcctgggcgacagagtgagactctgtctcaaaacaaacaaccaaaacctttttgtgcttttttttttttttttcctgctagtgtaccagttctatcgcaacctctctcattaggtattttcatttttagtgtctacaagcttagcatttgaaatagataactttttttttttgagatggagtcttgctgtgtcccccaggctggagtgcagtggcgcgatctcagctcactgcaagctccgcctcccgggttcacgccattctcctgcctcagcctctcgagtagctgggactacacgcacccactgccaccacgccaggctaattttttgtatttttagtacagtcggggtttcaccatgttagccaggatggtctcgatctcctgacctcgtgatccgcccgccttggcctctcaaagtgctgggattacaggcgtgagccactgcacccggccttaaatagataaaatttgtataggtcagaaaattggggaagggtgtatttgggtatttccatatacttgtgtgtactgagtcttcttcccaatatagtttctcgggttttctcctttcttttccaccttttcacagaactttctgcaagtctcatttccagctccccagcgtctttcctgagtacttgccctgccccgtgggtcttgcaggaagcctttactcctcgtcttgccctctccaggagacactttgcatcctctgtaccctttatctctcagggtggggacggggaatgtcctcattcccaaatgctgtagccacacaattgctctttcgtctttgtgaaacttttcccttgaggcttatgctgattctctctcccgctgacgacgttggcactgtacagccttccggtgctctcctgttcgcccgccattttggtgacctcaggtatccaagccaaaagccagggtctctctcatcctttaatctttaatctccctgttcctaacccctcacatccaattacttcccaaatcccatcaagtctgcctaatcttcctaatccacccacatctgtccctcccactgcctctactttaattcaaggtcctattattttgggccttatgttgctgaaacagtctcctgcctccttttgctcattaaaaccgtatttgttgactctgcttattctgcaccacgtgttggggaagcagtggtgagagcgaggcagatgtgattccctccttctctgataggtatgacggaaggggagtgaggagcaccaggggctataggaaagaggaacaggggcgccttgcttagctggaggggttagggaagcgttcccagaggaagaagcatctaagagacctgaaggatgactaggattcagccaggaggagtcgttgggggagatgaaggaagaatattccagacttggagcctaggacatgtgaaagccagtgggttgaaagtgtggcgagttggcactttatgggacctgagagtcaaaatggcgggactcagagattttttttttttttttttttttttttgaaatggagtcttgctctgtcgcccaggctggagtgcagtggcgcgatctgggttcactgcaagctccgcctcccaggttcacgccattctcctgcctcagcctcccgagtagctgggactacaggcgcccgccaccacgcctggctaattttttgtgtttttagtagacacggggtttcaccacgttagccaggatggtctcgatctcctgaccttgtgatccgcccgccttggcctcccaaagtgctgggattactggcgtgagccactgcgcccggtcaggactcagagatttttatgggaattagcagatagagataagccttgagaggtgggtcgggggtagcacgtggtaatggaagactaggaggaggaactggcaagatttggtattgggttggaccaggagtggaaaggaagtgaagagtggtagcagtcaaggctggtgctcagatttcaggattgagcactggtgtggagtccaggaggaacagcaggtttgatggtggtggatgccgggcctattatggacaaattgagtttgaggaacctgtgggatgatcaagtggcactgtccaccaggcagttggatatatgggttcagagtatagaggtggacactgaagtcctggctggttgacatcagcctgaggcccagaagacaactgacgaaggacagtgtccagactatttatctctcacaaatcagtaagaaaaagacggctgggcatggtggctcatgcctgtaatcccagcactttgggaagccgaggcaggtggatcacccgaggtcaggagttcaagaccagcctgaccaacatggcaaaatcccgtctctactaaaaatacaaaaattagccgggtgtggtggcaggcgcctgtaatcccagctactcaggaggctgaggcaggagaattgcttgaacctgggaggtggaggtagtagtgagccgagatcgtgccactgcactccagcctggggacagagggagactctgcctccaaaaaaaaaaaaagaaaagaaaaagaaaaaagagaagaaaagaaaaagacaacaactggtcaggcatggtggctcacacctgtaatccccactttgggaggccgaggtaggcagatcacttgaggctgggagtttgagaccagcctggccaacatggtgaaaccccatctctactaaaaagtataaaaattagccgggcgtggtggcaaatgcctgtggtcccggctccttgggaggctgaggcatgagagtcgcttgaacccaggaggcagaggttgtagtgagccaagatcgtgccactgcaccccagcttggggaacagagaaagactctgtctcaaaaagaaaaaaaaagaaaaagaaaatgggcaaaatttatgaaaaggtgtacctaactaaatggccagtaaacatagaggaaatatctaatctctcttatagtaatgatggaaatacaaatttatgctgtaatgaaataccatttcaccaccttcaaattgagaaaaatgtaaaagtctggcaataccaagaagataaagaacaatagacacttttttttttttttggagacaggatcttgttctgttgcccaggctggagtgcagtggtgcgaacatggcacactgtagcctcaaactcctggggtcaagcagtcctcctgcctcactctcccaaacaggtgggactacaagtatgccaatatgcctgactaattttttaattttttgtaaaactggggtcttgctatattgcccaggctagaatagagactcttatacactgctggtgggagaggacattgggacaagtgctttgggaaagaaattgacattatagtatcttacaaagtttgcaaagtgcatagcgtagagaccagtaattttactcttcagcagaaactgtagagaaacccttctacatgtgtacagaatgttaaagcacactagccaaaaaacagaaaaacatcagtgattctaaatagaagaagggtagatcagtttgaatatattcatgagtagagtactatacaccagtgaaaatgcatgaattagagcaaaatgtgtttccatggttaaagcttgctatcacagagggatgtatatgatataataccattactgttaagtctaggccgggcatggtggctcatgcttgtaatcccagtgcattgaaaggctgaggtggctggattgcttgaggccaggagttttagaccagcgtgagcaacacagacccctgtttctacaaaaaaataattttaaagattagccgggcaggctgggcgtggtgtctcatgcctgtaatcccagcacttgggagactgaggtgggtggatcacgaggtcaggagttcaagaccagcctggccaagatggtgaaaccccgtctctactaaaaatacaaaaaaattagccgggcgtgatagcaggcgcctgtaatcgtagctactcaggaggctgaggcagagaattgcttgagtctgggaggcagaggttgcagtgagccaagattgtgccactgcattccagcctgggcgacagagcgagactccgtcaaaaataaataaataaataaataaataaataaataagccaggtatggtggcttatgcttatattcccagttactagggaggctgaggccaggggattgtttgcttgagcccaggagtttgaggtttcagtgagatgattgcgccactgtgctccagcctaggcaacagagtaagaccctgtctctaagaaaagaaaaaattaagtctaaagacctgcaagacaacgttagatactgttttttttcccatatgaatatactcctaggctgggcgcagtggctcacacctgtaatcccagcactttgggaggctgaggcagaaagatcacttgaggccaagagttcgagaccagcctggccaacgtggcgaaaccctgtctatactaaaaatacaaaaaattagctgagcatggaggtgaactcctgcaatcccagctactcgggaggctgagacacaagaattgcttgaacctgggaggtggaggttgcagtgaactgagatcgtgccactgcactcagcctgggtgacagagtgagactctgcctttaaaattaaaaaaaaaaaatttatatatatatatatatttatatatatatatatatttatatatatatatatatatatatatttatatatatatatatatatttatatatatatatatattcctaaggaaatgtatgacagtgataaattcaagatagtgtttacctctgagggagagtttctgttaggaaaggggtttaaacatatctttttgttcagctggatggaggggtcacagggctgtttttttaataagatactttgtatgtttgaactgtttaattttttttctttatttttgtaaggaggtttttttgtttccatttttgtatttttgagacagtgtttctgttgcccaggctggagtgcagtggcaatgatctcagctcactgtggtctctatctcctgggctcaagcaattctcatgcctcagcctccctagtagctgggactacaggcatgcactaccatgcccagctaatttttttttcttgtagagacagtgtttcaccatattgcccaggctggtcttgaactcctgggctcaagtgatctgcctgcctcagcctccctaagtgctgggattacaggtgtgagccactgtgctcagccgataatttttttcttttctttttcttttttttttggggggcactgtctctctgtcacctagggtggagtgcagtggtgcgatctcagctcactgcaacctttgtctcctgggttcaagggattctcctgcctcagcctcctgagtatctgggattacaggtgtccaccaccacgcctggcaaatttttgtactaatatttttttaaaggatcaaatggcacctagcatgtactcagtaagtatttgaataattggttggttctttgtctctgggttgaggtattattatttgtttcttcctctctaagtgtttataaagaaaaagtataaggcccggcacggtggctcacacctgtaatcccagcacttttggaggctgaggcgggtggatcacctgaggtcagaagtttgagaccagcctggccaacatcatggtgaaaccctgtctctattaaaaaaaaaaacaaaaacaaaattagccaggcatggtggtgcatgctctgtctcaaaataataaaaaaaaaaaagtatgaatctatatggcttttggtggctaaatttgacattaaagtctgagctcacccttgaacattgagacagagtctgtgctccatatatacaccccatctgccacaacactgctagaggcacgcgcctcagactccttttccctccgagtgactcagccattcccccgtctctgtataggtccctgtccttcgaatggtggaaggtgataccatctatgattactgctggtattctctgatgtcctcagcccagccagacacctcctagtaagtaatgtttgcctccctgctcgccgccccaccacccagtttcaagcagggcctcttgggagagtcaagggctgccaggggtctttggaggaggaaggcttggcatgcttatcagaggggctggtcagttggcttcctccccttcctttttttttttttagattgagtctccctctgtcacccaggctggagggcggtgatgcagtctcagctcactgcaacctccgcctcccaggttgaagtgattctcctgcctcagcctcctgagtagctgggattacaggtgtgcaccaccacacccagctaattgtgtatttttcatagagatggggtttcaccacgttggccaggctggtctcgaactgacctcaggtgatccacctgccttggcctcctgaagtgcttggattacaggcatgagccaccacacccagcctcatttttgtatttttagtagagacagggtttcaccatgttggccaggctggtctcgaactcctgacctcaagtgatccacctgccttggcctcccaaagtgctgggattacaggcatgagccactgtgcccggccattcctccccttcctttgacagcaccggggtttcagtgtccatgtctctctcagcgtggccagcagcagccgggagaacccgattcatatctgggacgcattcactggagagctccgggcttcctttcgcgcctacaaccacctggtagggaccgccatactcagccccagcactcgtactggcccggctctccttccttgagggcagctgaggctttgcaagacctgttttcagccctttccttcccccaggatgagctgacggcagcccattcgctctgcttctccccggatggctcccagctcttctgtggcttcaaccggactgtgcgtgttttttccacggcccggcctggccgagactgcgaggtccgagccacatttggtaagcatctgtgcctccaagggaggaggagagggaagggcactgccacctgcacaggggccttttgtgagccgggggccacctgtgggggttcacgccgtcctctgtacggccccgggagcaggtgcagcccagtcggcagaggagcaaacaggctcagagcaggtaggaaaccttcccaaggccaaccagctggtcaaaggactgcttccttcctgaactcataccctgtcagctgtggagcttttggtctctgaaatctttctagaaaattgttgataaagctgattccgttttcctgtaggccttcaacttgcatctctccaaggaagaactgggatttgagagggatgaagtggggcttgggcatttaggtcctttgggaggatagatgtggggagcatcagaggtctttgtcctgcttgtgacagacagcatgggggggatgttgagtccaagcatgttggtgctgggacgggagacagacctctgcttagcctggttagtgccaggagccattgccccctcccccactttgttccttccctctctagcaaaaaagcagggccagagcggcatcatctcctgcatagccttcagcccagcccagcccctctatgcctgtggctcctacggccgctccctgggtctgtatgcctgggatgatggctcccctctcgccttgctgggagggcaccaagggggcatcacccacctctgctttcatcccgatggcaaccgcttcttctcaggagcccgcaaggtaggggtcacaccctgagagcccaaagcagctgggcagcggggcaggagcagggatgtagtctgcagtgtaggggaatgggtggggatggggaaaaaatcccaagctgaaggagtgcctggagaccccgagggaggcagggacatccagggctttgggggtgactccaggtcctgttccttgtctccaggatgctgagctcctgtgctgggatctccggcagtctggttacccactgtggtccctgggtcgagaggtgaccaccaatcagcgcatctacttcgatctggacccgtgagtggctgtgactccttcctacacagggccctgataagcctaggaatgccagagcccagctgtagggtcccagtccctgggtgtgaggggttcctgccccaggggtgaggcctctgccagcaaatctctcctctctctcgcaggaccgggcagttcctagtgagtggcagcacgagcggggctgtctctgtgtgggacacggacgggcctggcaatgatgggaagccggagcccgtgttgagttttctgccccagaaggactgcaccaatggcgtgaggtcctcagttcaattccagagatgttggggcttgggttggggagggaggtgaatcccagagggagcaagtgtcctcactgaaggcactgatagaccctccccatctctccctcagcctgcaccctagcctgcctctcctggccactgcctccggtcagcgtgtgtttcctgagcccacagagagtggggacgaaggagaggagctgggccttcccttgctctccacgcgccacgtccaccttgaatgtcggcttcagctctggtggtgtgggggggcgccagactccagcatccctgatgatcaccagggcgagaaagggcagggaggaacggagggaggtgtgggtgagctgatataaaaaggtttttatgata

SEQ ID NO: 14919 - DNA, 4011 bp, Homo sapiens
ttctttttttttttcctccgggaagatgagatatactcattcttgaaaatacctccgggcttgccttctgcacacttctttccctccctgtctcacgccatggtagcgtccgcctaggttgcaggcgacccgcggggtggggcacaccattcaaagaaggggagggattgaggtttgcatcaaaacaaatacccctgcctttgcaaaggccataactaagtaatccagaaaaagaaatgcaggcggagaatagcagcctccctctgccaagtaagaggaaccggcctaaaggacattttctctctctctcctcccctctcatcgggtgaatagtgagctgctccggcaaaaagaaaccggaaatgctgctgcaagaggcagaaatgtaaatgtggagccaaacaataacagggctgccgggcctctcagattgcgacggtcctcctcggcctggcgggcaaacccctggtttagcacttctcacttccacgactgacagccttcaattggattttctccatctagcggagccgggggctgcctggaaagatcgctccaggaaggacaaaggtccggaagttgtgggaccttagcagcttgggctccccggatcacccccaaatgatcatttcggaatggagccccagttttcactaggatgccatgggctctaaaatatacagctatgagttctcaatgtttcgagatccaaaagtctcagacctcaatgctttgtgcatcttttatttcagggattccctacgcccagcaccgggtggatgtgcaaagaagtacgctttaggccggctcaaggttccccaaagctccactcctctgcctaggcgttcaactttgagttcggatggtcctaacatccccatcatctacacccaggtctcccaacaatgcaactcctatgatgatccctctagccaagcttccatcccactcacccccaaactcgctaagtccccactgccccacccccagccccagcgattttcccgagctgaaaatacacggagccgagagcccgtgactcagagaggactcatcaagttcagtcaggagcttacccaatccagggaagcgtgtcaccgtcgtggaaagcacgctcccagcccgaacgcaaagtgtccccggagcccagcagctacctgctccctggacggtggctctagacttttgagaagctcaaaacttttagcgccagtcttgagcacatgggaggggaaaaccccaatcccatcaacccctgcgaggctcctggcacaaagctggacagtcgccatgacaagtaagggcaagtaatccgcctgccggaggaagcaaaggaaatggagttggggaggagggtgcagagtcaggattctcgccgacctggtgccgtagatactaacattttggggtggaaaattctgcaagccagagctgtgagggcagaattggtggaaatcattttggaggaatcctgcattgtgtcaaatatgaagggtggaaggaagaaagcttttgcgtttgctctcagctggatcctttcttctcatcagttaaaatgtcattttttaggaaggctttccgtaatatcacaccctaacgttttctcccagatactttatatcacaccatcttatttaatctccttcacaacccttatcactctgataagatttatttgttcattgctttcagtacatggaaacgtaagccttatgaggatatagaatttttctactatcttattcattgttgtattcctgagtgcctatatcagtgctgggtagcaagtaagagctcgataataaatattttttgaatgagggagacaggtctgaagcctggagaatgagatgcagaagaggtgcaagacctgctgcgccctctgcaggcggcgggggggcggtgcaggtgctttaagaattaccgcgggactcggtagggggagcgtaggcgcttctcgccaagatagaagcgttcagactacaactcccagcagccacgaggagccctagggcttgatgggaacgggaaaccttctaacctttcacgtcccggctccgcgggttccgtgggtcgcccgcgaaatctgatccgggatgcggcggcccaatcggaaggtggaccgaaatcccgcgacagcaagaggcccgtagcgacccgcggtgctaaggaacacagtgctttcaaaagaattggcgtccgctgttcgcctctcctcccgggagtcttctgcctactcccagaagaggagggaagcacaggtgggtttctttagctctgcgtcggatccctgagaacttcgaagccatcctggctgaggctaatctccgctgtgcttcctctgcagtatgaagactttggagactcaaccgttagctccggactgctgtccttcagaccaggacccagctccagcccatccttctccccacgcttccccgatgaataaaaatgcggactctgaactgatgccaccgcctcccgaaaggggggatccgccccggttgtccccagatcctgtggctggctcagctgtgtcccaggagctacgggagggggacccagtttctctctccactcccctggaaacagagtttggttcccctagtgagttgagtcctcgaatcgaggagcaagaactttctgaaaatacaagccttcctgcagaagaagcaaacgggagcctttctgaagaagaagcgaacgggccagagttggggtctggaaaagccatggaagatacctctggggaacccgctgcagaggacgagggagacaccgcttggaactacagcttctcccagctgcctcgatttctcagtggttcctggtcagagttcagcacccaacctgagaacttcttgaaaggctgtaagtgggctcctgacggttcctgcatcttgaccaatagtgctgataacatcttgcgaatttataacctgcccccagagctgtaccatgagggggagcaggtggaatatgcagaaatggtccctgtccttcgaatggtggaaggtgataccatctatgattactgctggtattctctgatgtcctcagcccagccagacacctcctacgtggccagcagcagccgggagaacccgattcatatctgggacgcattcactggagagctccgggcttcctttcgcgcctacaaccacctggatgagctgacggcagcccattcgctctgcttctccccggatggctcccagctcttctgtggcttcaaccggactgtgcgtgttttttccacggcccggcctggccgagactgcgaggtccgagccacatttgcaaaaaagcagggccagagcggcatcatctcctgcatagccttcagcccagcccagcccctctatgcctgtggctcctacggccgctccctgggtctgtatgcctgggatgatggctcccctctcgccttgctgggagggcaccaagggggcatcacccacctctgctttcatcccgatggcaaccgcttcttctcaggagcccgcaaggatgctgagctcctgtgctgggatctccggcagtctggttacccactgtggtccctgggtcgagaggtgaccaccaatcagcgcatctacttcgatctggacccgaccgggcagttcctagtgagtggcagcacgagcggggctgtctctgtgtgggacacggacgggcctggcaatgatgggaagccggagcccgtgttgagttttctgccccagaaggactgcaccaatggcgtgagcctgcaccctagcctgcctctcctggccactgcctccggtcagcgtgtgtttcctgagcccacagagagtggggacgaaggagaggagctgggccttcccttgctctccacgcgccacgtccaccttgaatgtcggcttcagctctggtggtgtgggggggcgccagactccagcatccctgatgatcaccagggcgagaaagggcagggaggaacggagggaggtgtgggtgagctgatataaaaaggtttttatgata

SEQ ID NO: 14920 - DNA, 15182 bp, Homo sapiens
gggaacgggaaaccttctaacctttcacgtcccggctccgcgggttccgtgggtcgcccgcgaaatctgatccgggatgcggcggcccaatcggaaggtggaccgaaatcccgcgacagcaagaggcccgtagcgacccgcggtgctaaggaacacagtgctttcaaaagaattggcgtccgctgttcgcctctcctcccgggagtcttctgcctactcccagaagaggagggaagcacaggtgggtttctttagctctgcgtcggatccctgagaacttcgaagccatcctggctgaggctaatctccgctgtgcttcctctgcagtatgaagactttggagactcaaccgttagctccggactgctgtccttcagaccaggacccagctccagcccatccttctccccacgcttccccgatgaataaaaatgcggactctgaactgatgccaccgcctcccgaaaggggggatccgccccggttgtccccagatcctgtggctggctcagctgtgtcccaggagctacgggagggggacccagtttctctctccactcccctggaaacagagtttggttcccctagtgagttgagtcctcgaatcgaggagcaagaactttctgaaaatacaagccttcctgcagaagaagcaaacgggagcctttctgaagaagaagcgaacgggccagagttggggtctggaaaagccatggaagatacctctggggaacccgctgcagaggacgagggagacacgtaagtggtgatggcagtggagtgtggagtctggggagatgaagtgtgaggtcgatctgtcctctggtcctgagacccacttctccaggcctctgccccctttgcttggcgacccaggtttattgtcccccatcttcctttcagcgcttggaactacagcttctcccagctgcctcgatttctcagtggttcctggtcagagttcagcacccaacctgagaacttcttgaaaggctgtaagtggtaaggataacaacggggcagggagctgaccacccccgagattttcactgtaaaacagtccagttttctaggagagggatgccccagagctgggagaagcggcacgtagcccttttagactgagcttacattttatctagcagtttgtgtcttctacttccctcaaggattcaggggggcttacctaccccagaggcaggctcagccctagccctacacttgaaaagcataggtctggccagctttctaactctcccctgtttctagggctcctgacggttcctgcatcttgaccaatagtgctgataacatcttgcgaatttataacctgcccccagagctgtaccatgagggggagcaggtggaatatgcagaaatggtaaggactggggctaactgcctcttcatcaatgctgcacatttaagtccttcgtggagatggaaaaagtgtagtccaagtgtttcctgttcacaaacgggactgtttttcaagacgagtttccacatgtagcgttttctgccccgaattctgaagttatttagagagaggtttcccctttctttaattaggaatctgtgttttttgctaaaaagtagtgaatttcttgtggcagcatatatatatttctatttcttatttttttgagacaaggtcttgctctgtcacccaggctggagtgctgtggtgtgatctcggctcactgcaacctctgcctcccgggttcaagcgattctcctgcctcagcctcacaagtagctggtattacaggcgcacgccatcacactcgactaatttttatagttttagtagagacggggtttcgccatgttgggcaggctgatatcaaattcctgacctcagaggatccgcccaccttggcctcccaaagtgcggggatcacaggtgtgagtcaccgtgcctggcttatagctatttattgattgactactgatatatgttagtcactgtgctgggataaagtggtggacaagacagatgaagggctggtttgctttctgtgtgggagacagacaacaaacatgtaaaccagcaagcatcaggaccaagatgatgataaatgctctgaaggaaatacacagaatgaagagagactaactagaggaaagcacattgcataaaatggtcaggaaggagctctctgaaaaggaggcatttgagctaagacctgaaggaggataagggatcagtcatgtgaaggcttctggaaagagctttccaggaactggcaatgatactataaacacccagaactgggaaatagctttgtgcgttaaaagaccagaaaggccctgcatggtggctcacgcctgtaatcccagctactcaggaggccgaggtgtgcagatcacttgaggccaggagttcgagaccagcctggccaatatggcaaaaccccatcgctactaaaaataccaaaattagacgcatgtggtggcacgcgcctgtaatcccagctacttgtgtggctgaggcaggagaatctcttaaactcaggaggtggaggctgcagtcagacaaaattgtaccactgcactccagcctgggcgacagagtgagactccatctcaaaaaacaacaaaacagactgggctcagtggctcacacctgtaatcccagcactttgggaggctgaggtgggcagatcacctgaggtcaagagtttgagaccagcctggccaacatggcaaaacctcatctctacaaaaatacaaaaattagctgggtgtgatggtgggtgcctgtaatcccagctacttgagaggctgaagcagaagaatcatttgaacccaggagatggaggttgcagtgagccaagatcatgtcactgcactccagcctgggtgacagagtgagactccatcccaaaacaaacaaacaaacaaacaaacaaacaaacaaacacaaaacaaaaaacccagaatgctggtatagccagactgaggcaagtgagggggacagaggggtgaggacagagaagagcagccacgtcgtgttggttcttatgggtaaggcatttggagtttatttgggaagtcatgagagaggtgttttttttttttttttgagacgagtcttgctctgtcgcccaggctggagtgcaatggcgtgatctcggctcactgcaacctctgcctcctggattcaagcgattctcctgcctcagcctcccgagtagctgggattacaggcacccgccaccatgcccagctaatttttgtatttttttaaatagagacggggttttaccatattggccaggatggtctcgtactcctgacatttgatccgccggtctcggcctcccaaagtgctgggattataggcatgagccaccgcgcctggcttaatttttgtatttttagtagagacaggttttgccacgttggcctggctggtctcaaactcctgacctcaggtgatccacctgcctcagccttccaaagtgctaggattacaggcgtgagccaccatgccaggccatgagagaggttttttttgtttgtttgtttgagacagagtcttgctctgttgtccaggctggagtgcagtggcaccatctcagctcaccgcaacctccgcctcccaggtttaagtgattctcctgcctcaaccttccgagtagctgggattacaggcatgtgccaccacacccggctaatttttttgtatttttttagtagagatggggggttcatcatattggccaggctggtctcgaactcctgaccttgtgatctgcccaccttggcctcccaaagtgctgggattacaggcatgagccactgcgcccggccaagagagttttaaaacagaagagtgaatggtttatgggtgggcaagagtgaaatccagggccaggcacggtggctcacgcctgtaatcccaacactttgggaggctgagatgggtggatcacctgaggtgaagagttttagaccagcctggccaacatggtaaaaccctgtctctactcaaatacaaaaattagttggggctgggtgcggtggctgactcctgtaatcccagcactttgggaggctgaggcaggtggatcacctgaggtcaggagttcgagaccagcctggccaacatgatgaaaccccatctctattaaaaatacaaaaaattagctgggcgtggtggcgggcgcctgtaatcccagctactctggagtctgaggcaggagaattacttgaaccaaggagatggaggttgcagtgagccaggattgcaccactgcactccagtccaggcaacagtgtaagactccgtctcaaaaaaaaaaaaaaaaaaaaaagattggctatagttttctcccacccatcctaatcaggttctgcctccatcgcttcctgaaagtgctcttgtcaaggtcactaatgtcctcttgggtcattctccttttttttttttttttttttttttgagacagagtctcgctctgtcacccagctggagtgcagtggcgccatctcagctcactgcaagctctgcctcccgggatcacgccattctcctgcctcagcctctcccgagtagctgggactacaggcgcccgccaccacgcctggctaattttttgtatttttagtagagacggggtttcaccatggtctcgatctcctgacctcgtgatcctcctgcctcggcctcccaaagtgctgggattacaagcatgagccaccgcgcccagcccctcttgggtcattctctaaattcgcctcactgcatctcttagcagcatgagtcactgtctccacctccctgcgctggagcactcaggcactcagggctctgctgggccttctcctcctccatcagcactctttcttttttttcttttttttgagacggagtttcaaaaaatcagacccaccaaggcatgtggcagttgtgttgctctttgctcggtacccgctagaggtctgttgccattaatttgaaatgagaccagttagtgtgactgtgcatctttcctggcaagttaaatgactatagtttctctgtttgtaaaatggggatgattataatagcacctgcctcacagagttgtgagaattaaaataatcagtaatgaattaaagcacttaaggccgggtgcggtggctcacgcctataatcccagcactttggggggccgaggcaggtggatcgcctgaggtcaggaattcaagaccgacctggccaacatagtgaaaccctgtctttactaaaaatacaaaaattagccgggcttagtggcgggcgcctgtaatcccagctacttgggaggtttgaggcaggagaattgcttgaatccaggaggcgaaggttgcagtgagctgatcgcaccactgcactccagcctgggcaagagagcaagacttagtctcaaaaaaaaataataaaattaaaaaaaagtacttaaaacagcacctagcatatagtaagtgttcggtaaacactagtagtcactggtatcagttgtgtgcaagccaagaataggaggatggtatggttgaggtttaccaggagagaaagacaagggtatcctgagagtgtcttcaagagtgtgcatgccatggtggactagaatctacagtgggtaaggaactggactgtaaataagtttttgatgaagctgaataaattgtcatggtagaaatagcagagcagggtcaggcctggtggctcacgcctgtaatcccgacactttgggaggccgaggcgggtggatcacctaaggtcaggagttcgagaccagcctggccaatatggtgaaaccccgtctctactaaaaaagatacaaagttagccaggcatggtcgtgattatgatattaatgattataatattaaaacattttaaaaaatatatcttgcaatacagatagtcaatttgttttctttttttctttctttttttttttttttttttgagacagagtctcgctctgtggcccaggctggagagcagtggtgtgatcttgcctcactgcaacctctgtttcccggttcaagcgattctcctgcctcagcttcctgagtagctgggattacaggcacgcaccaccgcacccggctaatttttgtatttttagtagagatggggtttcgccaagttggccaggctggtctcaaactcccgacctcaagtgatccacccatttccgcctcctaaagtgctgggattacaggcgtgagccactgctcctggccagtcagtttgttttcaaaagatttttgtggctggtgtggtggctcatgcctataatcccagcactttgggagaccaaggtgggaggaatgcttgagcccaggagtttgagaccagccttggtaacacagccagatcctgtctctatcaaaaaagttgggcctatggtcccagctacttgggaggctgaggtgggaggatcgcttgagcctgcgaggttgaggctgccatgacctttgattgcaccattgtactctagcctgggcgacagagtgagactctgtctcaaaacaaacaaccaaaacctttttgtgcttttttttttttttttcctgctagtgtaccagttctatcgcaacctctctcattaggtattttcatttttagtgtctacaagcttagcatttgaaatagataactttttttttttgagatggagtcttgctgtgtcccccaggctggagtgcagtggcgcgatctcagctcactgcaagctccgcctcccgggttcacgccattctcctgcctcagcctctcgagtagctgggactacacgcacccactgccaccacgccaggctaattttttgtatttttagtacagtcggggtttcaccatgttagccaggatggtctcgatctcctgacctcgtgatccgcccgccttggcctctcaaagtgctgggattacaggcgtgagccactgcacccggccttaaatagataaaatttgtataggtcagaaaattggggaagggtgtatttgggtatttccatatacttgtgtgtactgagtcttcttcccaatatagtttctcgggttttctcctttcttttccaccttttcacagaactttctgcaagtctcatttccagctccccagcgtctttcctgagtacttgccctgccccgtgggtcttgcaggaagcctttactcctcgtcttgccctctccaggagacactttgcatcctctgtaccctttatctctcagggtggggacggggaatgtcctcattcccaaatgctgtagccacacaattgctctttcgtctttgtgaaacttttcccttgaggcttatgctgattctctctcccgctgacgacgttggcactgtacagccttccggtgctctcctgttcgcccgccattttggtgacctcaggtatccaagccaaaagccagggtctctctcatcctttaatctttaatctccctgttcctaacccctcacatccaattacttcccaaatcccatcaagtctgcctaatcttcctaatccacccacatctgtccctcccactgcctctactttaattcaaggtcctattattttgggccttatgttgctgaaacagtctcctgcctccttttgctcattaaaaccgtatttgttgactctgcttattctgcaccacgtgttggggaagcagtggtgagagcgaggcagatgtgattccctccttctctgataggtatgacggaaggggagtgaggagcaccaggggctataggaaagaggaacaggggcgccttgcttagctggaggggttagggaagcgttcccagaggaagaagcatctaagagacctgaaggatgactaggattcagccaggaggagtcgttgggggagatgaaggaagaatattccagacttggagcctaggacatgtgaaagccagtgggttgaaagtgtggcgagttggcactttatgggacctgagagtcaaaatggcgggactcagagattttttttttttttttttttttttttgaaatggagtcttgctctgtcgcccaggctggagtgcagtggcgcgatctgggttcactgcaagctccgcctcccaggttcacgccattctcctgcctcagcctcccgagtagctgggactacaggcgcccgccaccacgcctggctaattttttgtgtttttagtagacacggggtttcaccacgttagccaggatggtctcgatctcctgaccttgtgatccgcccgccttggcctcccaaagtgctgggattactggcgtgagccactgcgcccggtcaggactcagagatttttatgggaattagcagatagagataagccttgagaggtgggtcgggggtagcacgtggtaatggaagactaggaggaggaactggcaagatttggtattgggttggaccaggagtggaaaggaagtgaagagtggtagcagtcaaggctggtgctcagatttcaggattgagcactggtgtggagtccaggaggaacagcaggtttgatggtggtggatgccgggcctattatggacaaattgagtttgaggaacctgtgggatgatcaagtggcactgtccaccaggcagttggatatatgggttcagagtatagaggtggacactgaagtcctggctggttgacatcagcctgaggcccagaagacaactgacgaaggacagtgtccagactatttatctctcacaaatcagtaagaaaaagacggctgggcatggtggctcatgcctgtaatcccagcactttgggaagccgaggcaggtggatcacccgaggtcaggagttcaagaccagcctgaccaacatggcaaaatcccgtctctactaaaaatacaaaaattagccgggtgtggtggcaggcgcctgtaatcccagctactcaggaggctgaggcaggagaattgcttgaacctgggaggtggaggtagtagtgagccgagatcgtgccactgcactccagcctggggacagagggagactctgcctccaaaaaaaaaaaaagaaaagaaaaagaaaaaagagaagaaaagaaaaagacaacaactggtcaggcatggtggctcacacctgtaatccccactttgggaggccgaggtaggcagatcacttgaggctgggagtttgagaccagcctggccaacatggtgaaaccccatctctactaaaaagtataaaaattagccgggcgtggtggcaaatgcctgtggtcccggctccttgggaggctgaggcatgagagtcgcttgaacccaggaggcagaggttgtagtgagccaagatcgtgccactgcaccccagcttggggaacagagaaagactctgtctcaaaaagaaaaaaaaagaaaaagaaaatgggcaaaatttatgaaaaggtgtacctaactaaatggccagtaaacatagaggaaatatctaatctctcttatagtaatgatggaaatacaaatttatgctgtaatgaaataccatttcaccaccttcaaattgagaaaaatgtaaaagtctggcaataccaagaagataaagaacaatagacacttttttttttttttggagacaggatcttgttctgttgcccaggctggagtgcagtggtgcgaacatggcacactgtagcctcaaactcctggggtcaagcagtcctcctgcctcactctcccaaacaggtgggactacaagtatgccaatatgcctgactaattttttaattttttgtaaaactggggtcttgctatattgcccaggctagaatagagactcttatacactgctggtgggagaggacattgggacaagtgctttgggaaagaaattgacattatagtatcttacaaagtttgcaaagtgcatagcgtagagaccagtaattttactcttcagcagaaactgtagagaaacccttctacatgtgtacagaatgttaaagcacactagccaaaaaacagaaaaacatcagtgattctaaatagaagaagggtagatcagtttgaatatattcatgagtagagtactatacaccagtgaaaatgcatgaattagagcaaaatgtgtttccatggttaaagcttgctatcacagagggatgtatatgatataataccattactgttaagtctaggccgggcatggtggctcatgcttgtaatcccagtgcattgaaaggctgaggtggctggattgcttgaggccaggagttttagaccagcgtgagcaacacagacccctgtttctacaaaaaaataattttaaagattagccgggcaggctgggcgtggtgtctcatgcctgtaatcccagcacttgggagactgaggtgggtggatcacgaggtcaggagttcaagaccagcctggccaagatggtgaaaccccgtctctactaaaaatacaaaaaaattagccgggcgtgatagcaggcgcctgtaatcgtagctactcaggaggctgaggcagagaattgcttgagtctgggaggcagaggttgcagtgagccaagattgtgccactgcattccagcctgggcgacagagcgagactccgtcaaaaataaataaataaataaataaataaataaataagccaggtatggtggcttatgcttatattcccagttactagggaggctgaggccaggggattgtttgcttgagcccaggagtttgaggtttcagtgagatgattgcgccactgtgctccagcctaggcaacagagtaagaccctgtctctaagaaaagaaaaaattaagtctaaagacctgcaagacaacgttagatactgttttttttcccatatgaatatactcctaggctgggcgcagtggctcacacctgtaatcccagcactttgggaggctgaggcagaaagatcacttgaggccaagagttcgagaccagcctggccaacgtggcgaaaccctgtctatactaaaaatacaaaaaattagctgagcatggaggtgaactcctgcaatcccagctactcgggaggctgagacacaagaattgcttgaacctgggaggtggaggttgcagtgaactgagatcgtgccactgcactcagcctgggtgacagagtgagactctgcctttaaaattaaaaaaaaaaaatttatatatatatatatatttatatatatatatatatttatatatatatatatatatatatatttatatatatatatatatatttatatatatatatatattcctaaggaaatgtatgacagtgataaattcaagatagtgtttacctctgagggagagtttctgttaggaaaggggtttaaacatatctttttgttcagctggatggaggggtcacagggctgtttttttaataagatactttgtatgtttgaactgtttaattttttttctttatttttgtaaggaggtttttttgtttccatttttgtatttttgagacagtgtttctgttgcccaggctggagtgcagtggcaatgatctcagctcactgtggtctctatctcctgggctcaagcaattctcatgcctcagcctccctagtagctgggactacaggcatgcactaccatgcccagctaatttttttttcttgtagagacagtgtttcaccatattgcccaggctggtcttgaactcctgggctcaagtgatctgcctgcctcagcctccctaagtgctgggattacaggtgtgagccactgtgctcagccgataatttttttcttttctttttcttttttttttggggggcactgtctctctgtcacctagggtggagtgcagtggtgcgatctcagctcactgcaacctttgtctcctgggttcaagggattctcctgcctcagcctcctgagtatctgggattacaggtgtccaccaccacgcctggcaaatttttgtactaatatttttttaaaggatcaaatggcacctagcatgtactcagtaagtatttgaataattggttggttctttgtctctgggttgaggtattattatttgtttcttcctctctaagtgtttataaagaaaaagtataaggcccggcacggtggctcacacctgtaatcccagcacttttggaggctgaggcgggtggatcacctgaggtcagaagtttgagaccagcctggccaacatcatggtgaaaccctgtctctattaaaaaaaaaaacaaaaacaaaattagccaggcatggtggtgcatgctctgtctcaaaataataaaaaaaaaaaagtatgaatctatatggcttttggtggctaaatttgacattaaagtctgagctcacccttgaacattgagacagagtctgtgctccatatatacaccccatctgccacaacactgctagaggcacgcgcctcagactccttttccctccgagtgactcagccattcccccgtctctgtataggtccctgtccttcgaatggtggaaggtgataccatctatgattactgctggtattctctgatgtcctcagcccagccagacacctcctagtaagtaatgtttgcctccctgctcgccgccccaccacccagtttcaagcagggcctcttgggagagtcaagggctgccaggggtctttggaggaggaaggcttggcatgcttatcagaggggctggtcagttggcttcctccccttcctttttttttttttagattgagtctccctctgtcacccaggctggagggcggtgatgcagtctcagctcactgcaacctccgcctcccaggttgaagtgattctcctgcctcagcctcctgagtagctgggattacaggtgtgcaccaccacacccagctaattgtgtatttttcatagagatggggtttcaccacgttggccaggctggtctcgaactgacctcaggtgatccacctgccttggcctcctgaagtgcttggattacaggcatgagccaccacacccagcctcatttttgtatttttagtagagacagggtttcaccatgttggccaggctggtctcgaactcctgacctcaagtgatccacctgccttggcctcccaaagtgctgggattacaggcatgagccactgtgcccggccattcctccccttcctttgacagcaccggggtttcagtgtccatgtctctctcagcgtggccagcagcagccgggagaacccgattcatatctgggacgcattcactggagagctccgggcttcctttcgcgcctacaaccacctggtagggaccgccatactcagccccagcactcgtactggcccggctctccttccttgagggcagctgaggctttgcaagacctgttttcagccctttccttcccccaggatgagctgacggcagcccattcgctctgcttctccccggatggctcccagctcttctgtggcttcaaccggactgtgcgtgttttttccacggcccggcctggccgagactgcgaggtccgagccacatttggtaagcatctgtgcctccaagggaggaggagagggaagggcactgccacctgcacaggggccttttgtgagccgggggccacctgtgggggttcacgccgtcctctgtacggccccgggagcaggtgcagcccagtcggcagaggagcaaacaggctcagagcaggtaggaaaccttcccaaggccaaccagctggtcaaaggactgcttccttcctgaactcataccctgtcagctgtggagcttttggtctctgaaatctttctagaaaattgttgataaagctgattccgttttcctgtaggccttcaacttgcatctctccaaggaagaactgggatttgagagggatgaagtggggcttgggcatttaggtcctttgggaggatagatgtggggagcatcagaggtctttgtcctgcttgtgacagacagcatgggggggatgttgagtccaagcatgttggtgctgggacgggagacagacctctgcttagcctggttagtgccaggagccattgccccctcccccactttgttccttccctctctagcaaaaaagcagggccagagcggcatcatctcctgcatagccttcagcccagcccagcccctctatgcctgtggctcctacggccgctccctgggtctgtatgcctgggatgatggctcccctctcgccttgctgggagggcaccaagggggcatcacccacctctgctttcatcccgatggcaaccgcttcttctcaggagcccgcaaggtaggggtcacaccctgagagcccaaagcagctgggcagcggggcaggagcagggatgtagtctgcagtgtaggggaatgggtggggatggggaaaaaatcccaagctgaaggagtgcctggagaccccgagggaggcagggacatccagggctttgggggtgactccaggtcctgttccttgtctccaggatgctgagctcctgtgctgggatctccggcagtctggttacccactgtggtccctgggtcgagaggtgaccaccaatcagcgcatctacttcgatctggacccgtgagtggctgtgactccttcctacacagggccctgataagcctaggaatgccagagcccagctgtagggtcccagtccctgggtgtgaggggttcctgccccaggggtgaggcctctgccagcaaatctctcctctctctcgcaggaccgggcagttcctagtgagtggcagcacgagcggggctgtctctgtgtgggacacggacgggcctggcaatgatgggaagccggagcccgtgttgagttttctgccccagaaggactgcaccaatggcgtgaggtcctcagttcaattccagagatgttggggcttgggttggggagggaggtgaatcccagagggagcaagtgtcctcactgaaggcactgatagaccctccccatctctccctcagcctgcaccctagcctgcctctcctggccactgcctccggtcagcgtgtgtttcctgagcccacagagagtggggacgaaggagaggagctgggccttcccttgctctccacgcgccacgtccaccttgaatgtcggcttcagctctggtggtgtgggggggcgccagactccagcatccctgatgatcaccagggcgagaaagggcagggaggaacggagggaggtgtgggtgagctgatataaaaaggtttttatgata

SEQ ID NO: 14921 - DNA, 1905 bp, Homo sapiens
gggaacgggaaaccttctaacctttcacgtcccggctccgcgggttccgtgggtcgcccgcgaaatctgatccgggatgcggcggcccaatcggaaggtggaccgaaatcccgcgacagcaagaggcccgtagcgacccgcggtgctaaggaacacagtgctttcaaaagaattggcgtccgctgttcgcctctcctcccgggagtcttctgcctactcccagaagaggagggaagcacagtatgaagactttggagactcaaccgttagctccggactgctgtccttcagaccaggacccagctccagcccatccttctccccacgcttccccgatgaataaaaatgcggactctgaactgatgccaccgcctcccgaaaggggggatccgccccggttgtccccagatcctgtggctggctcagctgtgtcccaggagctacgggagggggacccagtttctctctccactcccctggaaacagagtttggttcccctagtgagttgagtcctcgaatcgaggagcaagaactttctgaaaatacaagccttcctgcagaagaagcaaacgggagcctttctgaagaagaagcgaacgggccagagttggggtctggaaaagccatggaagatacctctggggaacccgctgcagaggacgagggagacaccgcttggaactacagcttctcccagctgcctcgatttctcagtggttcctggtcagagttcagcacccaacctgagaacttcttgaaaggctgtaagtgggctcctgacggttcctgcatcttgaccaatagtgctgataacatcttgcgaatttataacctgcccccagagctgtaccatgagggggagcaggtggaatatgcagaaatggtccctgtccttcgaatggtggaaggtgataccatctatgattactgctggtattctctgatgtcctcagcccagccagacacctcctacgtggccagcagcagccgggagaacccgattcatatctgggacgcattcactggagagctccgggcttcctttcgcgcctacaaccacctggatgagctgacggcagcccattcgctctgcttctccccggatggctcccagctcttctgtggcttcaaccggactgtgcgtgttttttccacggcccggcctggccgagactgcgaggtccgagccacatttgcaaaaaagcagggccagagcggcatcatctcctgcatagccttcagcccagcccagcccctctatgcctgtggctcctacggccgctccctgggtctgtatgcctgggatgatggctcccctctcgccttgctgggagggcaccaagggggcatcacccacctctgctttcatcccgatggcaaccgcttcttctcaggagcccgcaaggatgctgagctcctgtgctgggatctccggcagtctggttacccactgtggtccctgggtcgagaggtgaccaccaatcagcgcatctacttcgatctggacccgaccgggcagttcctagtgagtggcagcacgagcggggctgtctctgtgtgggacacggacgggcctggcaatgatgggaagccggagcccgtgttgagttttctgccccagaaggactgcaccaatggcgtgagcctgcaccctagcctgcctctcctggccactgcctccggtcagcgtgtgtttcctgagcccacagagagtggggacgaaggagaggagctgggccttcccttgctctccacgcgccacgtccaccttgaatgtcggcttcagctctggtggtgtgggggggcgccagactccagcatccctgatgatcaccagggcgagaaagggcagggaggaacggagggaggtgtgggtgagctgatataaaaaggtttttatgata

SEQ ID NO: 14922 - DNA, 17432 bp, Homo sapiens; identical to SEQ ID NO: 1297

SEQ ID NO: 14923 - DNA, 1818 bp, Homo sapiens
tgaattcgagttccgcctcctaccaggaagaaccggctcgggccggagggctgcacggaggaccacacggacgcctgcgggcccgccccttccgcttcacgacgttcagcctgcgtctggaactggaatggcctagcccaaagctagataacagtatgaagactttggagactcaaccgttagctccggactgctgtccttcagaccaggacccagctccagcccatccttctccccacgcttccccgatgaataaaaatgcggactctgaactgatgccaccgcctcccgaaaggggggatccgccccggttgtccccagatcctgtggctggctcagctgtgtcccaggagctacgggagggggacccagtttctctctccactcccctggaaacagagtttggttcccctagtgagttgagtcctcgaatcgaggagcaagaactttctgaaaatacaagccttcctgcagaagaagcaaacgggagcctttctgaagaagaagcgaacgggccagagttggggtctggaaaagccatggaagatacctctggggaacccgctgcagaggacgagggagacaccgcttggaactacagcttctcccagctgcctcgatttctcagtggttcctggtcagagttcagcacccaacctgagaacttcttgaaaggctgtaagtgggctcctgacggttcctgcatcttgaccaatagtgctgataacatcttgcgaatttataacctgcccccagagctgtaccatgagggggagcaggtggaatatgcagaaatggtccctgtccttcgaatggtggaaggtgataccatctatgattactgctggtattctctgatgtcctcagcccagccagacacctcctacgtggccagcagcagccgggagaacccgattcatatctgggacgcattcactggagagctccgggcttcctttcgcgcctacaaccacctggatgagctgacggcagcccattcgctctgcttctccccggatggctcccagctcttctgtggcttcaaccggactgtgcgtgttttttccacggcccggcctggccgagactgcgaggtccgagccacatttgcaaaaaagcagggccagagcggcatcatctcctgcatagccttcagcccagcccagcccctctatgcctgtggctcctacggccgctccctgggtctgtatgcctgggatgatggctcccctctcgccttgctgggagggcaccaagggggcatcacccacctctgctttcatcccgatggcaaccgcttcttctcaggagcccgcaaggatgctgagctcctgtgctgggatctccggcagtctggttacccactgtggtccctgggtcgagaggtgaccaccaatcagcgcatctacttcgatctggacccgaccgggcagttcctagtgagtggcagcacgagcggggctgtctctgtgtgggacacggacgggcctggcaatgatgggaagccggagcccgtgttgagttttctgccccagaaggactgcaccaatggcgtgagcctgcaccctagcctgcctctcctggccactgcctccggtcagcgtgtgtttcctgagcccacagagagtggggacgaaggagaggagctgggccttcccttgctctccacgcgccacgtccaccttgaatgtcggcttcagctctggtggtgtgggggggcgccagactccagcatccctgatgatcaccagggcgagaaagggcagggaggaacggagggaggtgtgggtgagctgatataaaaaggtttttatgata

SEQ ID NO: 14924 - DNA, 16063 bp, Homo sapiens
ccggagcccagcagctacctgctccctggacggtggctctagacttttgagaagctcaaaacttttagcgccagtcttgagcacatgggaggggaaaaccccaatcccatcaacccctgcgaggctcctggcacaaagctggacagtcgccatgacaagtaagggcaagtaatccgcctgccggaggaagcaaaggaaatggagttggggaggagggtgcagagtcaggattctcgccgacctggtgccgtagatactaacattttggggtggaaaattctgcaagccagagctgtgagggcagaattggtggaaatcattttggaggaatcctgcattgtgtcaaatatgaagggtggaaggaagaaagcttttgcgtttgctctcagctggatcctttcttctcatcagttaaaatgtcattttttaggaaggctttccgtaatatcacaccctaacgttttctcccagatactttatatcacaccatcttatttaatctccttcacaacccttatcactctgataagatttatttgttcattgctttcagtacatggaaacgtaagccttatgaggatatagaatttttctactatcttattcattgttgtattcctgagtgcctatatcagtgctgggtagcaagtaagagctcgataataaatattttttgaatgagggagacaggtctgaagcctggagaatgagatgcagaagaggtgcaagacctgctgcgccctctgcaggcggcgggggggcggtgcaggtgctttaagaattaccgcgggactcggtagggggagcgtaggcgcttctcgccaagatagaagcgttcagactacaactcccagcagccacgaggagccctagggcttgatgggaacgggaaaccttctaacctttcacgtcccggctccgcgggttccgtgggtcgcccgcgaaatctgatccgggatgcggcggcccaatcggaaggtggaccgaaatcccgcgacagcaagaggcccgtagcgacccgcggtgctaaggaacacagtgctttcaaaagaattggcgtccgctgttcgcctctcctcccgggagtcttctgcctactcccagaagaggagggaagcacaggtgggtttctttagctctgcgtcggatccctgagaacttcgaagccatcctggctgaggctaatctccgctgtgcttcctctgcagtatgaagactttggagactcaaccgttagctccggactgctgtccttcagaccaggacccagctccagcccatccttctccccacgcttccccgatgaataaaaatgcggactctgaactgatgccaccgcctcccgaaaggggggatccgccccggttgtccccagatcctgtggctggctcagctgtgtcccaggagctacgggagggggacccagtttctctctccactcccctggaaacagagtttggttcccctagtgagttgagtcctcgaatcgaggagcaagaactttctgaaaatacaagccttcctgcagaagaagcaaacgggagcctttctgaagaagaagcgaacgggccagagttggggtctggaaaagccatggaagatacctctggggaacccgctgcagaggacgagggagacacgtaagtggtgatggcagtggagtgtggagtctggggagatgaagtgtgaggtcgatctgtcctctggtcctgagacccacttctccaggcctctgccccctttgcttggcgacccaggtttattgtcccccatcttcctttcagcgcttggaactacagcttctcccagctgcctcgatttctcagtggttcctggtcagagttcagcacccaacctgagaacttcttgaaaggctgtaagtggtaaggataacaacggggcagggagctgaccacccccgagattttcactgtaaaacagtccagttttctaggagagggatgccccagagctgggagaagcggcacgtagcccttttagactgagcttacattttatctagcagtttgtgtcttctacttccctcaaggattcaggggggcttacctaccccagaggcaggctcagccctagccctacacttgaaaagcataggtctggccagctttctaactctcccctgtttctagggctcctgacggttcctgcatcttgaccaatagtgctgataacatcttgcgaatttataacctgcccccagagctgtaccatgagggggagcaggtggaatatgcagaaatggtaaggactggggctaactgcctcttcatcaatgctgcacatttaagtccttcgtggagatggaaaaagtgtagtccaagtgtttcctgttcacaaacgggactgtttttcaagacgagtttccacatgtagcgttttctgccccgaattctgaagttatttagagagaggtttcccctttctttaattaggaatctgtgttttttgctaaaaagtagtgaatttcttgtggcagcatatatatatttctatttcttatttttttgagacaaggtcttgctctgtcacccaggctggagtgctgtggtgtgatctcggctcactgcaacctctgcctcccgggttcaagcgattctcctgcctcagcctcacaagtagctggtattacaggcgcacgccatcacactcgactaatttttatagttttagtagagacggggtttcgccatgttgggcaggctgatatcaaattcctgacctcagaggatccgcccaccttggcctcccaaagtgcggggatcacaggtgtgagtcaccgtgcctggcttatagctatttattgattgactactgatatatgttagtcactgtgctgggataaagtggtggacaagacagatgaagggctggtttgctttctgtgtgggagacagacaacaaacatgtaaaccagcaagcatcaggaccaagatgatgataaatgctctgaaggaaatacacagaatgaagagagactaactagaggaaagcacattgcataaaatggtcaggaaggagctctctgaaaaggaggcatttgagctaagacctgaaggaggataagggatcagtcatgtgaaggcttctggaaagagctttccaggaactggcaatgatactataaacacccagaactgggaaatagctttgtgcgttaaaagaccagaaaggccctgcatggtggctcacgcctgtaatcccagctactcaggaggccgaggtgtgcagatcacttgaggccaggagttcgagaccagcctggccaatatggcaaaaccccatcgctactaaaaataccaaaattagacgcatgtggtggcacgcgcctgtaatcccagctacttgtgtggctgaggcaggagaatctcttaaactcaggaggtggaggctgcagtcagacaaaattgtaccactgcactccagcctgggcgacagagtgagactccatctcaaaaaacaacaaaacagactgggctcagtggctcacacctgtaatcccagcactttgggaggctgaggtgggcagatcacctgaggtcaagagtttgagaccagcctggccaacatggcaaaacctcatctctacaaaaatacaaaaattagctgggtgtgatggtgggtgcctgtaatcccagctacttgagaggctgaagcagaagaatcatttgaacccaggagatggaggttgcagtgagccaagatcatgtcactgcactccagcctgggtgacagagtgagactccatcccaaaacaaacaaacaaacaaacaaacaaacaaacaaacacaaaacaaaaaacccagaatgctggtatagccagactgaggcaagtgagggggacagaggggtgaggacagagaagagcagccacgtcgtgttggttcttatgggtaaggcatttggagtttatttgggaagtcatgagagaggtgttttttttttttttttgagacgagtcttgctctgtcgcccaggctggagtgcaatggcgtgatctcggctcactgcaacctctgcctcctggattcaagcgattctcctgcctcagcctcccgagtagctgggattacaggcacccgccaccatgcccagctaatttttgtatttttttaaatagagacggggttttaccatattggccaggatggtctcgtactcctgacatttgatccgccggtctcggcctcccaaagtgctgggattataggcatgagccaccgcgcctggcttaatttttgtatttttagtagagacaggttttgccacgttggcctggctggtctcaaactcctgacctcaggtgatccacctgcctcagccttccaaagtgctaggattacaggcgtgagccaccatgccaggccatgagagaggttttttttgtttgtttgtttgagacagagtcttgctctgttgtccaggctggagtgcagtggcaccatctcagctcaccgcaacctccgcctcccaggtttaagtgattctcctgcctcaaccttccgagtagctgggattacaggcatgtgccaccacacccggctaatttttttgtatttttttagtagagatggggggttcatcatattggccaggctggtctcgaactcctgaccttgtgatctgcccaccttggcctcccaaagtgctgggattacaggcatgagccactgcgcccggccaagagagttttaaaacagaagagtgaatggtttatgggtgggcaagagtgaaatccagggccaggcacggtggctcacgcctgtaatcccaacactttgggaggctgagatgggtggatcacctgaggtgaagagttttagaccagcctggccaacatggtaaaaccctgtctctactcaaatacaaaaattagttggggctgggtgcggtggctgactcctgtaatcccagcactttgggaggctgaggcaggtggatcacctgaggtcaggagttcgagaccagcctggccaacatgatgaaaccccatctctattaaaaatacaaaaaattagctgggcgtggtggcgggcgcctgtaatcccagctactctggagtctgaggcaggagaattacttgaaccaaggagatggaggttgcagtgagccaggattgcaccactgcactccagtccaggcaacagtgtaagactccgtctcaaaaaaaaaaaaaaaaaaaaaagattggctatagttttctcccacccatcctaatcaggttctgcctccatcgcttcctgaaagtgctcttgtcaaggtcactaatgtcctcttgggtcattctccttttttttttttttttttttttttgagacagagtctcgctctgtcacccagctggagtgcagtggcgccatctcagctcactgcaagctctgcctcccgggatcacgccattctcctgcctcagcctctcccgagtagctgggactacaggcgcccgccaccacgcctggctaattttttgtatttttagtagagacggggtttcaccatggtctcgatctcctgacctcgtgatcctcctgcctcggcctcccaaagtgctgggattacaagcatgagccaccgcgcccagcccctcttgggtcattctctaaattcgcctcactgcatctcttagcagcatgagtcactgtctccacctccctgcgctggagcactcaggcactcagggctctgctgggccttctcctcctccatcagcactctttcttttttttcttttttttgagacggagtttcaaaaaatcagacccaccaaggcatgtggcagttgtgttgctctttgctcggtacccgctagaggtctgttgccattaatttgaaatgagaccagttagtgtgactgtgcatctttcctggcaagttaaatgactatagtttctctgtttgtaaaatggggatgattataatagcacctgcctcacagagttgtgagaattaaaataatcagtaatgaattaaagcacttaaggccgggtgcggtggctcacgcctataatcccagcactttggggggccgaggcaggtggatcgcctgaggtcaggaattcaagaccgacctggccaacatagtgaaaccctgtctttactaaaaatacaaaaattagccgggcttagtggcgggcgcctgtaatcccagctacttgggaggtttgaggcaggagaattgcttgaatccaggaggcgaaggttgcagtgagctgatcgcaccactgcactccagcctgggcaagagagcaagacttagtctcaaaaaaaaataataaaattaaaaaaaagtacttaaaacagcacctagcatatagtaagtgttcggtaaacactagtagtcactggtatcagttgtgtgcaagccaagaataggaggatggtatggttgaggtttaccaggagagaaagacaagggtatcctgagagtgtcttcaagagtgtgcatgccatggtggactagaatctacagtgggtaaggaactggactgtaaataagtttttgatgaagctgaataaattgtcatggtagaaatagcagagcagggtcaggcctggtggctcacgcctgtaatcccgacactttgggaggccgaggcgggtggatcacctaaggtcaggagttcgagaccagcctggccaatatggtgaaaccccgtctctactaaaaaagatacaaagttagccaggcatggtcgtgattatgatattaatgattataatattaaaacattttaaaaaatatatcttgcaatacagatagtcaatttgttttctttttttctttctttttttttttttttttttgagacagagtctcgctctgtggcccaggctggagagcagtggtgtgatcttgcctcactgcaacctctgtttcccggttcaagcgattctcctgcctcagcttcctgagtagctgggattacaggcacgcaccaccgcacccggctaatttttgtatttttagtagagatggggtttcgccaagttggccaggctggtctcaaactcccgacctcaagtgatccacccatttccgcctcctaaagtgctgggattacaggcgtgagccactgctcctggccagtcagtttgttttcaaaagatttttgtggctggtgtggtggctcatgcctataatcccagcactttgggagaccaaggtgggaggaatgcttgagcccaggagtttgagaccagccttggtaacacagccagatcctgtctctatcaaaaaagttgggcctatggtcccagctacttgggaggctgaggtgggaggatcgcttgagcctgcgaggttgaggctgccatgacctttgattgcaccattgtactctagcctgggcgacagagtgagactctgtctcaaaacaaacaaccaaaacctttttgtgcttttttttttttttttcctgctagtgtaccagttctatcgcaacctctctcattaggtattttcatttttagtgtctacaagcttagcatttgaaatagataactttttttttttgagatggagtcttgctgtgtcccccaggctggagtgcagtggcgcgatctcagctcactgcaagctccgcctcccgggttcacgccattctcctgcctcagcctctcgagtagctgggactacacgcacccactgccaccacgccaggctaattttttgtatttttagtacagtcggggtttcaccatgttagccaggatggtctcgatctcctgacctcgtgatccgcccgccttggcctctcaaagtgctgggattacaggcgtgagccactgcacccggccttaaatagataaaatttgtataggtcagaaaattggggaagggtgtatttgggtatttccatatacttgtgtgtactgagtcttcttcccaatatagtttctcgggttttctcctttcttttccaccttttcacagaactttctgcaagtctcatttccagctccccagcgtctttcctgagtacttgccctgccccgtgggtcttgcaggaagcctttactcctcgtcttgccctctccaggagacactttgcatcctctgtaccctttatctctcagggtggggacggggaatgtcctcattcccaaatgctgtagccacacaattgctctttcgtctttgtgaaacttttcccttgaggcttatgctgattctctctcccgctgacgacgttggcactgtacagccttccggtgctctcctgttcgcccgccattttggtgacctcaggtatccaagccaaaagccagggtctctctcatcctttaatctttaatctccctgttcctaacccctcacatccaattacttcccaaatcccatcaagtctgcctaatcttcctaatccacccacatctgtccctcccactgcctctactttaattcaaggtcctattattttgggccttatgttgctgaaacagtctcctgcctccttttgctcattaaaaccgtatttgttgactctgcttattctgcaccacgtgttggggaagcagtggtgagagcgaggcagatgtgattccctccttctctgataggtatgacggaaggggagtgaggagcaccaggggctataggaaagaggaacaggggcgccttgcttagctggaggggttagggaagcgttcccagaggaagaagcatctaagagacctgaaggatgactaggattcagccaggaggagtcgttgggggagatgaaggaagaatattccagacttggagcctaggacatgtgaaagccagtgggttgaaagtgtggcgagttggcactttatgggacctgagagtcaaaatggcgggactcagagattttttttttttttttttttttttttgaaatggagtcttgctctgtcgcccaggctggagtgcagtggcgcgatctgggttcactgcaagctccgcctcccaggttcacgccattctcctgcctcagcctcccgagtagctgggactacaggcgcccgccaccacgcctggctaattttttgtgtttttagtagacacggggtttcaccacgttagccaggatggtctcgatctcctgaccttgtgatccgcccgccttggcctcccaaagtgctgggattactggcgtgagccactgcgcccggtcaggactcagagatttttatgggaattagcagatagagataagccttgagaggtgggtcgggggtagcacgtggtaatggaagactaggaggaggaactggcaagatttggtattgggttggaccaggagtggaaaggaagtgaagagtggtagcagtcaaggctggtgctcagatttcaggattgagcactggtgtggagtccaggaggaacagcaggtttgatggtggtggatgccgggcctattatggacaaattgagtttgaggaacctgtgggatgatcaagtggcactgtccaccaggcagttggatatatgggttcagagtatagaggtggacactgaagtcctggctggttgacatcagcctgaggcccagaagacaactgacgaaggacagtgtccagactatttatctctcacaaatcagtaagaaaaagacggctgggcatggtggctcatgcctgtaatcccagcactttgggaagccgaggcaggtggatcacccgaggtcaggagttcaagaccagcctgaccaacatggcaaaatcccgtctctactaaaaatacaaaaattagccgggtgtggtggcaggcgcctgtaatcccagctactcaggaggctgaggcaggagaattgcttgaacctgggaggtggaggtagtagtgagccgagatcgtgccactgcactccagcctggggacagagggagactctgcctccaaaaaaaaaaaaagaaaagaaaaagaaaaaagagaagaaaagaaaaagacaacaactggtcaggcatggtggctcacacctgtaatccccactttgggaggccgaggtaggcagatcacttgaggctgggagtttgagaccagcctggccaacatggtgaaaccccatctctactaaaaagtataaaaattagccgggcgtggtggcaaatgcctgtggtcccggctccttgggaggctgaggcatgagagtcgcttgaacccaggaggcagaggttgtagtgagccaagatcgtgccactgcaccccagcttggggaacagagaaagactctgtctcaaaaagaaaaaaaaagaaaaagaaaatgggcaaaatttatgaaaaggtgtacctaactaaatggccagtaaacatagaggaaatatctaatctctcttatagtaatgatggaaatacaaatttatgctgtaatgaaataccatttcaccaccttcaaattgagaaaaatgtaaaagtctggcaataccaagaagataaagaacaatagacacttttttttttttttggagacaggatcttgttctgttgcccaggctggagtgcagtggtgcgaacatggcacactgtagcctcaaactcctggggtcaagcagtcctcctgcctcactctcccaaacaggtgggactacaagtatgccaatatgcctgactaattttttaattttttgtaaaactggggtcttgctatattgcccaggctagaatagagactcttatacactgctggtgggagaggacattgggacaagtgctttgggaaagaaattgacattatagtatcttacaaagtttgcaaagtgcatagcgtagagaccagtaattttactcttcagcagaaactgtagagaaacccttctacatgtgtacagaatgttaaagcacactagccaaaaaacagaaaaacatcagtgattctaaatagaagaagggtagatcagtttgaatatattcatgagtagagtactatacaccagtgaaaatgcatgaattagagcaaaatgtgtttccatggttaaagcttgctatcacagagggatgtatatgatataataccattactgttaagtctaggccgggcatggtggctcatgcttgtaatcccagtgcattgaaaggctgaggtggctggattgcttgaggccaggagttttagaccagcgtgagcaacacagacccctgtttctacaaaaaaataattttaaagattagccgggcaggctgggcgtggtgtctcatgcctgtaatcccagcacttgggagactgaggtgggtggatcacgaggtcaggagttcaagaccagcctggccaagatggtgaaaccccgtctctactaaaaatacaaaaaaattagccgggcgtgatagcaggcgcctgtaatcgtagctactcaggaggctgaggcagagaattgcttgagtctgggaggcagaggttgcagtgagccaagattgtgccactgcattccagcctgggcgacagagcgagactccgtcaaaaataaataaataaataaataaataaataaataagccaggtatggtggcttatgcttatattcccagttactagggaggctgaggccaggggattgtttgcttgagcccaggagtttgaggtttcagtgagatgattgcgccactgtgctccagcctaggcaacagagtaagaccctgtctctaagaaaagaaaaaattaagtctaaagacctgcaagacaacgttagatactgttttttttcccatatgaatatactcctaggctgggcgcagtggctcacacctgtaatcccagcactttgggaggctgaggcagaaagatcacttgaggccaagagttcgagaccagcctggccaacgtggcgaaaccctgtctatactaaaaatacaaaaaattagctgagcatggaggtgaactcctgcaatcccagctactcgggaggctgagacacaagaattgcttgaacctgggaggtggaggttgcagtgaactgagatcgtgccactgcactcagcctgggtgacagagtgagactctgcctttaaaattaaaaaaaaaaaatttatatatatatatatatttatatatatatatatatttatatatatatatatatatatatatttatatatatatatatatatttatatatatatatatattcctaaggaaatgtatgacagtgataaattcaagatagtgtttacctctgagggagagtttctgttaggaaaggggtttaaacatatctttttgttcagctggatggaggggtcacagggctgtttttttaataagatactttgtatgtttgaactgtttaattttttttctttatttttgtaaggaggtttttttgtttccatttttgtatttttgagacagtgtttctgttgcccaggctggagtgcagtggcaatgatctcagctcactgtggtctctatctcctgggctcaagcaattctcatgcctcagcctccctagtagctgggactacaggcatgcactaccatgcccagctaatttttttttcttgtagagacagtgtttcaccatattgcccaggctggtcttgaactcctgggctcaagtgatctgcctgcctcagcctccctaagtgctgggattacaggtgtgagccactgtgctcagccgataatttttttcttttctttttcttttttttttggggggcactgtctctctgtcacctagggtggagtgcagtggtgcgatctcagctcactgcaacctttgtctcctgggttcaagggattctcctgcctcagcctcctgagtatctgggattacaggtgtccaccaccacgcctggcaaatttttgtactaatatttttttaaaggatcaaatggcacctagcatgtactcagtaagtatttgaataattggttggttctttgtctctgggttgaggtattattatttgtttcttcctctctaagtgtttataaagaaaaagtataaggcccggcacggtggctcacacctgtaatcccagcacttttggaggctgaggcgggtggatcacctgaggtcagaagtttgagaccagcctggccaacatcatggtgaaaccctgtctctattaaaaaaaaaaacaaaaacaaaattagccaggcatggtggtgcatgctctgtctcaaaataataaaaaaaaaaaagtatgaatctatatggcttttggtggctaaatttgacattaaagtctgagctcacccttgaacattgagacagagtctgtgctccatatatacaccccatctgccacaacactgctagaggcacgcgcctcagactccttttccctccgagtgactcagccattcccccgtctctgtataggtccctgtccttcgaatggtggaaggtgataccatctatgattactgctggtattctctgatgtcctcagcccagccagacacctcctagtaagtaatgtttgcctccctgctcgccgccccaccacccagtttcaagcagggcctcttgggagagtcaagggctgccaggggtctttggaggaggaaggcttggcatgcttatcagaggggctggtcagttggcttcctccccttcctttttttttttttagattgagtctccctctgtcacccaggctggagggcggtgatgcagtctcagctcactgcaacctccgcctcccaggttgaagtgattctcctgcctcagcctcctgagtagctgggattacaggtgtgcaccaccacacccagctaattgtgtatttttcatagagatggggtttcaccacgttggccaggctggtctcgaactgacctcaggtgatccacctgccttggcctcctgaagtgcttggattacaggcatgagccaccacacccagcctcatttttgtatttttagtagagacagggtttcaccatgttggccaggctggtctcgaactcctgacctcaagtgatccacctgccttggcctcccaaagtgctgggattacaggcatgagccactgtgcccggccattcctccccttcctttgacagcaccggggtttcagtgtccatgtctctctcagcgtggccagcagcagccgggagaacccgattcatatctgggacgcattcactggagagctccgggcttcctttcgcgcctacaaccacctggtagggaccgccatactcagccccagcactcgtactggcccggctctccttccttgagggcagctgaggctttgcaagacctgttttcagccctttccttcccccaggatgagctgacggcagcccattcgctctgcttctccccggatggctcccagctcttctgtggcttcaaccggactgtgcgtgttttttccacggcccggcctggccgagactgcgaggtccgagccacatttggtaagcatctgtgcctccaagggaggaggagagggaagggcactgccacctgcacaggggccttttgtgagccgggggccacctgtgggggttcacgccgtcctctgtacggccccgggagcaggtgcagcccagtcggcagaggagcaaacaggctcagagcaggtaggaaaccttcccaaggccaaccagctggtcaaaggactgcttccttcctgaactcataccctgtcagctgtggagcttttggtctctgaaatctttctagaaaattgttgataaagctgattccgttttcctgtaggccttcaacttgcatctctccaaggaagaactgggatttgagagggatgaagtggggcttgggcatttaggtcctttgggaggatagatgtggggagcatcagaggtctttgtcctgcttgtgacagacagcatgggggggatgttgagtccaagcatgttggtgctgggacgggagacagacctctgcttagcctggttagtgccaggagccattgccccctcccccactttgttccttccctctctagcaaaaaagcagggccagagcggcatcatctcctgcatagccttcagcccagcccagcccctctatgcctgtggctcctacggccgctccctgggtctgtatgcctgggatgatggctcccctctcgccttgctgggagggcaccaagggggcatcacccacctctgctttcatcccgatggcaaccgcttcttctcaggagcccgcaaggtaggggtcacaccctgagagcccaaagcagctgggcagcggggcaggagcagggatgtagtctgcagtgtaggggaatgggtggggatggggaaaaaatcccaagctgaaggagtgcctggagaccccgagggaggcagggacatccagggctttgggggtgactccaggtcctgttccttgtctccaggatgctgagctcctgtgctgggatctccggcagtctggttacccactgtggtccctgggtcgagaggtgaccaccaatcagcgcatctacttcgatctggacccgtgagtggctgtgactccttcctacacagggccctgataagcctaggaatgccagagcccagctgtagggtcccagtccctgggtgtgaggggttcctgccccaggggtgaggcctctgccagcaaatctctcctctctctcgcaggaccgggcagttcctagtgagtggcagcacgagcggggctgtctctgtgtgggacacggacgggcctggcaatgatgggaagccggagcccgtgttgagttttctgccccagaaggactgcaccaatggcgtgaggtcctcagttcaattccagagatgttggggcttgggttggggagggaggtgaatcccagagggagcaagtgtcctcactgaaggcactgatagaccctccccatctctccctcagcctgcaccctagcctgcctctcctggccactgcctccggtcagcgtgtgtttcctgagcccacagagagtggggacgaaggagaggagctgggccttcccttgctctccacgcgccacgtccaccttgaatgtcggcttcagctctggtggtgtgggggggcgccagactccagcatccctgatgatcaccagggcgagaaagggcagggaggaacggagggaggtgtgggtgagctgatataaaaaggtttttatgata

SEQ ID NO: 14925 - DNA, 1828 bp, Homo sapiens
ccggagcccagcagctacctgctccctggacggtggctctagacttttgagaagctcaaaacttttagcgccagtcttgagcacatgggaggggaaaaccccaatcccatcaacccctgcgaggctcctggcacaaagctggacagtcgccatgacaagtaaggtatgaagactttggagactcaaccgttagctccggactgctgtccttcagaccaggacccagctccagcccatccttctccccacgcttccccgatgaataaaaatgcggactctgaactgatgccaccgcctcccgaaaggggggatccgccccggttgtccccagatcctgtggctggctcagctgtgtcccaggagctacgggagggggacccagtttctctctccactcccctggaaacagagtttggttcccctagtgagttgagtcctcgaatcgaggagcaagaactttctgaaaatacaagccttcctgcagaagaagcaaacgggagcctttctgaagaagaagcgaacgggccagagttggggtctggaaaagccatggaagatacctctggggaacccgctgcagaggacgagggagacaccgcttggaactacagcttctcccagctgcctcgatttctcagtggttcctggtcagagttcagcacccaacctgagaacttcttgaaaggctgtaagtgggctcctgacggttcctgcatcttgaccaatagtgctgataacatcttgcgaatttataacctgcccccagagctgtaccatgagggggagcaggtggaatatgcagaaatggtccctgtccttcgaatggtggaaggtgataccatctatgattactgctggtattctctgatgtcctcagcccagccagacacctcctacgtggccagcagcagccgggagaacccgattcatatctgggacgcattcactggagagctccgggcttcctttcgcgcctacaaccacctggatgagctgacggcagcccattcgctctgcttctccccggatggctcccagctcttctgtggcttcaaccggactgtgcgtgttttttccacggcccggcctggccgagactgcgaggtccgagccacatttgcaaaaaagcagggccagagcggcatcatctcctgcatagccttcagcccagcccagcccctctatgcctgtggctcctacggccgctccctgggtctgtatgcctgggatgatggctcccctctcgccttgctgggagggcaccaagggggcatcacccacctctgctttcatcccgatggcaaccgcttcttctcaggagcccgcaaggatgctgagctcctgtgctgggatctccggcagtctggttacccactgtggtccctgggtcgagaggtgaccaccaatcagcgcatctacttcgatctggacccgaccgggcagttcctagtgagtggcagcacgagcggggctgtctctgtgtgggacacggacgggcctggcaatgatgggaagccggagcccgtgttgagttttctgccccagaaggactgcaccaatggcgtgagcctgcaccctagcctgcctctcctggccactgcctccggtcagcgtgtgtttcctgagcccacagagagtggggacgaaggagaggagctgggccttcccttgctctccacgcgccacgtccaccttgaatgtcggcttcagctctggtggtgtgggggggcgccagactccagcatccctgatgatcaccagggcgagaaagggcagggaggaacggagggaggtgtgggtgagctgatataaaaaggtttttatgata

SEQ ID NO: 14926 - DNA, 1718 bp, Homo sapiens
gatgagctgacggcagcccattcgctctgcttctccccggatggctcccagctcttctgtggcttcaaccggactgtgcgtgttttttccacggcccggcctggccgagactgcgaggtccgagccacatttggtaagcatctgtgcctccaagggaggaggagagggaagggcactgccacctgcacaggggccttttgtgagccgggggccacctgtgggggttcacgccgtcctctgtacggccccgggagcaggtgcagcccagtcggcagaggagcaaacaggctcagagcaggtaggaaaccttcccaaggccaaccagctggtcaaaggactgcttccttcctgaactcataccctgtcagctgtggagcttttggtctctgaaatctttctagaaaattgttgataaagctgattccgttttcctgtaggccttcaacttgcatctctccaaggaagaactgggatttgagagggatgaagtggggcttgggcatttaggtcctttgggaggatagatgtggggagcatcagaggtctttgtcctgcttgtgacagacagcatgggggggatgttgagtccaagcatgttggtgctgggacgggagacagacctctgcttagcctggttagtgccaggagccattgccccctcccccactttgttccttccctctctagcaaaaaagcagggccagagcggcatcatctcctgcatagccttcagcccagcccagcccctctatgcctgtggctcctacggccgctccctgggtctgtatgcctgggatgatggctcccctctcgccttgctgggagggcaccaagggggcatcacccacctctgctttcatcccgatggcaaccgcttcttctcaggagcccgcaaggtaggggtcacaccctgagagcccaaagcagctgggcagcggggcaggagcagggatgtagtctgcagtgtaggggaatgggtggggatggggaaaaaatcccaagctgaaggagtgcctggagaccccgagggaggcagggacatccagggctttgggggtgactccaggtcctgttccttgtctccaggatgctgagctcctgtgctgggatctccggcagtctggttacccactgtggtccctgggtcgagaggtgaccaccaatcagcgcatctacttcgatctggacccgtgagtggctgtgactccttcctacacagggccctgataagcctaggaatgccagagcccagctgtagggtcccagtccctgggtgtgaggggttcctgccccaggggtgaggcctctgccagcaaatctctcctctctctcgcaggaccgggcagttcctagtgagtggcagcacgagcggggctgtctctgtgtgggacacggacgggcctggcaatgatgggaagccggagcccgtgttgagttttctgccccagaaggactgcaccaatggcgtgaggtcctcagttcaattccagagatgttggggcttgggttggggagggaggtgaatcccagagggagcaagtgtcctcactgaaggcactgatagaccctccccatctctccctcagcctgcaccctagcctgcctctcctggccactgcctccggtcagcgtgtgtttcctgagcccacagagagtggggacgaaggagaggagctgggccttcccttgctctccacgcgccacgtccaccttgaatg

SEQ ID NO: 14927 - DNA, 504 bp, Homo sapiens
gatgagctgacggcagcccattcgctctgcttctccccggatggctcccagctcttctgtggcttcaaccggactgtgcgtgttttttccacggcccggcctggccgagactgcgaggtccgagccacatttggatgctgagctcctgtgctgggatctccggcagtctggttacccactgtggtccctgggtcgagaggtgaccaccaatcagcgcatctacttcgatctggacccgaccgggcagttcctagtgagtggcagcacgagcggggctgtctctgtgtgggacacggacgggcctggcaatgatgggaagccggagcccgtgttgagttttctgccccagaaggactgcaccaatggcgtgagcctgcaccctagcctgcctctcctggccactgcctccggtcagcgtgtgtttcctgagcccacagagagtggggacgaaggagaggagctgggccttcccttgctctccacgcgccacgtccaccttgaatg

SEQ ID NO: 14928 - DNA, 15026 bp, Homo sapiens
agtgctttcaaaagaattggcgtccgctgttcgcctctcctcccgggagtcttctgcctactcccagaagaggagggaagcacaggtgggtttctttagctctgcgtcggatccctgagaacttcgaagccatcctggctgaggctaatctccgctgtgcttcctctgcagtatgaagactttggagactcaaccgttagctccggactgctgtccttcagaccaggacccagctccagcccatccttctccccacgcttccccgatgaataaaaatgcggactctgaactgatgccaccgcctcccgaaaggggggatccgccccggttgtccccagatcctgtggctggctcagctgtgtcccaggagctacgggagggggacccagtttctctctccactcccctggaaacagagtttggttcccctagtgagttgagtcctcgaatcgaggagcaagaactttctgaaaatacaagccttcctgcagaagaagcaaacgggagcctttctgaagaagaagcgaacgggccagagttggggtctggaaaagccatggaagatacctctggggaacccgctgcagaggacgagggagacacgtaagtggtgatggcagtggagtgtggagtctggggagatgaagtgtgaggtcgatctgtcctctggtcctgagacccacttctccaggcctctgccccctttgcttggcgacccaggtttattgtcccccatcttcctttcagcgcttggaactacagcttctcccagctgcctcgatttctcagtggttcctggtcagagttcagcacccaacctgagaacttcttgaaaggctgtaagtggtaaggataacaacggggcagggagctgaccacccccgagattttcactgtaaaacagtccagttttctaggagagggatgccccagagctgggagaagcggcacgtagcccttttagactgagcttacattttatctagcagtttgtgtcttctacttccctcaaggattcaggggggcttacctaccccagaggcaggctcagccctagccctacacttgaaaagcataggtctggccagctttctaactctcccctgtttctagggctcctgacggttcctgcatcttgaccaatagtgctgataacatcttgcgaatttataacctgcccccagagctgtaccatgagggggagcaggtggaatatgcagaaatggtaaggactggggctaactgcctcttcatcaatgctgcacatttaagtccttcgtggagatggaaaaagtgtagtccaagtgtttcctgttcacaaacgggactgtttttcaagacgagtttccacatgtagcgttttctgccccgaattctgaagttatttagagagaggtttcccctttctttaattaggaatctgtgttttttgctaaaaagtagtgaatttcttgtggcagcatatatatatttctatttcttatttttttgagacaaggtcttgctctgtcacccaggctggagtgctgtggtgtgatctcggctcactgcaacctctgcctcccgggttcaagcgattctcctgcctcagcctcacaagtagctggtattacaggcgcacgccatcacactcgactaatttttatagttttagtagagacggggtttcgccatgttgggcaggctgatatcaaattcctgacctcagaggatccgcccaccttggcctcccaaagtgcggggatcacaggtgtgagtcaccgtgcctggcttatagctatttattgattgactactgatatatgttagtcactgtgctgggataaagtggtggacaagacagatgaagggctggtttgctttctgtgtgggagacagacaacaaacatgtaaaccagcaagcatcaggaccaagatgatgataaatgctctgaaggaaatacacagaatgaagagagactaactagaggaaagcacattgcataaaatggtcaggaaggagctctctgaaaaggaggcatttgagctaagacctgaaggaggataagggatcagtcatgtgaaggcttctggaaagagctttccaggaactggcaatgatactataaacacccagaactgggaaatagctttgtgcgttaaaagaccagaaaggccctgcatggtggctcacgcctgtaatcccagctactcaggaggccgaggtgtgcagatcacttgaggccaggagttcgagaccagcctggccaatatggcaaaaccccatcgctactaaaaataccaaaattagacgcatgtggtggcacgcgcctgtaatcccagctacttgtgtggctgaggcaggagaatctcttaaactcaggaggtggaggctgcagtcagacaaaattgtaccactgcactccagcctgggcgacagagtgagactccatctcaaaaaacaacaaaacagactgggctcagtggctcacacctgtaatcccagcactttgggaggctgaggtgggcagatcacctgaggtcaagagtttgagaccagcctggccaacatggcaaaacctcatctctacaaaaatacaaaaattagctgggtgtgatggtgggtgcctgtaatcccagctacttgagaggctgaagcagaagaatcatttgaacccaggagatggaggttgcagtgagccaagatcatgtcactgcactccagcctgggtgacagagtgagactccatcccaaaacaaacaaacaaacaaacaaacaaacaaacaaacacaaaacaaaaaacccagaatgctggtatagccagactgaggcaagtgagggggacagaggggtgaggacagagaagagcagccacgtcgtgttggttcttatgggtaaggcatttggagtttatttgggaagtcatgagagaggtgttttttttttttttttgagacgagtcttgctctgtcgcccaggctggagtgcaatggcgtgatctcggctcactgcaacctctgcctcctggattcaagcgattctcctgcctcagcctcccgagtagctgggattacaggcacccgccaccatgcccagctaatttttgtatttttttaaatagagacggggttttaccatattggccaggatggtctcgtactcctgacatttgatccgccggtctcggcctcccaaagtgctgggattataggcatgagccaccgcgcctggcttaatttttgtatttttagtagagacaggttttgccacgttggcctggctggtctcaaactcctgacctcaggtgatccacctgcctcagccttccaaagtgctaggattacaggcgtgagccaccatgccaggccatgagagaggttttttttgtttgtttgtttgagacagagtcttgctctgttgtccaggctggagtgcagtggcaccatctcagctcaccgcaacctccgcctcccaggtttaagtgattctcctgcctcaaccttccgagtagctgggattacaggcatgtgccaccacacccggctaatttttttgtatttttttagtagagatggggggttcatcatattggccaggctggtctcgaactcctgaccttgtgatctgcccaccttggcctcccaaagtgctgggattacaggcatgagccactgcgcccggccaagagagttttaaaacagaagagtgaatggtttatgggtgggcaagagtgaaatccagggccaggcacggtggctcacgcctgtaatcccaacactttgggaggctgagatgggtggatcacctgaggtgaagagttttagaccagcctggccaacatggtaaaaccctgtctctactcaaatacaaaaattagttggggctgggtgcggtggctgactcctgtaatcccagcactttgggaggctgaggcaggtggatcacctgaggtcaggagttcgagaccagcctggccaacatgatgaaaccccatctctattaaaaatacaaaaaattagctgggcgtggtggcgggcgcctgtaatcccagctactctggagtctgaggcaggagaattacttgaaccaaggagatggaggttgcagtgagccaggattgcaccactgcactccagtccaggcaacagtgtaagactccgtctcaaaaaaaaaaaaaaaaaaaaaagattggctatagttttctcccacccatcctaatcaggttctgcctccatcgcttcctgaaagtgctcttgtcaaggtcactaatgtcctcttgggtcattctccttttttttttttttttttttttttgagacagagtctcgctctgtcacccagctggagtgcagtggcgccatctcagctcactgcaagctctgcctcccgggatcacgccattctcctgcctcagcctctcccgagtagctgggactacaggcgcccgccaccacgcctggctaattttttgtatttttagtagagacggggtttcaccatggtctcgatctcctgacctcgtgatcctcctgcctcggcctcccaaagtgctgggattacaagcatgagccaccgcgcccagcccctcttgggtcattctctaaattcgcctcactgcatctcttagcagcatgagtcactgtctccacctccctgcgctggagcactcaggcactcagggctctgctgggccttctcctcctccatcagcactctttcttttttttcttttttttgagacggagtttcaaaaaatcagacccaccaaggcatgtggcagttgtgttgctctttgctcggtacccgctagaggtctgttgccattaatttgaaatgagaccagttagtgtgactgtgcatctttcctggcaagttaaatgactatagtttctctgtttgtaaaatggggatgattataatagcacctgcctcacagagttgtgagaattaaaataatcagtaatgaattaaagcacttaaggccgggtgcggtggctcacgcctataatcccagcactttggggggccgaggcaggtggatcgcctgaggtcaggaattcaagaccgacctggccaacatagtgaaaccctgtctttactaaaaatacaaaaattagccgggcttagtggcgggcgcctgtaatcccagctacttgggaggtttgaggcaggagaattgcttgaatccaggaggcgaaggttgcagtgagctgatcgcaccactgcactccagcctgggcaagagagcaagacttagtctcaaaaaaaaataataaaattaaaaaaaagtacttaaaacagcacctagcatatagtaagtgttcggtaaacactagtagtcactggtatcagttgtgtgcaagccaagaataggaggatggtatggttgaggtttaccaggagagaaagacaagggtatcctgagagtgtcttcaagagtgtgcatgccatggtggactagaatctacagtgggtaaggaactggactgtaaataagtttttgatgaagctgaataaattgtcatggtagaaatagcagagcagggtcaggcctggtggctcacgcctgtaatcccgacactttgggaggccgaggcgggtggatcacctaaggtcaggagttcgagaccagcctggccaatatggtgaaaccccgtctctactaaaaaagatacaaagttagccaggcatggtcgtgattatgatattaatgattataatattaaaacattttaaaaaatatatcttgcaatacagatagtcaatttgttttctttttttctttctttttttttttttttttttgagacagagtctcgctctgtggcccaggctggagagcagtggtgtgatcttgcctcactgcaacctctgtttcccggttcaagcgattctcctgcctcagcttcctgagtagctgggattacaggcacgcaccaccgcacccggctaatttttgtatttttagtagagatggggtttcgccaagttggccaggctggtctcaaactcccgacctcaagtgatccacccatttccgcctcctaaagtgctgggattacaggcgtgagccactgctcctggccagtcagtttgttttcaaaagatttttgtggctggtgtggtggctcatgcctataatcccagcactttgggagaccaaggtgggaggaatgcttgagcccaggagtttgagaccagccttggtaacacagccagatcctgtctctatcaaaaaagttgggcctatggtcccagctacttgggaggctgaggtgggaggatcgcttgagcctgcgaggttgaggctgccatgacctttgattgcaccattgtactctagcctgggcgacagagtgagactctgtctcaaaacaaacaaccaaaacctttttgtgcttttttttttttttttcctgctagtgtaccagttctatcgcaacctctctcattaggtattttcatttttagtgtctacaagcttagcatttgaaatagataactttttttttttgagatggagtcttgctgtgtcccccaggctggagtgcagtggcgcgatctcagctcactgcaagctccgcctcccgggttcacgccattctcctgcctcagcctctcgagtagctgggactacacgcacccactgccaccacgccaggctaattttttgtatttttagtacagtcggggtttcaccatgttagccaggatggtctcgatctcctgacctcgtgatccgcccgccttggcctctcaaagtgctgggattacaggcgtgagccactgcacccggccttaaatagataaaatttgtataggtcagaaaattggggaagggtgtatttgggtatttccatatacttgtgtgtactgagtcttcttcccaatatagtttctcgggttttctcctttcttttccaccttttcacagaactttctgcaagtctcatttccagctccccagcgtctttcctgagtacttgccctgccccgtgggtcttgcaggaagcctttactcctcgtcttgccctctccaggagacactttgcatcctctgtaccctttatctctcagggtggggacggggaatgtcctcattcccaaatgctgtagccacacaattgctctttcgtctttgtgaaacttttcccttgaggcttatgctgattctctctcccgctgacgacgttggcactgtacagccttccggtgctctcctgttcgcccgccattttggtgacctcaggtatccaagccaaaagccagggtctctctcatcctttaatctttaatctccctgttcctaacccctcacatccaattacttcccaaatcccatcaagtctgcctaatcttcctaatccacccacatctgtccctcccactgcctctactttaattcaaggtcctattattttgggccttatgttgctgaaacagtctcctgcctccttttgctcattaaaaccgtatttgttgactctgcttattctgcaccacgtgttggggaagcagtggtgagagcgaggcagatgtgattccctccttctctgataggtatgacggaaggggagtgaggagcaccaggggctataggaaagaggaacaggggcgccttgcttagctggaggggttagggaagcgttcccagaggaagaagcatctaagagacctgaaggatgactaggattcagccaggaggagtcgttgggggagatgaaggaagaatattccagacttggagcctaggacatgtgaaagccagtgggttgaaagtgtggcgagttggcactttatgggacctgagagtcaaaatggcgggactcagagattttttttttttttttttttttttttgaaatggagtcttgctctgtcgcccaggctggagtgcagtggcgcgatctgggttcactgcaagctccgcctcccaggttcacgccattctcctgcctcagcctcccgagtagctgggactacaggcgcccgccaccacgcctggctaattttttgtgtttttagtagacacggggtttcaccacgttagccaggatggtctcgatctcctgaccttgtgatccgcccgccttggcctcccaaagtgctgggattactggcgtgagccactgcgcccggtcaggactcagagatttttatgggaattagcagatagagataagccttgagaggtgggtcgggggtagcacgtggtaatggaagactaggaggaggaactggcaagatttggtattgggttggaccaggagtggaaaggaagtgaagagtggtagcagtcaaggctggtgctcagatttcaggattgagcactggtgtggagtccaggaggaacagcaggtttgatggtggtggatgccgggcctattatggacaaattgagtttgaggaacctgtgggatgatcaagtggcactgtccaccaggcagttggatatatgggttcagagtatagaggtggacactgaagtcctggctggttgacatcagcctgaggcccagaagacaactgacgaaggacagtgtccagactatttatctctcacaaatcagtaagaaaaagacggctgggcatggtggctcatgcctgtaatcccagcactttgggaagccgaggcaggtggatcacccgaggtcaggagttcaagaccagcctgaccaacatggcaaaatcccgtctctactaaaaatacaaaaattagccgggtgtggtggcaggcgcctgtaatcccagctactcaggaggctgaggcaggagaattgcttgaacctgggaggtggaggtagtagtgagccgagatcgtgccactgcactccagcctggggacagagggagactctgcctccaaaaaaaaaaaaagaaaagaaaaagaaaaaagagaagaaaagaaaaagacaacaactggtcaggcatggtggctcacacctgtaatccccactttgggaggccgaggtaggcagatcacttgaggctgggagtttgagaccagcctggccaacatggtgaaaccccatctctactaaaaagtataaaaattagccgggcgtggtggcaaatgcctgtggtcccggctccttgggaggctgaggcatgagagtcgcttgaacccaggaggcagaggttgtagtgagccaagatcgtgccactgcaccccagcttggggaacagagaaagactctgtctcaaaaagaaaaaaaaagaaaaagaaaatgggcaaaatttatgaaaaggtgtacctaactaaatggccagtaaacatagaggaaatatctaatctctcttatagtaatgatggaaatacaaatttatgctgtaatgaaataccatttcaccaccttcaaattgagaaaaatgtaaaagtctggcaataccaagaagataaagaacaatagacacttttttttttttttggagacaggatcttgttctgttgcccaggctggagtgcagtggtgcgaacatggcacactgtagcctcaaactcctggggtcaagcagtcctcctgcctcactctcccaaacaggtgggactacaagtatgccaatatgcctgactaattttttaattttttgtaaaactggggtcttgctatattgcccaggctagaatagagactcttatacactgctggtgggagaggacattgggacaagtgctttgggaaagaaattgacattatagtatcttacaaagtttgcaaagtgcatagcgtagagaccagtaattttactcttcagcagaaactgtagagaaacccttctacatgtgtacagaatgttaaagcacactagccaaaaaacagaaaaacatcagtgattctaaatagaagaagggtagatcagtttgaatatattcatgagtagagtactatacaccagtgaaaatgcatgaattagagcaaaatgtgtttccatggttaaagcttgctatcacagagggatgtatatgatataataccattactgttaagtctaggccgggcatggtggctcatgcttgtaatcccagtgcattgaaaggctgaggtggctggattgcttgaggccaggagttttagaccagcgtgagcaacacagacccctgtttctacaaaaaaataattttaaagattagccgggcaggctgggcgtggtgtctcatgcctgtaatcccagcacttgggagactgaggtgggtggatcacgaggtcaggagttcaagaccagcctggccaagatggtgaaaccccgtctctactaaaaatacaaaaaaattagccgggcgtgatagcaggcgcctgtaatcgtagctactcaggaggctgaggcagagaattgcttgagtctgggaggcagaggttgcagtgagccaagattgtgccactgcattccagcctgggcgacagagcgagactccgtcaaaaataaataaataaataaataaataaataaataagccaggtatggtggcttatgcttatattcccagttactagggaggctgaggccaggggattgtttgcttgagcccaggagtttgaggtttcagtgagatgattgcgccactgtgctccagcctaggcaacagagtaagaccctgtctctaagaaaagaaaaaattaagtctaaagacctgcaagacaacgttagatactgttttttttcccatatgaatatactcctaggctgggcgcagtggctcacacctgtaatcccagcactttgggaggctgaggcagaaagatcacttgaggccaagagttcgagaccagcctggccaacgtggcgaaaccctgtctatactaaaaatacaaaaaattagctgagcatggaggtgaactcctgcaatcccagctactcgggaggctgagacacaagaattgcttgaacctgggaggtggaggttgcagtgaactgagatcgtgccactgcactcagcctgggtgacagagtgagactctgcctttaaaattaaaaaaaaaaaatttatatatatatatatatttatatatatatatatatttatatatatatatatatatatatatttatatatatatatatatatttatatatatatatatattcctaaggaaatgtatgacagtgataaattcaagatagtgtttacctctgagggagagtttctgttaggaaaggggtttaaacatatctttttgttcagctggatggaggggtcacagggctgtttttttaataagatactttgtatgtttgaactgtttaattttttttctttatttttgtaaggaggtttttttgtttccatttttgtatttttgagacagtgtttctgttgcccaggctggagtgcagtggcaatgatctcagctcactgtggtctctatctcctgggctcaagcaattctcatgcctcagcctccctagtagctgggactacaggcatgcactaccatgcccagctaatttttttttcttgtagagacagtgtttcaccatattgcccaggctggtcttgaactcctgggctcaagtgatctgcctgcctcagcctccctaagtgctgggattacaggtgtgagccactgtgctcagccgataatttttttcttttctttttcttttttttttggggggcactgtctctctgtcacctagggtggagtgcagtggtgcgatctcagctcactgcaacctttgtctcctgggttcaagggattctcctgcctcagcctcctgagtatctgggattacaggtgtccaccaccacgcctggcaaatttttgtactaatatttttttaaaggatcaaatggcacctagcatgtactcagtaagtatttgaataattggttggttctttgtctctgggttgaggtattattatttgtttcttcctctctaagtgtttataaagaaaaagtataaggcccggcacggtggctcacacctgtaatcccagcacttttggaggctgaggcgggtggatcacctgaggtcagaagtttgagaccagcctggccaacatcatggtgaaaccctgtctctattaaaaaaaaaaacaaaaacaaaattagccaggcatggtggtgcatgctctgtctcaaaataataaaaaaaaaaaagtatgaatctatatggcttttggtggctaaatttgacattaaagtctgagctcacccttgaacattgagacagagtctgtgctccatatatacaccccatctgccacaacactgctagaggcacgcgcctcagactccttttccctccgagtgactcagccattcccccgtctctgtataggtccctgtccttcgaatggtggaaggtgataccatctatgattactgctggtattctctgatgtcctcagcccagccagacacctcctagtaagtaatgtttgcctccctgctcgccgccccaccacccagtttcaagcagggcctcttgggagagtcaagggctgccaggggtctttggaggaggaaggcttggcatgcttatcagaggggctggtcagttggcttcctccccttcctttttttttttttagattgagtctccctctgtcacccaggctggagggcggtgatgcagtctcagctcactgcaacctccgcctcccaggttgaagtgattctcctgcctcagcctcctgagtagctgggattacaggtgtgcaccaccacacccagctaattgtgtatttttcatagagatggggtttcaccacgttggccaggctggtctcgaactgacctcaggtgatccacctgccttggcctcctgaagtgcttggattacaggcatgagccaccacacccagcctcatttttgtatttttagtagagacagggtttcaccatgttggccaggctggtctcgaactcctgacctcaagtgatccacctgccttggcctcccaaagtgctgggattacaggcatgagccactgtgcccggccattcctccccttcctttgacagcaccggggtttcagtgtccatgtctctctcagcgtggccagcagcagccgggagaacccgattcatatctgggacgcattcactggagagctccgggcttcctttcgcgcctacaaccacctggtagggaccgccatactcagccccagcactcgtactggcccggctctccttccttgagggcagctgaggctttgcaagacctgttttcagccctttccttcccccaggatgagctgacggcagcccattcgctctgcttctccccggatggctcccagctcttctgtggcttcaaccggactgtgcgtgttttttccacggcccggcctggccgagactgcgaggtccgagccacatttggtaagcatctgtgcctccaagggaggaggagagggaagggcactgccacctgcacaggggccttttgtgagccgggggccacctgtgggggttcacgccgtcctctgtacggccccgggagcaggtgcagcccagtcggcagaggagcaaacaggctcagagcaggtaggaaaccttcccaaggccaaccagctggtcaaaggactgcttccttcctgaactcataccctgtcagctgtggagcttttggtctctgaaatctttctagaaaattgttgataaagctgattccgttttcctgtaggccttcaacttgcatctctccaaggaagaactgggatttgagagggatgaagtggggcttgggcatttaggtcctttgggaggatagatgtggggagcatcagaggtctttgtcctgcttgtgacagacagcatgggggggatgttgagtccaagcatgttggtgctgggacgggagacagacctctgcttagcctggttagtgccaggagccattgccccctcccccactttgttccttccctctctagcaaaaaagcagggccagagcggcatcatctcctgcatagccttcagcccagcccagcccctctatgcctgtggctcctacggccgctccctgggtctgtatgcctgggatgatggctcccctctcgccttgctgggagggcaccaagggggcatcacccacctctgctttcatcccgatggcaaccgcttcttctcaggagcccgcaaggtaggggtcacaccctgagagcccaaagcagctgggcagcggggcaggagcagggatgtagtctgcagtgtaggggaatgggtggggatggggaaaaaatcccaagctgaaggagtgcctggagaccccgagggaggcagggacatccagggctttgggggtgactccaggtcctgttccttgtctccaggatgctgagctcctgtgctgggatctccggcagtctggttacccactgtggtccctgggtcgagaggtgaccaccaatcagcgcatctacttcgatctggacccgtgagtggctgtgactccttcctacacagggccctgataagcctaggaatgccagagcccagctgtagggtcccagtccctgggtgtgaggggttcctgccccaggggtgaggcctctgccagcaaatctctcctctctctcgcaggaccgggcagttcctagtgagtggcagcacgagcggggctgtctctgtgtgggacacggacgggcctggcaatgatgggaagccggagcccgtgttgagttttctgccccagaaggactgcaccaatggcgtgaggtcctcagttcaattccagagatgttggggcttgggttggggagggaggtgaatcccagagggagcaagtgtcctcactgaaggcactgatagaccctccccatctctccctcagcctgcaccctagcctgcctctcctggccactgcctccggtcagcgtgtgtttcctgagcccacagagagtggggacgaaggagaggagctgggccttcccttgctctccacgcgccacgtccaccttgaatgtcggcttcagctctggtggtgtgggggggcgccagactccagcatccctgatgatcaccagggcgagaaagggcagggaggaacggagggaggtgtgggtgagctgatataaaaaggtttttatgata

SEQ ID NO: 14929 - DNA, 2525 bp, Homo sapiens
agtgctttcaaaagaattggcgtccgctgttcgcctctcctcccgggagtcttctgcctactcccagaagaggagggaagcacagtatgaagactttggagactcaaccgttagctccggactgctgtccttcagaccaggacccagctccagcccatccttctccccacgcttccccgatgaataaaaatgcggactctgaactgatgccaccgcctcccgaaaggggggatccgccccggttgtccccagatcctgtggctggctcagctgtgtcccaggagctacgggagggggacccagtttctctctccactcccctggaaacagagtttggttcccctagtgagttgagtcctcgaatcgaggagcaagaactttctgaaaatacaagccttcctgcagaagaagcaaacgggagcctttctgaagaagaagcgaacgggccagagttggggtctggaaaagccatggaagatacctctggggaacccgctgcagaggacgagggagacaccgcttggaactacagcttctcccagctgcctcgatttctcagtggttcctggtcagagttcagcacccaacctgagaacttcttgaaaggctgtaagtgggctcctgacggttcctgcatcttgaccaatagtgctgataacatcttgcgaatttataacctgcccccagagctgtaccatgagggggagcaggtggaatatgcagaaatggtccctgtccttcgaatggtggaaggtgataccatctatgattactgctggtattctctgatgtcctcagcccagccagacacctcctacaccggggtttcagtgtccatgtctctctcagcgtggccagcagcagccgggagaacccgattcatatctgggacgcattcactggagagctccgggcttcctttcgcgcctacaaccacctggatgagctgacggcagcccattcgctctgcttctccccggatggctcccagctcttctgtggcttcaaccggactgtgcgtgttttttccacggcccggcctggccgagactgcgaggtccgagccacatttggtaagcatctgtgcctccaagggaggaggagagggaagggcactgccacctgcacaggggccttttgtgagccgggggccacctgtgggggttcacgccgtcctctgtacggccccgggagcaggtgcagcccagtcggcagaggagcaaacaggctcagagcaggtaggaaaccttcccaaggccaaccagctggtcaaaggactgcttccttcctgaactcataccctgtcagctgtggagcttttggtctctgaaatctttctagaaaattgttgataaagctgattccgttttcctgtaggccttcaacttgcatctctccaaggaagaactgggatttgagagggatgaagtggggcttgggcatttaggtcctttgggaggatagatgtggggagcatcagaggtctttgtcctgcttgtgacagacagcatgggggggatgttgagtccaagcatgttggtgctgggacgggagacagacctctgcttagcctggttagtgccaggagccattgccccctcccccactttgttccttccctctctagcaaaaaagcagggccagagcggcatcatctcctgcatagccttcagcccagcccagcccctctatgcctgtggctcctacggccgctccctgggtctgtatgcctgggatgatggctcccctctcgccttgctgggagggcaccaagggggcatcacccacctctgctttcatcccgatggcaaccgcttcttctcaggagcccgcaaggtaggggtcacaccctgagagcccaaagcagctgggcagcggggcaggagcagggatgtagtctgcagtgtaggggaatgggtggggatggggaaaaaatcccaagctgaaggagtgcctggagaccccgagggaggcagggacatccagggctttgggggtgactccaggtcctgttccttgtctccaggatgctgagctcctgtgctgggatctccggcagtctggttacccactgtggtccctgggtcgagaggtgaccaccaatcagcgcatctacttcgatctggacccgaccgggcagttcctagtgagtggcagcacgagcggggctgtctctgtgtgggacacggacgggcctggcaatgatgggaagccggagcccgtgttgagttttctgccccagaaggactgcaccaatggcgtgagcctgcaccctagcctgcctctcctggccactgcctccggtcagcgtgtgtttcctgagcccacagagagtggggacgaaggagaggagctgggccttcccttgctctccacgcgccacgtccaccttgaatgtcggcttcagctctggtggtgtgggggggcgccagactccagcatccctgatgatcaccagggcgagaaagggcagggaggaacggagggaggtgtgggtgagctgatataaaaaggtttttatgata

SEQ ID NO: 14930 - DNA, 1385 bp, Homo sapiens
gaagaactgggatttgagagggatgaagtggggcttgggcatttaggtcctttgggaggatagatgtggggagcatcagaggtctttgtcctgcttgtgacagacagcatgggggggatgttgagtccaagcatgttggtgctgggacgggagacagacctctgcttagcctggttagtgccaggagccattgccccctcccccactttgttccttccctctctagcaaaaaagcagggccagagcggcatcatctcctgcatagccttcagcccagcccagcccctctatgcctgtggctcctacggccgctccctgggtctgtatgcctgggatgatggctcccctctcgccttgctgggagggcaccaagggggcatcacccacctctgctttcatcccgatggcaaccgcttcttctcaggagcccgcaaggtaggggtcacaccctgagagcccaaagcagctgggcagcggggcaggagcagggatgtagtctgcagtgtaggggaatgggtggggatggggaaaaaatcccaagctgaaggagtgcctggagaccccgagggaggcagggacatccagggctttgggggtgactccaggtcctgttccttgtctccaggatgctgagctcctgtgctgggatctccggcagtctggttacccactgtggtccctgggtcgagaggtgaccaccaatcagcgcatctacttcgatctggacccgtgagtggctgtgactccttcctacacagggccctgataagcctaggaatgccagagcccagctgtagggtcccagtccctgggtgtgaggggttcctgccccaggggtgaggcctctgccagcaaatctctcctctctctcgcaggaccgggcagttcctagtgagtggcagcacgagcggggctgtctctgtgtgggacacggacgggcctggcaatgatgggaagccggagcccgtgttgagttttctgccccagaaggactgcaccaatggcgtgaggtcctcagttcaattccagagatgttggggcttgggttggggagggaggtgaatcccagagggagcaagtgtcctcactgaaggcactgatagaccctccccatctctccctcagcctgcaccctagcctgcctctcctggccactgcctccggtcagcgtgtgtttcctgagcccacagagagtggggacgaaggagaggagctgggccttcccttgctctccacgcgccacgtccaccttgaatgtcggcttcagctctggtggtgtgggggggcgccagactccagcatccctgatgatcaccagggcgagaaagggcagggaggaacggagggaggtgtgggtgagctgatataaaaaggtttttatgata

SEQ ID NO: 14931 - DNA, 998 bp, Homo sapiens
gaagaactgggatttgagagggatgaagtggggcttgggcatttaggtcctttgggaggatagatgtggggagcatcagaggtctttgtcctgcttgtgacagacagcatgggggggatgttgagtccaagcatgttggtgctgggacgggagacagacctctgcttagcctggttagtgccaggagccattgccccctcccccactttgttccttccctctctagcaaaaaagcagggccagagcggcatcatctcctgcatagccttcagcccagcccagcccctctatgcctgtggctcctacggccgctccctgggtctgtatgcctgggatgatggctcccctctcgccttgctgggagggcaccaagggggcatcacccacctctgctttcatcccgatggcaaccgcttcttctcaggagcccgcaaggatgctgagctcctgtgctgggatctccggcagtctggttacccactgtggtccctgggtcgagaggtgaccaccaatcagcgcatctacttcgatctggacccgtgagtggctgtgactccttcctacacagggccctgataagcctaggaatgccagagcccagctgaccgggcagttcctagtgagtggcagcacgagcggggctgtctctgtgtgggacacggacgggcctggcaatgatgggaagccggagcccgtgttgagttttctgccccagaaggactgcaccaatggcgtgagcctgcaccctagcctgcctctcctggccactgcctccggtcagcgtgtgtttcctgagcccacagagagtggggacgaaggagaggagctgggccttcccttgctctccacgcgccacgtccaccttgaatgtcggcttcagctctggtggtgtgggggggcgccagactccagcatccctgatgatcaccagggcgagaaagggcagggaggaacggagggaggtgtgggtgagctgatataaaaaggtttttatgata

SEQ ID NO: 14932 - DNA, 622 bp, Homo sapiens
tgataagcctaggaatgccagagcccagctgtagggtcccagtccctgggtgtgaggggttcctgccccaggggtgaggcctctgccagcaaatctctcctctctctcgcaggaccgggcagttcctagtgagtggcagcacgagcggggctgtctctgtgtgggacacggacgggcctggcaatgatgggaagccggagcccgtgttgagttttctgccccagaaggactgcaccaatggcgtgaggtcctcagttcaattccagagatgttggggcttgggttggggagggaggtgaatcccagagggagcaagtgtcctcactgaaggcactgatagaccctccccatctctccctcagcctgcaccctagcctgcctctcctggccactgcctccggtcagcgtgtgtttcctgagcccacagagagtggggacgaaggagaggagctgggccttcccttgctctccacgcgccacgtccaccttgaatgtcggcttcagctctggtggtgtgggggggcgccagactccagcatccctgatgatcaccagggcgagaaagggcagggaggaacggagggaggtgtgggtgagctgatataaaaaggtttttatgata

SEQ ID NO: 14933 - DNA, 507 bp, Homo sapiens
tgataagcctaggaatgccagagcccagctgtagggtcccagtccctgggtgtgaggggttcctgccccaggggtgaggcctctgccagcaaatctctcctctctctcgcaggaccgggcagttcctagtgagtggcagcacgagcggggctgtctctgtgtgggacacggacgggcctggcaatgatgggaagccggagcccgtgttgagttttctgccccagaaggactgcaccaatggcgtgagcctgcaccctagcctgcctctcctggccactgcctccggtcagcgtgtgtttcctgagcccacagagagtggggacgaaggagaggagctgggccttcccttgctctccacgcgccacgtccaccttgaatgtcggcttcagctctggtggtgtgggggggcgccagactccagcatccctgatgatcaccagggcgagaaagggcagggaggaacggagggaggtgtgggtgagctgatataaaaaggtttttatgata

SEQ ID NO: 14934 - DNA, 15902 bp, Homo sapiens
aagggcaagtaatccgcctgccggaggaagcaaaggaaatggagttggggaggagggtgcagagtcaggattctcgccgacctggtgccgtagatactaacattttggggtggaaaattctgcaagccagagctgtgagggcagaattggtggaaatcattttggaggaatcctgcattgtgtcaaatatgaagggtggaaggaagaaagcttttgcgtttgctctcagctggatcctttcttctcatcagttaaaatgtcattttttaggaaggctttccgtaatatcacaccctaacgttttctcccagatactttatatcacaccatcttatttaatctccttcacaacccttatcactctgataagatttatttgttcattgctttcagtacatggaaacgtaagccttatgaggatatagaatttttctactatcttattcattgttgtattcctgagtgcctatatcagtgctgggtagcaagtaagagctcgataataaatattttttgaatgagggagacaggtctgaagcctggagaatgagatgcagaagaggtgcaagacctgctgcgccctctgcaggcggcgggggggcggtgcaggtgctttaagaattaccgcgggactcggtagggggagcgtaggcgcttctcgccaagatagaagcgttcagactacaactcccagcagccacgaggagccctagggcttgatgggaacgggaaaccttctaacctttcacgtcccggctccgcgggttccgtgggtcgcccgcgaaatctgatccgggatgcggcggcccaatcggaaggtggaccgaaatcccgcgacagcaagaggcccgtagcgacccgcggtgctaaggaacacagtgctttcaaaagaattggcgtccgctgttcgcctctcctcccgggagtcttctgcctactcccagaagaggagggaagcacaggtgggtttctttagctctgcgtcggatccctgagaacttcgaagccatcctggctgaggctaatctccgctgtgcttcctctgcagtatgaagactttggagactcaaccgttagctccggactgctgtccttcagaccaggacccagctccagcccatccttctccccacgcttccccgatgaataaaaatgcggactctgaactgatgccaccgcctcccgaaaggggggatccgccccggttgtccccagatcctgtggctggctcagctgtgtcccaggagctacgggagggggacccagtttctctctccactcccctggaaacagagtttggttcccctagtgagttgagtcctcgaatcgaggagcaagaactttctgaaaatacaagccttcctgcagaagaagcaaacgggagcctttctgaagaagaagcgaacgggccagagttggggtctggaaaagccatggaagatacctctggggaacccgctgcagaggacgagggagacacgtaagtggtgatggcagtggagtgtggagtctggggagatgaagtgtgaggtcgatctgtcctctggtcctgagacccacttctccaggcctctgccccctttgcttggcgacccaggtttattgtcccccatcttcctttcagcgcttggaactacagcttctcccagctgcctcgatttctcagtggttcctggtcagagttcagcacccaacctgagaacttcttgaaaggctgtaagtggtaaggataacaacggggcagggagctgaccacccccgagattttcactgtaaaacagtccagttttctaggagagggatgccccagagctgggagaagcggcacgtagcccttttagactgagcttacattttatctagcagtttgtgtcttctacttccctcaaggattcaggggggcttacctaccccagaggcaggctcagccctagccctacacttgaaaagcataggtctggccagctttctaactctcccctgtttctagggctcctgacggttcctgcatcttgaccaatagtgctgataacatcttgcgaatttataacctgcccccagagctgtaccatgagggggagcaggtggaatatgcagaaatggtaaggactggggctaactgcctcttcatcaatgctgcacatttaagtccttcgtggagatggaaaaagtgtagtccaagtgtttcctgttcacaaacgggactgtttttcaagacgagtttccacatgtagcgttttctgccccgaattctgaagttatttagagagaggtttcccctttctttaattaggaatctgtgttttttgctaaaaagtagtgaatttcttgtggcagcatatatatatttctatttcttatttttttgagacaaggtcttgctctgtcacccaggctggagtgctgtggtgtgatctcggctcactgcaacctctgcctcccgggttcaagcgattctcctgcctcagcctcacaagtagctggtattacaggcgcacgccatcacactcgactaatttttatagttttagtagagacggggtttcgccatgttgggcaggctgatatcaaattcctgacctcagaggatccgcccaccttggcctcccaaagtgcggggatcacaggtgtgagtcaccgtgcctggcttatagctatttattgattgactactgatatatgttagtcactgtgctgggataaagtggtggacaagacagatgaagggctggtttgctttctgtgtgggagacagacaacaaacatgtaaaccagcaagcatcaggaccaagatgatgataaatgctctgaaggaaatacacagaatgaagagagactaactagaggaaagcacattgcataaaatggtcaggaaggagctctctgaaaaggaggcatttgagctaagacctgaaggaggataagggatcagtcatgtgaaggcttctggaaagagctttccaggaactggcaatgatactataaacacccagaactgggaaatagctttgtgcgttaaaagaccagaaaggccctgcatggtggctcacgcctgtaatcccagctactcaggaggccgaggtgtgcagatcacttgaggccaggagttcgagaccagcctggccaatatggcaaaaccccatcgctactaaaaataccaaaattagacgcatgtggtggcacgcgcctgtaatcccagctacttgtgtggctgaggcaggagaatctcttaaactcaggaggtggaggctgcagtcagacaaaattgtaccactgcactccagcctgggcgacagagtgagactccatctcaaaaaacaacaaaacagactgggctcagtggctcacacctgtaatcccagcactttgggaggctgaggtgggcagatcacctgaggtcaagagtttgagaccagcctggccaacatggcaaaacctcatctctacaaaaatacaaaaattagctgggtgtgatggtgggtgcctgtaatcccagctacttgagaggctgaagcagaagaatcatttgaacccaggagatggaggttgcagtgagccaagatcatgtcactgcactccagcctgggtgacagagtgagactccatcccaaaacaaacaaacaaacaaacaaacaaacaaacaaacacaaaacaaaaaacccagaatgctggtatagccagactgaggcaagtgagggggacagaggggtgaggacagagaagagcagccacgtcgtgttggttcttatgggtaaggcatttggagtttatttgggaagtcatgagagaggtgttttttttttttttttgagacgagtcttgctctgtcgcccaggctggagtgcaatggcgtgatctcggctcactgcaacctctgcctcctggattcaagcgattctcctgcctcagcctcccgagtagctgggattacaggcacccgccaccatgcccagctaatttttgtatttttttaaatagagacggggttttaccatattggccaggatggtctcgtactcctgacatttgatccgccggtctcggcctcccaaagtgctgggattataggcatgagccaccgcgcctggcttaatttttgtatttttagtagagacaggttttgccacgttggcctggctggtctcaaactcctgacctcaggtgatccacctgcctcagccttccaaagtgctaggattacaggcgtgagccaccatgccaggccatgagagaggttttttttgtttgtttgtttgagacagagtcttgctctgttgtccaggctggagtgcagtggcaccatctcagctcaccgcaacctccgcctcccaggtttaagtgattctcctgcctcaaccttccgagtagctgggattacaggcatgtgccaccacacccggctaatttttttgtatttttttagtagagatggggggttcatcatattggccaggctggtctcgaactcctgaccttgtgatctgcccaccttggcctcccaaagtgctgggattacaggcatgagccactgcgcccggccaagagagttttaaaacagaagagtgaatggtttatgggtgggcaagagtgaaatccagggccaggcacggtggctcacgcctgtaatcccaacactttgggaggctgagatgggtggatcacctgaggtgaagagttttagaccagcctggccaacatggtaaaaccctgtctctactcaaatacaaaaattagttggggctgggtgcggtggctgactcctgtaatcccagcactttgggaggctgaggcaggtggatcacctgaggtcaggagttcgagaccagcctggccaacatgatgaaaccccatctctattaaaaatacaaaaaattagctgggcgtggtggcgggcgcctgtaatcccagctactctggagtctgaggcaggagaattacttgaaccaaggagatggaggttgcagtgagccaggattgcaccactgcactccagtccaggcaacagtgtaagactccgtctcaaaaaaaaaaaaaaaaaaaaaagattggctatagttttctcccacccatcctaatcaggttctgcctccatcgcttcctgaaagtgctcttgtcaaggtcactaatgtcctcttgggtcattctccttttttttttttttttttttttttgagacagagtctcgctctgtcacccagctggagtgcagtggcgccatctcagctcactgcaagctctgcctcccgggatcacgccattctcctgcctcagcctctcccgagtagctgggactacaggcgcccgccaccacgcctggctaattttttgtatttttagtagagacggggtttcaccatggtctcgatctcctgacctcgtgatcctcctgcctcggcctcccaaagtgctgggattacaagcatgagccaccgcgcccagcccctcttgggtcattctctaaattcgcctcactgcatctcttagcagcatgagtcactgtctccacctccctgcgctggagcactcaggcactcagggctctgctgggccttctcctcctccatcagcactctttcttttttttcttttttttgagacggagtttcaaaaaatcagacccaccaaggcatgtggcagttgtgttgctctttgctcggtacccgctagaggtctgttgccattaatttgaaatgagaccagttagtgtgactgtgcatctttcctggcaagttaaatgactatagtttctctgtttgtaaaatggggatgattataatagcacctgcctcacagagttgtgagaattaaaataatcagtaatgaattaaagcacttaaggccgggtgcggtggctcacgcctataatcccagcactttggggggccgaggcaggtggatcgcctgaggtcaggaattcaagaccgacctggccaacatagtgaaaccctgtctttactaaaaatacaaaaattagccgggcttagtggcgggcgcctgtaatcccagctacttgggaggtttgaggcaggagaattgcttgaatccaggaggcgaaggttgcagtgagctgatcgcaccactgcactccagcctgggcaagagagcaagacttagtctcaaaaaaaaataataaaattaaaaaaaagtacttaaaacagcacctagcatatagtaagtgttcggtaaacactagtagtcactggtatcagttgtgtgcaagccaagaataggaggatggtatggttgaggtttaccaggagagaaagacaagggtatcctgagagtgtcttcaagagtgtgcatgccatggtggactagaatctacagtgggtaaggaactggactgtaaataagtttttgatgaagctgaataaattgtcatggtagaaatagcagagcagggtcaggcctggtggctcacgcctgtaatcccgacactttgggaggccgaggcgggtggatcacctaaggtcaggagttcgagaccagcctggccaatatggtgaaaccccgtctctactaaaaaagatacaaagttagccaggcatggtcgtgattatgatattaatgattataatattaaaacattttaaaaaatatatcttgcaatacagatagtcaatttgttttctttttttctttctttttttttttttttttttgagacagagtctcgctctgtggcccaggctggagagcagtggtgtgatcttgcctcactgcaacctctgtttcccggttcaagcgattctcctgcctcagcttcctgagtagctgggattacaggcacgcaccaccgcacccggctaatttttgtatttttagtagagatggggtttcgccaagttggccaggctggtctcaaactcccgacctcaagtgatccacccatttccgcctcctaaagtgctgggattacaggcgtgagccactgctcctggccagtcagtttgttttcaaaagatttttgtggctggtgtggtggctcatgcctataatcccagcactttgggagaccaaggtgggaggaatgcttgagcccaggagtttgagaccagccttggtaacacagccagatcctgtctctatcaaaaaagttgggcctatggtcccagctacttgggaggctgaggtgggaggatcgcttgagcctgcgaggttgaggctgccatgacctttgattgcaccattgtactctagcctgggcgacagagtgagactctgtctcaaaacaaacaaccaaaacctttttgtgcttttttttttttttttcctgctagtgtaccagttctatcgcaacctctctcattaggtattttcatttttagtgtctacaagcttagcatttgaaatagataactttttttttttgagatggagtcttgctgtgtcccccaggctggagtgcagtggcgcgatctcagctcactgcaagctccgcctcccgggttcacgccattctcctgcctcagcctctcgagtagctgggactacacgcacccactgccaccacgccaggctaattttttgtatttttagtacagtcggggtttcaccatgttagccaggatggtctcgatctcctgacctcgtgatccgcccgccttggcctctcaaagtgctgggattacaggcgtgagccactgcacccggccttaaatagataaaatttgtataggtcagaaaattggggaagggtgtatttgggtatttccatatacttgtgtgtactgagtcttcttcccaatatagtttctcgggttttctcctttcttttccaccttttcacagaactttctgcaagtctcatttccagctccccagcgtctttcctgagtacttgccctgccccgtgggtcttgcaggaagcctttactcctcgtcttgccctctccaggagacactttgcatcctctgtaccctttatctctcagggtggggacggggaatgtcctcattcccaaatgctgtagccacacaattgctctttcgtctttgtgaaacttttcccttgaggcttatgctgattctctctcccgctgacgacgttggcactgtacagccttccggtgctctcctgttcgcccgccattttggtgacctcaggtatccaagccaaaagccagggtctctctcatcctttaatctttaatctccctgttcctaacccctcacatccaattacttcccaaatcccatcaagtctgcctaatcttcctaatccacccacatctgtccctcccactgcctctactttaattcaaggtcctattattttgggccttatgttgctgaaacagtctcctgcctccttttgctcattaaaaccgtatttgttgactctgcttattctgcaccacgtgttggggaagcagtggtgagagcgaggcagatgtgattccctccttctctgataggtatgacggaaggggagtgaggagcaccaggggctataggaaagaggaacaggggcgccttgcttagctggaggggttagggaagcgttcccagaggaagaagcatctaagagacctgaaggatgactaggattcagccaggaggagtcgttgggggagatgaaggaagaatattccagacttggagcctaggacatgtgaaagccagtgggttgaaagtgtggcgagttggcactttatgggacctgagagtcaaaatggcgggactcagagattttttttttttttttttttttttttgaaatggagtcttgctctgtcgcccaggctggagtgcagtggcgcgatctgggttcactgcaagctccgcctcccaggttcacgccattctcctgcctcagcctcccgagtagctgggactacaggcgcccgccaccacgcctggctaattttttgtgtttttagtagacacggggtttcaccacgttagccaggatggtctcgatctcctgaccttgtgatccgcccgccttggcctcccaaagtgctgggattactggcgtgagccactgcgcccggtcaggactcagagatttttatgggaattagcagatagagataagccttgagaggtgggtcgggggtagcacgtggtaatggaagactaggaggaggaactggcaagatttggtattgggttggaccaggagtggaaaggaagtgaagagtggtagcagtcaaggctggtgctcagatttcaggattgagcactggtgtggagtccaggaggaacagcaggtttgatggtggtggatgccgggcctattatggacaaattgagtttgaggaacctgtgggatgatcaagtggcactgtccaccaggcagttggatatatgggttcagagtatagaggtggacactgaagtcctggctggttgacatcagcctgaggcccagaagacaactgacgaaggacagtgtccagactatttatctctcacaaatcagtaagaaaaagacggctgggcatggtggctcatgcctgtaatcccagcactttgggaagccgaggcaggtggatcacccgaggtcaggagttcaagaccagcctgaccaacatggcaaaatcccgtctctactaaaaatacaaaaattagccgggtgtggtggcaggcgcctgtaatcccagctactcaggaggctgaggcaggagaattgcttgaacctgggaggtggaggtagtagtgagccgagatcgtgccactgcactccagcctggggacagagggagactctgcctccaaaaaaaaaaaaagaaaagaaaaagaaaaaagagaagaaaagaaaaagacaacaactggtcaggcatggtggctcacacctgtaatccccactttgggaggccgaggtaggcagatcacttgaggctgggagtttgagaccagcctggccaacatggtgaaaccccatctctactaaaaagtataaaaattagccgggcgtggtggcaaatgcctgtggtcccggctccttgggaggctgaggcatgagagtcgcttgaacccaggaggcagaggttgtagtgagccaagatcgtgccactgcaccccagcttggggaacagagaaagactctgtctcaaaaagaaaaaaaaagaaaaagaaaatgggcaaaatttatgaaaaggtgtacctaactaaatggccagtaaacatagaggaaatatctaatctctcttatagtaatgatggaaatacaaatttatgctgtaatgaaataccatttcaccaccttcaaattgagaaaaatgtaaaagtctggcaataccaagaagataaagaacaatagacacttttttttttttttggagacaggatcttgttctgttgcccaggctggagtgcagtggtgcgaacatggcacactgtagcctcaaactcctggggtcaagcagtcctcctgcctcactctcccaaacaggtgggactacaagtatgccaatatgcctgactaattttttaattttttgtaaaactggggtcttgctatattgcccaggctagaatagagactcttatacactgctggtgggagaggacattgggacaagtgctttgggaaagaaattgacattatagtatcttacaaagtttgcaaagtgcatagcgtagagaccagtaattttactcttcagcagaaactgtagagaaacccttctacatgtgtacagaatgttaaagcacactagccaaaaaacagaaaaacatcagtgattctaaatagaagaagggtagatcagtttgaatatattcatgagtagagtactatacaccagtgaaaatgcatgaattagagcaaaatgtgtttccatggttaaagcttgctatcacagagggatgtatatgatataataccattactgttaagtctaggccgggcatggtggctcatgcttgtaatcccagtgcattgaaaggctgaggtggctggattgcttgaggccaggagttttagaccagcgtgagcaacacagacccctgtttctacaaaaaaataattttaaagattagccgggcaggctgggcgtggtgtctcatgcctgtaatcccagcacttgggagactgaggtgggtggatcacgaggtcaggagttcaagaccagcctggccaagatggtgaaaccccgtctctactaaaaatacaaaaaaattagccgggcgtgatagcaggcgcctgtaatcgtagctactcaggaggctgaggcagagaattgcttgagtctgggaggcagaggttgcagtgagccaagattgtgccactgcattccagcctgggcgacagagcgagactccgtcaaaaataaataaataaataaataaataaataaataagccaggtatggtggcttatgcttatattcccagttactagggaggctgaggccaggggattgtttgcttgagcccaggagtttgaggtttcagtgagatgattgcgccactgtgctccagcctaggcaacagagtaagaccctgtctctaagaaaagaaaaaattaagtctaaagacctgcaagacaacgttagatactgttttttttcccatatgaatatactcctaggctgggcgcagtggctcacacctgtaatcccagcactttgggaggctgaggcagaaagatcacttgaggccaagagttcgagaccagcctggccaacgtggcgaaaccctgtctatactaaaaatacaaaaaattagctgagcatggaggtgaactcctgcaatcccagctactcgggaggctgagacacaagaattgcttgaacctgggaggtggaggttgcagtgaactgagatcgtgccactgcactcagcctgggtgacagagtgagactctgcctttaaaattaaaaaaaaaaaatttatatatatatatatatttatatatatatatatatttatatatatatatatatatatatatttatatatatatatatatatttatatatatatatatattcctaaggaaatgtatgacagtgataaattcaagatagtgtttacctctgagggagagtttctgttaggaaaggggtttaaacatatctttttgttcagctggatggaggggtcacagggctgtttttttaataagatactttgtatgtttgaactgtttaattttttttctttatttttgtaaggaggtttttttgtttccatttttgtatttttgagacagtgtttctgttgcccaggctggagtgcagtggcaatgatctcagctcactgtggtctctatctcctgggctcaagcaattctcatgcctcagcctccctagtagctgggactacaggcatgcactaccatgcccagctaatttttttttcttgtagagacagtgtttcaccatattgcccaggctggtcttgaactcctgggctcaagtgatctgcctgcctcagcctccctaagtgctgggattacaggtgtgagccactgtgctcagccgataatttttttcttttctttttcttttttttttggggggcactgtctctctgtcacctagggtggagtgcagtggtgcgatctcagctcactgcaacctttgtctcctgggttcaagggattctcctgcctcagcctcctgagtatctgggattacaggtgtccaccaccacgcctggcaaatttttgtactaatatttttttaaaggatcaaatggcacctagcatgtactcagtaagtatttgaataattggttggttctttgtctctgggttgaggtattattatttgtttcttcctctctaagtgtttataaagaaaaagtataaggcccggcacggtggctcacacctgtaatcccagcacttttggaggctgaggcgggtggatcacctgaggtcagaagtttgagaccagcctggccaacatcatggtgaaaccctgtctctattaaaaaaaaaaacaaaaacaaaattagccaggcatggtggtgcatgctctgtctcaaaataataaaaaaaaaaaagtatgaatctatatggcttttggtggctaaatttgacattaaagtctgagctcacccttgaacattgagacagagtctgtgctccatatatacaccccatctgccacaacactgctagaggcacgcgcctcagactccttttccctccgagtgactcagccattcccccgtctctgtataggtccctgtccttcgaatggtggaaggtgataccatctatgattactgctggtattctctgatgtcctcagcccagccagacacctcctagtaagtaatgtttgcctccctgctcgccgccccaccacccagtttcaagcagggcctcttgggagagtcaagggctgccaggggtctttggaggaggaaggcttggcatgcttatcagaggggctggtcagttggcttcctccccttcctttttttttttttagattgagtctccctctgtcacccaggctggagggcggtgatgcagtctcagctcactgcaacctccgcctcccaggttgaagtgattctcctgcctcagcctcctgagtagctgggattacaggtgtgcaccaccacacccagctaattgtgtatttttcatagagatggggtttcaccacgttggccaggctggtctcgaactgacctcaggtgatccacctgccttggcctcctgaagtgcttggattacaggcatgagccaccacacccagcctcatttttgtatttttagtagagacagggtttcaccatgttggccaggctggtctcgaactcctgacctcaagtgatccacctgccttggcctcccaaagtgctgggattacaggcatgagccactgtgcccggccattcctccccttcctttgacagcaccggggtttcagtgtccatgtctctctcagcgtggccagcagcagccgggagaacccgattcatatctgggacgcattcactggagagctccgggcttcctttcgcgcctacaaccacctggtagggaccgccatactcagccccagcactcgtactggcccggctctccttccttgagggcagctgaggctttgcaagacctgttttcagccctttccttcccccaggatgagctgacggcagcccattcgctctgcttctccccggatggctcccagctcttctgtggcttcaaccggactgtgcgtgttttttccacggcccggcctggccgagactgcgaggtccgagccacatttggtaagcatctgtgcctccaagggaggaggagagggaagggcactgccacctgcacaggggccttttgtgagccgggggccacctgtgggggttcacgccgtcctctgtacggccccgggagcaggtgcagcccagtcggcagaggagcaaacaggctcagagcaggtaggaaaccttcccaaggccaaccagctggtcaaaggactgcttccttcctgaactcataccctgtcagctgtggagcttttggtctctgaaatctttctagaaaattgttgataaagctgattccgttttcctgtaggccttcaacttgcatctctccaaggaagaactgggatttgagagggatgaagtggggcttgggcatttaggtcctttgggaggatagatgtggggagcatcagaggtctttgtcctgcttgtgacagacagcatgggggggatgttgagtccaagcatgttggtgctgggacgggagacagacctctgcttagcctggttagtgccaggagccattgccccctcccccactttgttccttccctctctagcaaaaaagcagggccagagcggcatcatctcctgcatagccttcagcccagcccagcccctctatgcctgtggctcctacggccgctccctgggtctgtatgcctgggatgatggctcccctctcgccttgctgggagggcaccaagggggcatcacccacctctgctttcatcccgatggcaaccgcttcttctcaggagcccgcaaggtaggggtcacaccctgagagcccaaagcagctgggcagcggggcaggagcagggatgtagtctgcagtgtaggggaatgggtggggatggggaaaaaatcccaagctgaaggagtgcctggagaccccgagggaggcagggacatccagggctttgggggtgactccaggtcctgttccttgtctccaggatgctgagctcctgtgctgggatctccggcagtctggttacccactgtggtccctgggtcgagaggtgaccaccaatcagcgcatctacttcgatctggacccgtgagtggctgtgactccttcctacacagggccctgataagcctaggaatgccagagcccagctgtagggtcccagtccctgggtgtgaggggttcctgccccaggggtgaggcctctgccagcaaatctctcctctctctcgcaggaccgggcagttcctagtgagtggcagcacgagcggggctgtctctgtgtgggacacggacgggcctggcaatgatgggaagccggagcccgtgttgagttttctgccccagaaggactgcaccaatggcgtgaggtcctcagttcaattccagagatgttggggcttgggttggggagggaggtgaatcccagagggagcaagtgtcctcactgaaggcactgatagaccctccccatctctccctcagcctgcaccctagcctgcctctcctggccactgcctccggtcagcgtgtgtttcctgagcccacagagagtggggacgaaggagaggagctgggccttcccttgctctccacgcgccacgtccaccttgaatgtcggcttcagctctggtggtgtgggggggcgccagactccagcatccctgatgatcaccagggcgagaaagggcagggaggaacggagggaggtgtgggtgagctgatataaaaaggtttttatgat

SEQ ID NO: 14935 - DNA, 2657 bp, Homo sapiens
aagggcaagtaatccgcctgccggaggaagcaaaggaaatggagttggggaggagggtgcagagtcaggattctcgccgacctggtgccgtagatactaacattttggggtggaaaattctgcaagccagagctgtgagggcagaattggtggaaatcattttggaggaatcctgcattgtgtcaaatatgaagggtggaaggaagaaagcttttgcgtttgctctcagctggatcctttcttctcatcagttaaaatgtcattttttaggaaggctttccgtaatatcacaccctaacgttttctcccagatactttatatcacaccatcttatttaatctccttcacaacccttatcactctgataagatttatttgttcattgctttcagtacatggaaacgtaagccttatgaggatatagaatttttctactatcttattcattgttgtattcctgagtgcctatatcagtgctgggtagcaagtaagagctcgataataaatattttttgaatgagggagacaggtctgaagcctggagaatgagatgcagaagaggtgcaagacctgctgcgccctctgcaggcggcgggggggcggtgcaggtgctttaagaattaccgcgggactcggtagggggagcgtaggcgcttctcgccaagatagaagcgttcagactacaactcccagcagccacgaggagccctagggcttgatgggaacgggaaaccttctaacctttcacgtcccggctccgcgggttccgtgggtcgcccgcgaaatctgatccgggatgcggcggcccaatcggaaggtggaccgaaatcccgcgacagcaagaggcccgtagcgacccgcggtgctaaggaacacagtgctttcaaaagaattggcgtccgctgttcgcctctcctcccgggagtcttctgcctactcccagaagaggagggaagcacagtatgaagactttggagactcaaccgttagctccggactgctgtccttcagaccaggacccagctccagcccatccttctccccacgcttccccgatgaataaaaatgcggactctgaactgatgccaccgcctcccgaaaggggggatccgccccggttgtccccagatcctgtggctggctcagctgtgtcccaggagctacgggagggggacccagtttctctctccactcccctggaaacagagtttggttcccctagtgagttgagtcctcgaatcgaggagcaagaactttctgaaaatacaagccttcctgcagaagaagcaaacgggagcctttctgaagaagaagcgaacgggccagagttggggtctggaaaagccatggaagatacctctggggaacccgctgcagaggacgagggagacaccgcttggaactacagcttctcccagctgcctcgatttctcagtggttcctggtcagagttcagcacccaacctgagaacttcttgaaaggctgtaagtgggctcctgacggttcctgcatcttgaccaatagtgctgataacatcttgcgaatttataacctgcccccagagctgtaccatgagggggagcaggtggaatatgcagaaatggtccctgtccttcgaatggtggaaggtgataccatctatgattactgctggtattctctgatgtcctcagcccagccagacacctcctacaccggggtttcagtgtccatgtctctctcagcgtggccagcagcagccgggagaacccgattcatatctgggacgcattcactggagagctccgggcttcctttcgcgcctacaaccacctggatgagctgacggcagcccattcgctctgcttctccccggatggctcccagctcttctgtggcttcaaccggactgtgcgtgttttttccacggcccggcctggccgagactgcgaggtccgagccacatttgcaaaaaagcagggccagagcggcatcatctcctgcatagccttcagcccagcccagcccctctatgcctgtggctcctacggccgctccctgggtctgtatgcctgggatgatggctcccctctcgccttgctgggagggcaccaagggggcatcacccacctctgctttcatcccgatggcaaccgcttcttctcaggagcccgcaaggatgctgagctcctgtgctgggatctccggcagtctggttacccactgtggtccctgggtcgagaggtgaccaccaatcagcgcatctacttcgatctggacccgaccgggcagttcctagtgagtggcagcacgagcggggctgtctctgtgtgggacacggacgggcctggcaatgatgggaagccggagcccgtgttgagttttctgccccagaaggactgcaccaatggcgtgagcctgcaccctagcctgcctctcctggccactgcctccggtcagcgtgtgtttcctgagcccacagagagtggggacgaaggagaggagctgggccttcccttgctctccacgcgccacgtccaccttgaatgtcggcttcagctctggtggtgtgggggggcgccagactccagcatccctgatgatcaccagggcgagaaagggcagggaggaacggagggaggtgtgggtgagctgatataaaaaggtttttatgat

SEQ ID NO: 14936 - DNA, 15026 bp, Homo sapiens; identical to SEQ ID NO: 14928

SEQ ID NO: 14937 - DNA, 1736 bp, Homo sapiens
agtgctttcaaaagaattggcgtccgctgttcgcctctcctcccgggagtcttctgcctactcccagaagaggagggaagcacaggtgggtttctttagctctgcgtcggatccctgagaacttcgaagccatcctggctgaggctaatctccgctgtgcttcctctgcagtatgaagactttggagactcaaccgttagctccggactgctgtccttcagaccaggacccagctccagcccatccttctccccacgcttccccgatgaataaaaatgcggactctgaactgatgccaccgcctcccgaaaggggggatccgccccggttgtccccagatcctgtggctggctcagctgtgtcccaggagctacgggagggggacccagtttctctctccactcccctggaaacagagtttggttcccctagtgagttgagtcctcgaatcgaggagcaagaactttctgaaaatacaagccttcctgcagaagaagcaaacgggagcctttctgaagaagaagcgaacgggccagagttggggtctggaaaagccatggaagatacctctggggaacccgctgcagaggacgagggagacacggctcctgacggttcctgcatcttgaccaatagtgctgataacatcttgcgaatttataacctgcccccagagctgtaccatgagggggagcaggtggaatatgcagaaatggtccctgtccttcgaatggtggaaggtgataccatctatgattactgctggtattctctgatgtcctcagcccagccagacacctcctacgtggccagcagcagccgggagaacccgattcatatctgggacgcattcactggagagctccgggcttcctttcgcgcctacaaccacctggatgagctgacggcagcccattcgctctgcttctccccggatggctcccagctcttctgtggcttcaaccggactgtgcgtgttttttccacggcccggcctggccgagactgcgaggtccgagccacatttgcaaaaaagcagggccagagcggcatcatctcctgcatagccttcagcccagcccagcccctctatgcctgtggctcctacggccgctccctgggtctgtatgcctgggatgatggctcccctctcgccttgctgggagggcaccaagggggcatcacccacctctgctttcatcccgatggcaaccgcttcttctcaggagcccgcaaggatgctgagctcctgtgctgggatctccggcagtctggttacccactgtggtccctgggtcgagaggtgaccaccaatcagcgcatctacttcgatctggacccgaccgggcagttcctagtgagtggcagcacgagcggggctgtctctgtgtgggacacggacgggcctggcaatgatgggaagccggagcccgtgttgagttttctgccccagaaggactgcaccaatggcgtgagcctgcaccctagcctgcctctcctggccactgcctccggtcagcgtgtgtttcctgagcccacagagagtggggacgaaggagaggagctgggccttcccttgctctccacgcgccacgtccaccttgaatgtcggcttcagctctggtggtgtgggggggcgccagactccagcatccctgatgatcaccagggcgagaaagggcagggaggaacggagggaggtgtgggtgagctgatataaaaaggtttttatgata

SEQ ID NO: 14938 - DNA, 4988 bp, Homo sapiens
aggttccaaacgctccgcggcgccatgggctgaaaactcaaccgagatggaatctcccagtctgaaccggtttcaaccggttccgagtttgaggcactaggaggagggggagaagcggctgcagcggccgcggcaggagcagcgggagctacagcatcagcaagagcaacagtagctacagccccggcggcggtgcctgttccagtctttgctgctgcagtccgtgcaaccacccagagggggaggggggaaccaccagtcgctgaggaacaagagaaggggggaaagtttaggcgagccttgggggggggggggccagcgccggagccgcgtgagagagggagccgtgttttggtaggggggagtcggactgcaactggcagcagagcgtctccccggccgtgtggactctacaccccctactcctgccgcttctgctgctgcctgtggctggagggtccccctggggctgaatctttgggacttgaccccgttccctcccccttccctcactccccagccgggcgggagcatttattccccagattaattccccttttgggggggggcgggtgtgtgtgtgtgtgtgtgtgtgtgtgtgtgttgggggaagcgtccctgaaatagtaaatattattgagctctttttgcccttttcctgtccgtttttttaatttccttttttgaggtgggaaaactgaaacccaccttgattcgtcccctctcccccctccccaccttccctcgccctaatcccccaacgaggaaggaaggagcagttggttcaatctctggtaatctatgccagcaattatgacaatgttagcagaccatgcagctcgtcagctgcttgatttcagccaaaaactggatatcaacttattagataatgtggtgaattgcttataccatggagaaggagcccagcaaagaatggctcaagaagtactgacacatttaaaggagcatcctgatgcttggacaagagtcgacacaattttggaattttctcagaatatgaatacgaaatactatggactacaaattttggaaaatgtgataaaaacaaggtggaagattcttccaaggaaccagtgcgaaggaataaaaaaatacgttgttggcctcattatcaagacgtcatctgacccaacttgtgtagagaaagaaaaggtgtatatcggaaaattaaatatgatccttgttcagatactgaaacaagaatggcccaaacattggccaacttttatcagtgatattgttggagcaagtaggaccagcgaaagtctctgtcaaaataatatggtgattcttaaactcttgagtgaagaagtatttgatttctctagtggacagataacccaagtcaaatctaagcatttaaaagacagcatgtgcaatgaattctcacagatatttcaactgtgtcagtttgtaatggaaaattctcaaaatgctccacttgtacatgcaaccttggaaacattgctcagatttctgaactggattcccctgggatatatttttgagaccaaattaatcagcacattgatttataagttcctgaatgttccaatgtttcgaaatgtctctctgaagtgcctcactgagattgctggtgtgagtgtaagccaatatgaagaacaatttgtaacactatttactctgacaatgatgcaactaaagcagatgcttcctttaaataccaatattcgacttgcgtactcaaatggaaaagatgatgaacagaacttcattcaaaatctcagtttgtttctctgcacctttcttaaggaacatgatcaacttatagaaaaaagattaaatctcagggaaactcttatggaggcccttcattatatgttgttggtatctgaagtagaagaaactgaaatctttaaaatttgtcttgaatactggaatcatttggctgctgaactctatagagagagtccattctctacatctgcctctccgttgctttctggaagtcaacattttgatgttcctcccaggagacagctatatttgcccatgttattcaaggtccgtttattaatggttagtcgaatggctaaaccagaggaagtattggttgtagagaatgatcaaggagaagttgtgagagaattcatgaaggatacagattccataaatttgtataagaatatgagggaaacattggtttatcttactcatctggattatgtagatacagaaagaataatgacagagaagcttcacaatcaagtgaatggtacagagtggtcatggaaaaatttgaatacattgtgttgggcaataggctccattagtggagcaatgcatgaagaggacgaaaaacgatttcttgttactgttataaaggatctattaggattatgtgaacagaaaagaggcaaagataataaagctattattgcatcaaatatcatgtacatagtaggtcaatacccacgttttttgagagctcactggaaatttctgaagactgtagttaacaagctgttcgaattcatgcatgagacccatgatggagtccaggatatggcttgtgatactttcattaaaatagcccaaaaatgccgcaggcatttcgttcaggttcaggttggagaagtgatgccatttattgatgaaattttgaacaacattaacactattatttgtgatcttcagcctcaacaggttcatacgttttatgaagctgtggggtacatgattggtgcacaaacagatcaaacagtacaagaacacttgatagaaaagtacatgttactccctaatcaagtgtgggatagtataatccagcaggcaaccaaaaatgtggatatactgaaagatcctgaaacagtcaagcagcttggtagcattttgaaaacaaatgtgagagcctgcaaagctgttggacacccctttgtaattcagcttggaagaatttatttagatatgcttaatgtatacaagtgcctcagtgaaaatatttctgcagctatccaagctaatggtgaaatggttacaaagcaaccattgattagaagtatgcgaactgtaaaaagggaaactttaaagttaatatctggttgggtgagccgatccaatgatccacagatggtcgctgaaaattttgttccccctctgttggatgcagttctcattgattatcagagaaatgtcccagctgctagagaaccagaagtgcttagtactatggccataattgtcaacaagttagggggacatataacagctgaaatacctcaaatatttgatgctgtttttgaatgcacattgaatatgataaataaggactttgaagaatatcctgaacatagaacgaactttttcttactacttcaggctgtcaattctcattgtttcccagcattccttgctattccacctacacagtttaaacttgttttggattccatcatttgggctttcaaacatactatgaggaatgtcgcagatacgggcttacagatactttttacactcttacaaaatgttgcacaagaagaagctgcagctcagagtttttatcaaacttatttttgtgatattctccagcatatcttttctgttgtgacagacacttcacatactgctggtttaacaatgcatgcatcaattcttgcatatatgtttaatttggttgaagaaggaaaaataagtacatcattaaatcctggaaatccagttaacaaccaaatctttcttcaggaatatgtggctaatctccttaagtcggccttccctcacctacaagatgctcaagtaaagctctttgtgacagggcttttcagcttaaatcaagatattcctgctttcaaggaacatttaagagatttcctagttcaaataaaggaatttgcaggtgaagacacttctgatttgtttttggaagagagagaaatagccctacggcaggctgatgaagagaaacataaacgtcaaatgtctgtccctggcatctttaatccacatgagattccagaagaaatgtgtgattaaaatccaaattcatgctgttttttttctctgcaactcgttagcagaggaaaacagcatgtgggtatttgtcgaccaaaatgatgccaatttgtaaattaaaatgtcacctagtggccctttttcttatgtgtttttttgtataagaaattttctgtgaaatatccttccattgtttaagcttttgttttggtcatctttatttagtttgcatgaagttgaaaattaaggcatttttaaaaattttacttcatgcccatttttgtggctgggctggggggaggaggcaaattcgatttgaacatatacttgtaattctaatgcaaaattatacaatttttcctgtaaacaataccaatttttaattagggagcattttccttctagtctatttcagcctagaagaaaagataatgagtaaaacaaattgcgttgtttaaaggattatagtgctgcattgtctgaagttagcacctcttggactgaatcgtttgtctagactacatgtattacaaagtctctttggcaagattgcagcaagatcatgtgcatatcatcccattgtaaagcgacttcaaaaatatgggaacacagttagttatttttacacagttctttttgtttttgtgtgtgtgtgctgtcgcttgtcgacaacagctttttgttttcctcaatgaggagtgttgctcatttgtgagccttcattaactcgaagtgaaatggttaaaaatatttatcctgttagaataggctgcatctttttaacaactcattaaaaaacaaaacaactctggcttttgagatgacttatactaatttacattgtttaccaagctgtagtgctttaagaacactacttaaaaagcaaaataaacttggtttacatttatttttcctttattgactcatttattcctatattaatgatagtgggtatttgtgtttaagcatcaagtaacattttaaatgaagtt

SEQ ID NO: 14939 - DNA, 4105 bp, Homo sapiens
agcttgggatgggggagggaggggctgccgactccctgttcctccagcaaggaaactcgaaagctctccggttttgcagagtggcatgtgaagtaggaaagatcagtttttcaggggcctgcacatgggattccgtcttgtagttccttttcaggggtttgaatgtgataagttggttaaaccatttactgttggccttgtacagtggaggatgccctgattctccttcattccgatgtctgtgagtttgggttgggtgggaggaagtggtgtagtagaggaagcattcagtactggctcagcccggacctcctctgatcacgccgaggccatgctgcatagagaaaggggcggtgaacttaaggcgcctggtctaaatgcctcctccgagtaagggcgggtaatctatgccagcaattatgacaatgttagcagaccatgcagctcgtcagctgcttgatttcagccaaaaactggatatcaacttattagataatgtggtgaattgcttataccatggagaaggagcccagcaaagaatggctcaagaagtactgacacatttaaaggagcatcctgatgcttggacaagagtcgacacaattttggaattttctcagaatatgaatacgaaatactatggactacaaattttggaaaatgtgataaaaacaaggtggaagattcttccaaggaaccagtgcgaaggaataaaaaaatacgttgttggcctcattatcaagacgtcatctgacccaacttgtgtagagaaagaaaaggtgtatatcggaaaattaaatatgatccttgttcagatactgaaacaagaatggcccaaacattggccaacttttatcagtgatattgttggagcaagtaggaccagcgaaagtctctgtcaaaataatatggtgattcttaaactcttgagtgaagaagtatttgatttctctagtggacagataacccaagtcaaatctaagcatttaaaagacagcatgtgcaatgaattctcacagatatttcaactgtgtcagtttgtaatggaaaattctcaaaatgctccacttgtacatgcaaccttggaaacattgctcagatttctgaactggattcccctgggatatatttttgagaccaaattaatcagcacattgatttataagttcctgaatgttccaatgtttcgaaatgtctctctgaagtgcctcactgagattgctggtgtgagtgtaagccaatatgaagaacaatttgtaacactatttactctgacaatgatgcaactaaagcagatgcttcctttaaataccaatattcgacttgcgtactcaaatggaaaagatgatgaacagaacttcattcaaaatctcagtttgtttctctgcacctttcttaaggaacatgatcaacttatagaaaaaagattaaatctcagggaaactcttatggaggcccttcattatatgttgttggtatctgaagtagaagaaactgaaatctttaaaatttgtcttgaatactggaatcatttggctgctgaactctatagagagagtccattctctacatctgcctctccgttgctttctggaagtcaacattttgatgttcctcccaggagacagctatatttgcccatgttattcaaggtccgtttattaatggttagtcgaatggctaaaccagaggaagtattggttgtagagaatgatcaaggagaagttgtgagagaattcatgaaggatacagattccataaatttgtataagaatatgagggaaacattggtttatcttactcatctggattatgtagatacagaaagaataatgacagagaagcttcacaatcaagtgaatggtacagagtggtcatggaaaaatttgaatacattgtgttgggcaataggctccattagtggagcaatgcatgaagaggacgaaaaacgatttcttgttactgttataaaggatctattaggattatgtgaacagaaaagaggcaaagataataaagctattattgcatcaaatatcatgtacatagtaggtcaatacccacgttttttgagagctcactggaaatttctgaagactgtagttaacaagctgttcgaattcatgcatgagacccatgatggagtccaggatatggcttgtgatactttcattaaaatagcccaaaaatgccgcaggcatttcgttcaggttcaggttggagaagtgatgccatttattgatgaaattttgaacaacattaacactattatttgtgatcttcagcctcaacaggttcatacgttttatgaagctgtggggtacatgattggtgcacaaacagatcaaacagtacaagaacacttgatagaaaagtacatgttactccctaatcaagtgtgggatagtataatccagcaggcaaccaaaaatgtggatatactgaaagatcctgaaacagtcaagcagcttggtagcattttgaaaacaaatgtgagagcctgcaaagctgttggacacccctttgtaattcagcttggaagaatttatttagatatgcttaatgtatacaagtgcctcagtgaaaatatttctgcagctatccaagctaatggtgaaatggttacaaagcaaccattgattagaagtatgcgaactgtaaaaagggaaactttaaagttaatatctggttgggtgagccgatccaatgatccacagatggtcgctgaaaattttgttccccctctgttggatgcagttctcattgattatcagagaaatgtcccagctgctagagaaccagaagtgcttagtactatggccataattgtcaacaagttagggggacatataacagctgaaatacctcaaatatttgatgctgtttttgaatgcacattgaatatgataaataaggactttgaagaatatcctgaacatagaacgaactttttcttactacttcaggctgtcaattctcattgtttcccagcattccttgctattccacctacacagtttaaacttgttttggattccatcatttgggctttcaaacatactatgaggaatgtcgcagatacgggcttacagatactttttacactcttacaaaatgttgcacaagaagaagctgcagctcagagtttttatcaaacttatttttgtgatattctccagcatatcttttctgttgtgacagacacttcacatactgctggtttaacaatgcatgcatcaattcttgcatatatgtttaatttggttgaagaaggaaaaataagtacatcattaaatcctggaaatccagttaacaaccaaatctttcttcaggaatatgtggctaatctccttaagtcggccttccctcacctacaagatgctcaagtaaagctctttgtgacagggcttttcagcttaaatcaagatattcctgctttcaaggaacatttaagagatttcctagttcaaataaaggaatttgcaggtgaagacacttctgatttgtttttggaagagagagaaatagccctacggcaggctgatgaagagaaacataaacgtcaaatgtctgtccctggcatctttaatccacatgagattccagaagaaatgtgtgattaaaatccaaattcatgctgttttttttctctgcaactcgttagcagaggaaaacagcatgtgggtatttgtcgaccaaaatgatgccaatttgtaaattaaaatgtcacctagtggccctttttcttatgtgtttttttgtataagaaattttctgtgaaatatccttccattgtttaagcttttgttttggtcatctttatttagtttgcatgaagttgaaaattaaggcatttttaaaaattttacttcatgcccatttttgtggctgggctggggggaggaggcaaattcgatttgaacatatacttgtaattctaatgcaaaattatacaatttttcctgtaaacaataccaatttttaattagggagcattttccttctagtctatttcagcctagaagaaaagataatgagtaaaacaaattgcgttgtttaaaggattatagtgctgcattgtctgaagttagcacctcttggactg

SEQ ID NO: 14940 - DNA, 3479 bp, Homo sapiens
ggagaagcggctgcagcggccgcggcaggagcagcgggagctacagcatcagcaagagcaacagtagctacagccccggcggcggtgcctgttccagtctttgctgctgcagaaggagcagttggttcaatctctggtaatctatgccagcaattatgacaatgttagcagaccatgcagctcgtcagctgcttgatttcagccaaaaactggatatcaacttattagataatgtggtgaattgcttataccatggagaaggagcccagcaaagaatggctcaagaagtactgacacatttaaaggagcatcctgatgcttggacaagagtcgacacaattttggaattttctcagaatatgaatacgaaatactatggactacaaattttggaaaatgtgataaaaacaaggtggaagattcttccaaggaaccagtgcgaaggaataaaaaaatacgttgttggcctcattatcaagacgtcatctgacccaacttgtgtagagaaagaaaaggtgtatatcggaaaattaaatatgatccttgttcagatactgaaacaagaatggcccaaacattggccaacttttatcagtgatattgttggagcaagtaggaccagcgaaagtctctgtcaaaataatatggtgattcttaaactcttgagtgaagaagtatttgatttctctagtggacagataacccaagtcaaatctaagcatttaaaagacagcatgtgcaatgaattctcacagatatttcaactgtgtcagtttgtaatggaaaattctcaaaatgctccacttgtacatgcaaccttggaaacattgctcagatttctgaactggattcccctgggatatatttttgagaccaaattaatcagcacattgatttataagttcctgaatgttccaatgtttcgaaatgtctctctgaagtgcctcactgagattgctggtgtgagtgtaagccaatatgaagaacaatttgtaacactatttactctgacaatgatgcaactaaagcagatgcttcctttaaataccaatattcgacttgcgtactcaaatggaaaagatgatgaacagaacttcattcaaaatctcagtttgtttctctgcacctttcttaaggaacatgatcaacttatagaaaaaagattaaatctcagggaaactcttatggaggcccttcattatatgttgttggtatctgaagtagaagaaactgaaatctttaaaatttgtcttgaatactggaatcatttggctgctgaactctatagagagagtccattctctacatctgcctctccgttgctttctggaagtcaacattttgatgttcctcccaggagacagctatatttgcccatgttattcaaggtccgtttattaatggttagtcgaatggctaaaccagaggaagtattggttgtagagaatgatcaaggagaagttgtgagagaattcatgaaggatacagattccataaatttgtataagaatatgagggaaacattggtttatcttactcatctggattatgtagatacagaaagaataatgacagagaagcttcacaatcaagtgaatggtacagagtggtcatggaaaaatttgaatacattgtgttgggcaataggctccattagtggagcaatgcatgaagaggacgaaaaacgatttcttgttactgttataaaggatctattaggattatgtgaacagaaaagaggcaaagataataaagctattattgcatcaaatatcatgtacatagtaggtcaatacccacgttttttgagagctcactggaaatttctgaagactgtagttaacaagctgttcgaattcatgcatgagacccatgatggagtccaggatatggcttgtgatactttcattaaaatagcccaaaaatgccgcaggcatttcgttcaggttcaggttggagaagtgatgccatttattgatgaaattttgaacaacattaacactattatttgtgatcttcagcctcaacaggttcatacgttttatgaagctgtggggtacatgattggtgcacaaacagatcaaacagtacaagaacacttgatagaaaagtacatgttactccctaatcaagtgtgggatagtataatccagcaggcaaccaaaaatgtggatatactgaaagatcctgaaacagtcaagcagcttggtagcattttgaaaacaaatgtgagagcctgcaaagctgttggacacccctttgtaattcagcttggaagaatttatttagatatgcttaatgtatacaagtgcctcagtgaaaatatttctgcagctatccaagctaatggtgaaatggttacaaagcaaccattgattagaagtatgcgaactgtaaaaagggaaactttaaagttaatatctggttgggtgagccgatccaatgatccacagatggtcgctgaaaattttgttccccctctgttggatgcagttctcattgattatcagagaaatgtcccagctgctagagaaccagaagtgcttagtactatggccataattgtcaacaagttagggggacatataacagctgaaatacctcaaatatttgatgctgtttttgaatgcacattgaatatgataaataaggactttgaagaatatcctgaacatagaacgaactttttcttactacttcaggctgtcaattctcattgtttcccagcattccttgctattccacctacacagtttaaacttgttttggattccatcatttgggctttcaaacatactatgaggaatgtcgcagatacgggcttacagatactttttacactcttacaaaatgttgcacaagaagaagctgcagctcagagtttttatcaaacttatttttgtgatattctccagcatatcttttctgttgtgacagacacttcacatactgctggtttaacaatgcatgcatcaattcttgcatatatgtttaatttggttgaagaaggaaaaataagtacatcattaaatcctggaaatccagttaacaaccaaatctttcttcaggaatatgtggctaatctccttaagtcggccttccctcacctacaagatgctcaagtaaagctctttgtgacagggcttttcagcttaaatcaagatattcctgctttcaaggaacatttaagagatttcctagttcaaataaaggaatttgcaggtgaagacacttctgatttgtttttggaagagagagaaatagccctacggcaggctgatgaagagaaacataaacgtcaaatgtctgtccctggcatctttaatccacatgagattccagaagaaatgtgtgattaaaatccaaattcatgctgttttttttctctgcaactcgttagcagaggaaaacagcatgtgggtatttgtcgaccaaaatgatgccaatttgtaaattaaaatgtcacctagtggcccttt

SEQ ID NO: 14941 - DNA, 11668 bp, Homo sapiens
acttgcttaaaaagttttgacatcaagatactgaactgtatcacgttttaggaccataaaatcctaatagtggatgcgtttaaataataggttagcatactttataaatgttagtagaataggaaagtcttcctggtgtataaactaaacactagaaaagttgaatggaccataataatttatgtaattatcaaatagctaagtaatttcagcttttgttacttgcttttactatctcagttttctgtaattaaagtctctaaagtattcattaaaatatttgtaataacatggttgaagtaaaataacttgtaggaagtttttgataataccaaaacttgataggcagcttcaattttttttctttattttcagtaatctatgccagcaattatgacaatgttagcagaccatgcagctcgtcagctgcttgatttcagccaaaaactggatatcaacttattagataatgtggtgaattgcttataccatggagaaggagcccaggtaaagtagccaaccaaaactttataacattatgacagtgtaacagagttgttgggtttagaataaaattttaaattatcacctttaaaaaagatattccatagtttgcattaatttggaattctgtattaaccataatgaaaattggtttggagaaagaaattgcatgtttgacatggttagagtgggttgttttggaatattatacttgttttgtccttaagagccaaatgttattaaatactttgtaggtattaaaggttctctgtacttttatatatacttaatatgtttggcactaatacgattcttctacttttaaaacatttacagaagtacttcacagatatgtttgtttaaataaaaacaggaataccaagtatttttatgttagttgaattttgtgcacttttcaaagtggtactgttaatgtagggaattatcttaaacataaaccaaattttgatcagtttaagatttttggtttttttgaacccaactaaaaggtgaaacagaaatgtgtgtacaattttaaattgtatatgtcacaagaaaaaaaacttgattttttacctgtggggccaaacttttttttgagacagtctcgctctgtggtccaggcaggagtgcagtggcgctatctcagctcactgcaacccctgcctcctgggttcaagcgattgtcttgcctcagcctccctggtagctgggattacaggcacacgccaccatgcctggctaatttttgtatttttagtagagatggggtttcaccgtgttggccaggctggtcttggaactcctgacctcaggtgatccacctgactcggcctcccaaagtgctgggattacaggcatgagccaccgcgtgctggcccaaacatgtttttgaatgagtaaaaagttttgcagttgggtcagaaatcttttttttttttcagatggagtcttgctctgtcaccaggcctgagtgcagtggcacagtctcggctcactgcaacctctgcctcccaggttttcaagcaattcacctgccttagcctcccgagtagctgggactacagacgcgccaccatgcccagctaattttttgtattttagtagagatgggtttcatcatattggccaggatggtctccatctcctgacctcgtgatccgcctgccttggcctcccaaagtgtggagatgacaggcatgagccaccgcgcctggccagaaatcttttatggtagttttgttgccagaacagtagatttctggttagataaatgttcagctagtagatgggaggttacttatattgtcaagatatttatatttgcataattaagaaactgagtgccggccgggcgcggtggctcacgcctgtaatcccagcactttgagaggccgacgccggcggatgacgaggtcaggagatcgagaccatcctggctaacacggtgaaaccccgtctctactaaaaacacaaaaaattagccaggcgtggtggcgggcgcctgtagtcccagctactcgggaggctgaggcaggagaatggcgtgaacccgggaggcggagcttgcagtgagccgaggttgcgccactgcactccagcctgggcaacggcatgagacttcgtctcaaaaataaaaataaataaataaaataaaataaaaaaacctaaacctgagtgccattacactttctgaaaatatataaggtggatacagtactatcttttatagtagtccaaaaagcatcatgtataaatgtttccattcccttatgaaatgcaacagtactgcttttactatagtagaaacttgaaaaaggtccatggaaacgctaaaagtagaaaaaattactcttgcagtgattctgtaagcttgttagcccaggtttatacttttagggcgttttgatcagtatattatctcctaaagcattcttgaaaaaattaaccatccgtatttattatccctgtcatttagttgttactcatgctatacattcaacatgaagctttaagcttcatttcttctagcatggatgcatagaaagcagctgcttttggaggaagctatgaaagtaaggttgggttcaactctgaatgtaatattggaagcacaggtctgtagccattgggaaaaagggcatttaattttttccgcatagattcagctactaatactgtttaatcttcacactaaactagttcactacatctaaaggtatgataaataaaccaacatagagcagtgttcttcatggcttgtaacagaattagtggcaatttttgtaattgagaatatattacagcaatactgcttttaataatgtttcatagtattaagaaatttaatggtttgttttaaaattgacttgttaataaaaagtagattaagaaaagtgtttctaaatttttttgtttgtaaggacaataggttaactttcccaaagtaaaaggattttgtctgcagtagttaatagatcatgtgacaaaatcagttgcgtagaaataactagcaaacttattttgtattataaatgaagaaacaagatttagagcttaaagctggttaaggagtccttttggtctctaaaagtcctatgtcgttagttcagtctacttttcgtttaccacctccttgggggtcttatttcaaaggaaaaggagtagtagtagcagcgagctgctatagtggaaaacatgatttttagtgttagacgtcttaatttgattcttggaagctctctctagtcattgcttaagtcccatgtacaaatatgacctgtcctacaagagattggagggttagttatgaggtttaaaagcacctattacagtgcttgataggtagaaggcactcagcttaaagggtacatttagcagtataatgaaaatgatttagcatatgtgatactcattgcttaaaattaaaaaaattttttttttgctactcataaaatatgcactaatgacaagaaaaatttattatgctaattaagcttttaaagtcaactgggaaaaaaagctgtaggtaggtttttttttttttaaaggaatgtgtaacttgggggaggggaagaaattatttacaagggtgacttttaatctgtagacagaacttctgcatacatggttagtatagtaggatatttagcagtgtaacattaggactaccctctaccctctgttatcagcatttttctatttttagccaagtagacagctagaaaaaagatgcgggaagagttggatgttttctccaatattgtgttctgttaaagatcttgaactctattgcttagcaactaaaatgctttcaccattcagttagtagtacaagggagatgctaggttttctctctttagtttgcttttgtgtcttttttttttaaacccctgctggggttttaagtttataaagaacattatgtaagaatggtgggattagaataaatcagaatgcaaatactagaagtagcatcagagagtaaaattacaactaacaggaaagaatattatttatgtagcgattgatgtgagtggtgatagtgtgggaagtatttgattctgtgtagaatgcttatcacttcaaagcatctgacaaaatggtaacttgaccaagtaacttttactgtgtgaggatctttgatacaacttttcctctagttagataaggttatctagctagatattctcagggagaagaccaaaacactgctaaaatgtgctttggccctagataagccacatcattattctttcggccttctgtcatttctcatatgacacattatgcccatcagtcctttaatgaaatcaaatagaaatgtgtatgattgtattttaaagtatacacattaactcttgtaaccacagactcacaatggaagcaggcgtctgatcttttcaggcaaccacagtggttctggtgggtttctgggtagagaacaaccatataagttattgagtgtgtagcagtgtgttttcctgattgatgtatgggatagtcatgaatgtggtattgtatttcctacctgaggaaaaggtcatgattaaaataaagcatcaaagccaggataagcatataatttctttctttttttttttttttgtaatgagacagagtctcactctgtagcccaggctggagtgcagtggtgtgatctcaaatcactgcaacctccgccttccgggtcctggttcaagcaattctcctgcctcagcctcctgagtaactgggattacaagtacgccccaccatgcccagctaatttttgaatttttagtagagacggggtttcaccatgttggccaggctggtcttgaacttctgacctcgtgatccacccaccttggccacccaaagtgttgggattacaggcgtgagccacggtgcccacccgagcatacgattgttttaaaaaagactagaataaaagccaagctaaagattataaggtatctttgtcagaaatggttgtgagagtgcttcctaccctgtttttgatgctttattgtttataaccatagaattaaacccatgataaagtaaagtataagagaaagataactgacagattttaaagtcatcaaacttttttcttgctctgtcacacaggctggagcacaatggcttgatcacagctcactgcagccttgacttcccaggctcaatcttcccacctcagcctcctgagtagctgggaccataagtgcgtgtcccaccacacctggctcattattaatttttctttgttgcccaggctggtcttgaactcctgggattacagacatgagccaccacacctggtccaaactttttgcttacaacttttaatagaaataggtaaaagaaataggaaggatctaattgagttataaaacaacctttaaagatacaaaagtgaaaaagattaagccattgctttttgtcaatagaattaaaagctgttggtaaaaatattaatgtatgaaaaacttattgaaatgaaaaaactatatatatatatatatatatatatatatatatatatatatatatataaataaaatgtcgacatggctggatcttaaaaactgtcaaatgaaaaaaactaattgcaggaaagattttttttttttttttgagagggagtctcacgcagtcaacccaggttggagtgcactggggcaatcttcctgattcttggggaatcttggctcactgcaacctccgctcctggattcaagcgattctcctgcctcagcctcccgagtagctgggactataggcgcacgccaccattcccggctagtttttgtatttttagtagagatggggtttcgccatattggtcaggatggtcttgaactcctgaccttgtgatctgctcacctcggcctcccatagtgccaggattacaggcgtaagccaccgtgcccagcctaaaagatttttaagtatactattaacataaaatttggtagccgtacaaccctattcatgaaatttacacacatgccgtgaaaatgtggacaggaaaagacacactaagttcatgatgaaagccattactttttaaagaaggaacaaaggtgtaatcccagcactttggggaggctgaggcaggcgggtcacgaggtcaggagttcaagaccagcctggccaatacagtgaaaccctgtctctactgaaaatacaaaaattagccaggcgtggtggcaggtgcctgtagtcccagctacttgggaggctgaggcaggagaattgcttgaacccgggaggtgaaggttgcagtgagtcgagatcctgccattgcactccagcctgggtgacagagcaagactccaactttaaaaaaaaaaaagagagaaaaaaggaataaaggaaggaaatggcactagggaaaggcacaaagatgacttccataaactttagttattttatgctaaaagaaaatctgatacaagcacaagatgatgactacgtagattagtatttctgggttgcatgttaaaaatatgaaaataaaaacggaaatagtttccaaaacaaagattttatatatgaaattagtgaaatttcagaatggagaaaggatggttacaataaatgttaggagccctctttaaagagctcaaatggtatgtaagtatttgggatttgtggtttaattagacctagttttcagcagtctttccatgaaatgtatttttgtatttagagagatcttggtaactcttgtaaagcagagtgtcctgctacattacataacttacctaagtaggtgtgcttttttttgtttttctagagacagggtctctgctctttcacccaggctgaagtgtagtggcaccatcatagctcggtgcaaccttgatttccagggctcaagtgatcctcccatctcggtctcctgagtagttaggactataggtgcaagccaccatgtgcagctttcttttttttttttttttggagagtcatggcctcgttacattgcctgtcacctagactggccagctggtcttgaacccctggcctcaagtggtcctcctgcctcagtctcccaaagtattgggattacaggcatgaaacactgctactggcctagataagaatttttatattgtttttggttgatttaagtgctgagaacttatttgcttcagaatagatctttggttgaaatgcagttcagttttgagactaaaaaataaaccagatttactcccaaaaatgttactgtttcaaataagtaaaatatttgcacctttaaagattaggagttggctgggcatggtggctcactcctataatctcagcactttgggaggccaaggcaggcagatcacctgaggtcaggagttcaagaccagcctggccaacatggtgaaaccccatctctactaaaaatacaaaaattagctggctgtggtggcacctgcctataatcccagctactcaggaggctgaggcgggagaatcgcttgaacccaggaggcagaggttgcagggtgctgagatcgcaccactgcagtccagcctgggtgatagagccaagactctgtctcaaaaaaaaaaaaaaaaaattgggagtcatatttatataattttatttctatttctgtaaggtctaatttttgagtatttctgaacatcaataatagaatctctgtccaattagaatttgtgccttgctcagtagttttcattttaatgaatgattcaaaagaatacattagcttaagttttgttttttttaataatattttagcaaagaatggctcaagaagtactgacacatttaaaggagcatcctgatgcttggacaagagtcgacacaattttggaattttctcagaatatgaatacgaaagtaagcaagtggtggttttaaaatctgttatttcttttcttccagtcataaactttgaggaaggtatctcatttttagtattagcatttgttatctcaaattattttatattgttaatttgtttcaaaatttagtcttaagcatataattaattcttgcaaatagtcctaagaattatgaatgaagttttgtaatgggactagtatgcaaggtggcttttttggttgtctgattttgtttttttctttttagtatatgtatacaggtctaagtagcataaattctgaatgttattcagagattaaacataacattaaggaattattttgggcaagtaatcaatataatacaggccaggcacctctgacaccaagttgtgtggacagcttaaaaccctactccatggcattgggcttctaatgggacagcactcagtttttatttacaatggaaaatgttataattctggtccttttttaagtttgaacagaagggttgatcaaaatgtgttttgtctgttttaggcttgatgattcacgcttctctttaaactgccttaaagtaataaatactatggcattctgtttaatacacgaaaggtttccacttgatatacattgtgttaaaacagaagatagccatattcacatctgtttctgaaaccagactttgttaattaacagttttaaaatattaattagttttgacatcttgtaaattttaggtcaaaaatacagtccagaacttcctcaaagtgctaaccttaagtaacataacagtgtttgcctgtttgcttgcctggtaaattttgctttttatactgacagacattactaatgtttaagttgatttatcaacagtatttttaaaaactcaaatttgtcttgtgaaaaatgagatgattagaggaacagaaagaaagcaacaggtaaagaattcttcaatttacataaattacaaatgatttggtgctaaatttatgcactatgacatttggcttttatgcaatcatttttttttctttaaagatgttaacactacctgatattaatcataatgttccattatgttgattgcttgtaataggaagaaaaggggtgtcttcctgtgcaactgacacagctaggctttgacggcaggcctccacaaggtctacccttttgattccctttaactgaattctgttcatcaattgtttttgtttcatgggcggtgggaggggaaaggggaattcaatgcataaaataagtatttctaagggctcagtagaaatttctaccatagggatcatttcatgcatttattttttcatttagtctttgctgttatctgtccctcatcttcataactcagcagtggatttctcaagtttggagatgtaaggcaaaagtataattcttcagaatgtttggattgtagtgatttatcattggctttcagatttgactgtcacttcagatttttgagcaaaaatactaaaaaaaaaaagaaaaaaaattctttgaagagacaggacctctgttgcccaggctggagtgcagtggtgtgattatagctcactgtaacctcaaactcctgggcttaagtgacatttctgcctcaactttctgagtagctagggctacaggtgcgtgtcaccatgcctcgctaacttaccaatttttttatagaagtggggtctccctgtgttgctcaggctgatcttgaactcctggccctcccgccttggcctccccaaaatgttgggattacaggcgagggccactttgcctggccccaaataacattttttcaaaggaatgtaaattttttttgttttagtttcataggcaaagtctttatgtctgggagagattggattttaggatattatagtaacagatgtattcctttgacctaacctgggcaaagcatttattgggctccctgcttcaacccccttggcagaaagatgaaatatgaattgtatcttcatcaagcttatgctacctttatacagttgtagaaaatacaggttagtaaatagtaattttaggtaacagtatcaaataggaagaagtaaataaaaaagaaaggacagtgtctttccattaaaaatgtaaaaaagtttggttaaataagatgaagttatctttaagatttttatttgtaactatatttatggtgggttttgtttcttagtgttttaaaggctttttaattgatttttggcaagaggatatattgtaagcagtgcattgctttgacttactgagtcttgacaatctgattttgtgcctataaaattaaagaaaatgcttagggtagtatgtttttaaaagctaattaagaacttcaggcatttggacaactctcttttttttacatatttctcagacctagacataataaatagatatgtttttaaaagtgaacaggttagaaagcatcactatttactgctgattatgaaacattttaatagcatcaaatttgtaattttagaattttgctttggccttgtttttattttgaaagtttttaaggaatgttctgcaaatgtagtactttagttgaaatggcaaaattttcttgaagagtgtgaaatgttaaaatgaaagaaaacagcaaaaacattcactgtttgagcacaatgtagtttgggacagtctatattgtgctttggataaaatgagcattcacatgatccctttggttgaaatactaatgctcctattttattgtgtaatgactaaccattttaaagatgaactcttattctcagccaaaacttgcaatctgaggttatatgtctatatatgaatgagcttacctttcagatattatagctgattcttccctaattctctcagttgaaatgtaccacaacggttttgtcccttttcttcctcctgcctatccacactaattggtcatagtaattcaggtagtaactcctggggctttataaattattataaatattgttgactatttagagtgagtaatcagcaggagggacaaaatggcttgaaagtggtatctctgttttttaattttttatacttttagttataactttcagtatttaggaagaaatacctgaaaggtagatacagattgcaacatgcgtttgtgattattttgactgtgcacaaaagtttatctttaaattagtagaaatagcaactataagggtggggttaaaatataaaataaacccatgggttgtcttgctgctccttaagtaacacaccagtgatgcttgtaaacactttctatagaaagtatctgtgacaatactttaatatttggccaaaagcttataactcctagaggatggtaggaagcttgatagcatccaagctgctaaattcttaggagcctgttcgtgttaaagtacgtgagcctatgagcagtcatttatgctgtgaattcatatctggctgctacttttccttcgacagataagcctatttggctgctaaagggctttttatttggttcttcctcctggtgtgagcatgtataaacagcaggacgttatatagagtagcaaacaataaaatgaggaaaatgcatgaaaactcagtatatgggtgaatagatacttgtttaatatgtgtaattaaacttggtagcataatgtttttgaaactttagatgtaaatgtgtgaatgtctgtccatttgtgaatcctgagagttgccagtcctataagcaatatattcacatgcttctattctccaattttcagtactatggactacaaattttggaaaatgtgataaaaacaaggtggaagattcttccaaggaaccagtgcgaag

SEQ ID NO: 14942 - DNA, 682 bp, Homo sapiens
acttgcttaaaaagttttgacatcaagatactgaactgtatcacgttttaggaccataaaatcctaatagtggatgcgtttaaataataggttagcatactttataaatgttagtagaataggaaagtcttcctggtgtataaactaaacactagaaaagttgaatggaccataataatttatgtaattatcaaatagctaagtaatttcagcttttgttacttgcttttactatctcagttttctgtaattaaagtctctaaagtattcattaaaatatttgtaataacatggttgaagtaaaataacttgtaggaagtttttgataataccaaaacttgataggcagcttcaattttttttctttattttcagtaatctatgccagcaattatgacaatgttagcagaccatgcagctcgtcagctgcttgatttcagccaaaaactggatatcaacttattagataatgtggtgaattgcttataccatggagaaggagcccagcaaagaatggctcaagaagtactgacacatttaaaggagcatcctgatgcttggacaagagtcgacacaattttggaattttctcagaatatgaatacgaaatactatggactacaaattttggaaaatgtgataaaaacaaggtggaagattcttccaaggaaccagtgcgaag

SEQ ID NO: 14943 - DNA, 11887 bp, Homo sapiens
cggggttttgccatgttggccaggctggtctggaactcctgacctcaagtgattcgcccacctcggcctcccaaagtgctgggattacaggtgtgagccaccacgctcggcccattctgtctttatagcattatttttataaagttaagataatgtgaagtgagcttttactgagttattcagaagaccctacttgggaagaaaagaaaatcacattcacttgaacttaatcctacttgcttaaaaagttttgacatcaagatactgaactgtatcacgttttaggaccataaaatcctaatagtggatgcgtttaaataataggttagcatactttataaatgttagtagaataggaaagtcttcctggtgtataaactaaacactagaaaagttgaatggaccataataatttatgtaattatcaaatagctaagtaatttcagcttttgttacttgcttttactatctcagttttctgtaattaaagtctctaaagtattcattaaaatatttgtaataacatggttgaagtaaaataacttgtaggaagtttttgataataccaaaacttgataggcagcttcaattttttttctttattttcagtaatctatgccagcaattatgacaatgttagcagaccatgcagctcgtcagctgcttgatttcagccaaaaactggatatcaacttattagataatgtggtgaattgcttataccatggagaaggagcccaggtaaagtagccaaccaaaactttataacattatgacagtgtaacagagttgttgggtttagaataaaattttaaattatcacctttaaaaaagatattccatagtttgcattaatttggaattctgtattaaccataatgaaaattggtttggagaaagaaattgcatgtttgacatggttagagtgggttgttttggaatattatacttgttttgtccttaagagccaaatgttattaaatactttgtaggtattaaaggttctctgtacttttatatatacttaatatgtttggcactaatacgattcttctacttttaaaacatttacagaagtacttcacagatatgtttgtttaaataaaaacaggaataccaagtatttttatgttagttgaattttgtgcacttttcaaagtggtactgttaatgtagggaattatcttaaacataaaccaaattttgatcagtttaagatttttggtttttttgaacccaactaaaaggtgaaacagaaatgtgtgtacaattttaaattgtatatgtcacaagaaaaaaaacttgattttttacctgtggggccaaacttttttttgagacagtctcgctctgtggtccaggcaggagtgcagtggcgctatctcagctcactgcaacccctgcctcctgggttcaagcgattgtcttgcctcagcctccctggtagctgggattacaggcacacgccaccatgcctggctaatttttgtatttttagtagagatggggtttcaccgtgttggccaggctggtcttggaactcctgacctcaggtgatccacctgactcggcctcccaaagtgctgggattacaggcatgagccaccgcgtgctggcccaaacatgtttttgaatgagtaaaaagttttgcagttgggtcagaaatcttttttttttttcagatggagtcttgctctgtcaccaggcctgagtgcagtggcacagtctcggctcactgcaacctctgcctcccaggttttcaagcaattcacctgccttagcctcccgagtagctgggactacagacgcgccaccatgcccagctaattttttgtattttagtagagatgggtttcatcatattggccaggatggtctccatctcctgacctcgtgatccgcctgccttggcctcccaaagtgtggagatgacaggcatgagccaccgcgcctggccagaaatcttttatggtagttttgttgccagaacagtagatttctggttagataaatgttcagctagtagatgggaggttacttatattgtcaagatatttatatttgcataattaagaaactgagtgccggccgggcgcggtggctcacgcctgtaatcccagcactttgagaggccgacgccggcggatgacgaggtcaggagatcgagaccatcctggctaacacggtgaaaccccgtctctactaaaaacacaaaaaattagccaggcgtggtggcgggcgcctgtagtcccagctactcgggaggctgaggcaggagaatggcgtgaacccgggaggcggagcttgcagtgagccgaggttgcgccactgcactccagcctgggcaacggcatgagacttcgtctcaaaaataaaaataaataaataaaataaaataaaaaaacctaaacctgagtgccattacactttctgaaaatatataaggtggatacagtactatcttttatagtagtccaaaaagcatcatgtataaatgtttccattcccttatgaaatgcaacagtactgcttttactatagtagaaacttgaaaaaggtccatggaaacgctaaaagtagaaaaaattactcttgcagtgattctgtaagcttgttagcccaggtttatacttttagggcgttttgatcagtatattatctcctaaagcattcttgaaaaaattaaccatccgtatttattatccctgtcatttagttgttactcatgctatacattcaacatgaagctttaagcttcatttcttctagcatggatgcatagaaagcagctgcttttggaggaagctatgaaagtaaggttgggttcaactctgaatgtaatattggaagcacaggtctgtagccattgggaaaaagggcatttaattttttccgcatagattcagctactaatactgtttaatcttcacactaaactagttcactacatctaaaggtatgataaataaaccaacatagagcagtgttcttcatggcttgtaacagaattagtggcaatttttgtaattgagaatatattacagcaatactgcttttaataatgtttcatagtattaagaaatttaatggtttgttttaaaattgacttgttaataaaaagtagattaagaaaagtgtttctaaatttttttgtttgtaaggacaataggttaactttcccaaagtaaaaggattttgtctgcagtagttaatagatcatgtgacaaaatcagttgcgtagaaataactagcaaacttattttgtattataaatgaagaaacaagatttagagcttaaagctggttaaggagtccttttggtctctaaaagtcctatgtcgttagttcagtctacttttcgtttaccacctccttgggggtcttatttcaaaggaaaaggagtagtagtagcagcgagctgctatagtggaaaacatgatttttagtgttagacgtcttaatttgattcttggaagctctctctagtcattgcttaagtcccatgtacaaatatgacctgtcctacaagagattggagggttagttatgaggtttaaaagcacctattacagtgcttgataggtagaaggcactcagcttaaagggtacatttagcagtataatgaaaatgatttagcatatgtgatactcattgcttaaaattaaaaaaattttttttttgctactcataaaatatgcactaatgacaagaaaaatttattatgctaattaagcttttaaagtcaactgggaaaaaaagctgtaggtaggtttttttttttttaaaggaatgtgtaacttgggggaggggaagaaattatttacaagggtgacttttaatctgtagacagaacttctgcatacatggttagtatagtaggatatttagcagtgtaacattaggactaccctctaccctctgttatcagcatttttctatttttagccaagtagacagctagaaaaaagatgcgggaagagttggatgttttctccaatattgtgttctgttaaagatcttgaactctattgcttagcaactaaaatgctttcaccattcagttagtagtacaagggagatgctaggttttctctctttagtttgcttttgtgtcttttttttttaaacccctgctggggttttaagtttataaagaacattatgtaagaatggtgggattagaataaatcagaatgcaaatactagaagtagcatcagagagtaaaattacaactaacaggaaagaatattatttatgtagcgattgatgtgagtggtgatagtgtgggaagtatttgattctgtgtagaatgcttatcacttcaaagcatctgacaaaatggtaacttgaccaagtaacttttactgtgtgaggatctttgatacaacttttcctctagttagataaggttatctagctagatattctcagggagaagaccaaaacactgctaaaatgtgctttggccctagataagccacatcattattctttcggccttctgtcatttctcatatgacacattatgcccatcagtcctttaatgaaatcaaatagaaatgtgtatgattgtattttaaagtatacacattaactcttgtaaccacagactcacaatggaagcaggcgtctgatcttttcaggcaaccacagtggttctggtgggtttctgggtagagaacaaccatataagttattgagtgtgtagcagtgtgttttcctgattgatgtatgggatagtcatgaatgtggtattgtatttcctacctgaggaaaaggtcatgattaaaataaagcatcaaagccaggataagcatataatttctttctttttttttttttttgtaatgagacagagtctcactctgtagcccaggctggagtgcagtggtgtgatctcaaatcactgcaacctccgccttccgggtcctggttcaagcaattctcctgcctcagcctcctgagtaactgggattacaagtacgccccaccatgcccagctaatttttgaatttttagtagagacggggtttcaccatgttggccaggctggtcttgaacttctgacctcgtgatccacccaccttggccacccaaagtgttgggattacaggcgtgagccacggtgcccacccgagcatacgattgttttaaaaaagactagaataaaagccaagctaaagattataaggtatctttgtcagaaatggttgtgagagtgcttcctaccctgtttttgatgctttattgtttataaccatagaattaaacccatgataaagtaaagtataagagaaagataactgacagattttaaagtcatcaaacttttttcttgctctgtcacacaggctggagcacaatggcttgatcacagctcactgcagccttgacttcccaggctcaatcttcccacctcagcctcctgagtagctgggaccataagtgcgtgtcccaccacacctggctcattattaatttttctttgttgcccaggctggtcttgaactcctgggattacagacatgagccaccacacctggtccaaactttttgcttacaacttttaatagaaataggtaaaagaaataggaaggatctaattgagttataaaacaacctttaaagatacaaaagtgaaaaagattaagccattgctttttgtcaatagaattaaaagctgttggtaaaaatattaatgtatgaaaaacttattgaaatgaaaaaactatatatatatatatatatatatatatatatatatatatatatatataaataaaatgtcgacatggctggatcttaaaaactgtcaaatgaaaaaaactaattgcaggaaagattttttttttttttttgagagggagtctcacgcagtcaacccaggttggagtgcactggggcaatcttcctgattcttggggaatcttggctcactgcaacctccgctcctggattcaagcgattctcctgcctcagcctcccgagtagctgggactataggcgcacgccaccattcccggctagtttttgtatttttagtagagatggggtttcgccatattggtcaggatggtcttgaactcctgaccttgtgatctgctcacctcggcctcccatagtgccaggattacaggcgtaagccaccgtgcccagcctaaaagatttttaagtatactattaacataaaatttggtagccgtacaaccctattcatgaaatttacacacatgccgtgaaaatgtggacaggaaaagacacactaagttcatgatgaaagccattactttttaaagaaggaacaaaggtgtaatcccagcactttggggaggctgaggcaggcgggtcacgaggtcaggagttcaagaccagcctggccaatacagtgaaaccctgtctctactgaaaatacaaaaattagccaggcgtggtggcaggtgcctgtagtcccagctacttgggaggctgaggcaggagaattgcttgaacccgggaggtgaaggttgcagtgagtcgagatcctgccattgcactccagcctgggtgacagagcaagactccaactttaaaaaaaaaaaagagagaaaaaaggaataaaggaaggaaatggcactagggaaaggcacaaagatgacttccataaactttagttattttatgctaaaagaaaatctgatacaagcacaagatgatgactacgtagattagtatttctgggttgcatgttaaaaatatgaaaataaaaacggaaatagtttccaaaacaaagattttatatatgaaattagtgaaatttcagaatggagaaaggatggttacaataaatgttaggagccctctttaaagagctcaaatggtatgtaagtatttgggatttgtggtttaattagacctagttttcagcagtctttccatgaaatgtatttttgtatttagagagatcttggtaactcttgtaaagcagagtgtcctgctacattacataacttacctaagtaggtgtgcttttttttgtttttctagagacagggtctctgctctttcacccaggctgaagtgtagtggcaccatcatagctcggtgcaaccttgatttccagggctcaagtgatcctcccatctcggtctcctgagtagttaggactataggtgcaagccaccatgtgcagctttcttttttttttttttttggagagtcatggcctcgttacattgcctgtcacctagactggccagctggtcttgaacccctggcctcaagtggtcctcctgcctcagtctcccaaagtattgggattacaggcatgaaacactgctactggcctagataagaatttttatattgtttttggttgatttaagtgctgagaacttatttgcttcagaatagatctttggttgaaatgcagttcagttttgagactaaaaaataaaccagatttactcccaaaaatgttactgtttcaaataagtaaaatatttgcacctttaaagattaggagttggctgggcatggtggctcactcctataatctcagcactttgggaggccaaggcaggcagatcacctgaggtcaggagttcaagaccagcctggccaacatggtgaaaccccatctctactaaaaatacaaaaattagctggctgtggtggcacctgcctataatcccagctactcaggaggctgaggcgggagaatcgcttgaacccaggaggcagaggttgcagggtgctgagatcgcaccactgcagtccagcctgggtgatagagccaagactctgtctcaaaaaaaaaaaaaaaaaattgggagtcatatttatataattttatttctatttctgtaaggtctaatttttgagtatttctgaacatcaataatagaatctctgtccaattagaatttgtgccttgctcagtagttttcattttaatgaatgattcaaaagaatacattagcttaagttttgttttttttaataatattttagcaaagaatggctcaagaagtactgacacatttaaaggagcatcctgatgcttggacaagagtcgacacaattttggaattttctcagaatatgaatacgaaagtaagcaagtggtggttttaaaatctgttatttcttttcttccagtcataaactttgaggaaggtatctcatttttagtattagcatttgttatctcaaattattttatattgttaatttgtttcaaaatttagtcttaagcatataattaattcttgcaaatagtcctaagaattatgaatgaagttttgtaatgggactagtatgcaaggtggcttttttggttgtctgattttgtttttttctttttagtatatgtatacaggtctaagtagcataaattctgaatgttattcagagattaaacataacattaaggaattattttgggcaagtaatcaatataatacaggccaggcacctctgacaccaagttgtgtggacagcttaaaaccctactccatggcattgggcttctaatgggacagcactcagtttttatttacaatggaaaatgttataattctggtccttttttaagtttgaacagaagggttgatcaaaatgtgttttgtctgttttaggcttgatgattcacgcttctctttaaactgccttaaagtaataaatactatggcattctgtttaatacacgaaaggtttccacttgatatacattgtgttaaaacagaagatagccatattcacatctgtttctgaaaccagactttgttaattaacagttttaaaatattaattagttttgacatcttgtaaattttaggtcaaaaatacagtccagaacttcctcaaagtgctaaccttaagtaacataacagtgtttgcctgtttgcttgcctggtaaattttgctttttatactgacagacattactaatgtttaagttgatttatcaacagtatttttaaaaactcaaatttgtcttgtgaaaaatgagatgattagaggaacagaaagaaagcaacaggtaaagaattcttcaatttacataaattacaaatgatttggtgctaaatttatgcactatgacatttggcttttatgcaatcatttttttttctttaaagatgttaacactacctgatattaatcataatgttccattatgttgattgcttgtaataggaagaaaaggggtgtcttcctgtgcaactgacacagctaggctttgacggcaggcctccacaaggtctacccttttgattccctttaactgaattctgttcatcaattgtttttgtttcatgggcggtgggaggggaaaggggaattcaatgcataaaataagtatttctaagggctcagtagaaatttctaccatagggatcatttcatgcatttattttttcatttagtctttgctgttatctgtccctcatcttcataactcagcagtggatttctcaagtttggagatgtaaggcaaaagtataattcttcagaatgtttggattgtagtgatttatcattggctttcagatttgactgtcacttcagatttttgagcaaaaatactaaaaaaaaaaagaaaaaaaattctttgaagagacaggacctctgttgcccaggctggagtgcagtggtgtgattatagctcactgtaacctcaaactcctgggcttaagtgacatttctgcctcaactttctgagtagctagggctacaggtgcgtgtcaccatgcctcgctaacttaccaatttttttatagaagtggggtctccctgtgttgctcaggctgatcttgaactcctggccctcccgccttggcctccccaaaatgttgggattacaggcgagggccactttgcctggccccaaataacattttttcaaaggaatgtaaattttttttgttttagtttcataggcaaagtctttatgtctgggagagattggattttaggatattatagtaacagatgtattcctttgacctaacctgggcaaagcatttattgggctccctgcttcaacccccttggcagaaagatgaaatatgaattgtatcttcatcaagcttatgctacctttatacagttgtagaaaatacaggttagtaaatagtaattttaggtaacagtatcaaataggaagaagtaaataaaaaagaaaggacagtgtctttccattaaaaatgtaaaaaagtttggttaaataagatgaagttatctttaagatttttatttgtaactatatttatggtgggttttgtttcttagtgttttaaaggctttttaattgatttttggcaagaggatatattgtaagcagtgcattgctttgacttactgagtcttgacaatctgattttgtgcctataaaattaaagaaaatgcttagggtagtatgtttttaaaagctaattaagaacttcaggcatttggacaactctcttttttttacatatttctcagacctagacataataaatagatatgtttttaaaagtgaacaggttagaaagcatcactatttactgctgattatgaaacattttaatagcatcaaatttgtaattttagaattttgctttggccttgtttttattttgaaagtttttaaggaatgttctgcaaatgtagtactttagttgaaatggcaaaattttcttgaagagtgtgaaatgttaaaatgaaagaaaacagcaaaaacattcactgtttgagcacaatgtagtttgggacagtctatattgtgctttggataaaatgagcattcacatgatccctttggttgaaatactaatgctcctattttattgtgtaatgactaaccattttaaagatgaactcttattctcagccaaaacttgcaatctgaggttatatgtctatatatgaatgagcttacctttcagatattatagctgattcttccctaattctctcagttgaaatgtaccacaacggttttgtcccttttcttcctcctgcctatccacactaattggtcatagtaattcaggtagtaactcctggggctttataaattattataaatattgttgactatttagagtgagtaatcagcaggagggacaaaatggcttgaaagtggtatctctgttttttaattttttatacttttagttataactttcagtatttaggaagaaatacctgaaaggtagatacagattgcaacatgcgtttgtgattattttgactgtgcacaaaagtttatctttaaattagtagaaatagcaactataagggtggggttaaaatataaaataaacccatgggttgtcttgctgctccttaagtaacacaccagtgatgcttgtaaacactttctatagaaagtatctgtgacaatactttaatatttggccaaaagcttataactcctagaggatggtaggaagcttgatagcatccaagctgctaaattcttaggagcctgttcgtgttaaagtacgtgagcctatgagcagtcatttatgctgtgaattcatatctggctgctacttttccttcgacagataagcctatttggctgctaaagggctttttatttggttcttcctcctggtgtgagcatgtataaacagcaggacgttatatagagtagcaaacaataaaatgaggaaaatgcatgaaaactcagtatatgggtgaatagatacttgtttaatatgtgtaattaaacttggtagcataatgtttttgaaactttagatgtaaatgtgtgaatgtctgtccatttgtgaatcctgagagttgccagtcctataagcaatatattcacatgcttctattctccaattttcagtactatggactacaaattttggaaaatgtgataaaaacaaggtggaagattcttccaa

SEQ ID NO: 14944 - DNA, 382 bp, Homo sapiens
cggggttttgccatgttggccaggctggtctggaactcctgacctcaagtgattcgcccacctcggcctcccaaagtgctgggattacagtaatctatgccagcaattatgacaatgttagcagaccatgcagctcgtcagctgcttgatttcagccaaaaactggatatcaacttattagataatgtggtgaattgcttataccatggagaaggagcccagcaaagaatggctcaagaagtactgacacatttaaaggagcatcctgatgcttggacaagagtcgacacaattttggaattttctcagaatatgaatacgaaatactatggactacaaattttggaaaatgtgataaaaacaaggtggaagattcttccaa

SEQ ID NO: 14945 - DNA, 6776 bp, Homo sapiens
ggccgcggcaggagcagcgggagctacagcatcagcaagagcaacagtagctacagccccggcggcggtgcctgttccagtctttgctgctgcagtccgtgcaaccacccagagggggaggggggaaccaccagtcgctgaggaacaagagaaggggggaaagtttaggcgagccttgggggggggggggccagcgccggagccgcgtgagagagggagccgtgttttggtaggggggagtcggactgcaactggcagcagagcgtctccccggccgtgtggactctacaccccctactcctgccgcttctgctgctgcctgtggctggagggtccccctggggctgaatctttgggacttgaccccgttccctcccccttccctcactccccagccgggcgggagcatttattccccagattaattccccttttgggggggggcgggtgtgtgtgtgtgtgtgtgtgtgtgtgtgtgttgggggaagcgtccctgaaatagtaaatattattgagctctttttgcccttttcctgtccgtttttttaatttccttttttgaggtgggaaaactgaaacccaccttgattcgtcccctctcccccctccccaccttccctcgccctaatcccccaacgaggaaggaaggagcagttggttcaatctctggtaatctatgccagcaattatgacaatgttagcagaccatgcagctcgtcagctgcttgatttcagccaaaaactggatatcaacttattagataatgtggtgaattgcttataccatggagaaggagcccagcaaagaatggctcaagaagtactgacacatttaaaggagcatcctgatgcttggacaagagtcgacacaattttggaattttctcagaatatgaatacgaaagtaagcaagtggtggttttaaaatctgttatttcttttcttccagtcataaactttgaggaaggtatctcatttttagtattagcatttgttatctcaaattattttatattgttaatttgtttcaaaatttagtcttaagcatataattaattcttgcaaatagtcctaagaattatgaatgaagttttgtaatgggactagtatgcaaggtggcttttttggttgtctgattttgtttttttctttttagtatatgtatacaggtctaagtagcataaattctgaatgttattcagagattaaacataacattaaggaattattttgggcaagtaatcaatataatacaggccaggcacctctgacaccaagttgtgtggacagcttaaaaccctactccatggcattgggcttctaatgggacagcactcagtttttatttacaatggaaaatgttataattctggtccttttttaagtttgaacagaagggttgatcaaaatgtgttttgtctgttttaggcttgatgattcacgcttctctttaaactgccttaaagtaataaatactatggcattctgtttaatacacgaaaggtttccacttgatatacattgtgttaaaacagaagatagccatattcacatctgtttctgaaaccagactttgttaattaacagttttaaaatattaattagttttgacatcttgtaaattttaggtcaaaaatacagtccagaacttcctcaaagtgctaaccttaagtaacataacagtgtttgcctgtttgcttgcctggtaaattttgctttttatactgacagacattactaatgtttaagttgatttatcaacagtatttttaaaaactcaaatttgtcttgtgaaaaatgagatgattagaggaacagaaagaaagcaacaggaagaaaaggggtgtcttcctgtgcaactgacacagctaggctttgacggcaggcctccacaagtactatggactacaaattttggaaaatgtgataaaaacaaggtggaagattcttccaaggaaccagtgcgaaggaataaaaaaatacgttgttggcctcattatcaagacgtcatctgacccaacttgtgtagagaaagaaaaggtgtatatcggaaaattaaatatgatccttgttcagatactgaaacaagaatggcccaaacattggccaacttttatcagtgatattgttggagcaagtaggaccagcgaaagtctctgtcaaaataatatggtgattcttaaactcttgagtgaagaagtatttgatttctctagtggacagataacccaagtcaaatctaagcatttaaaagacagcatgtgcaatgaattctcacagatatttcaactgtgtcagtttgtaatggaaaattctcaaaatgctccacttgtacatgcaaccttggaaacattgctcagatttctgaactggattcccctgggatatatttttgagaccaaattaatcagcacattgatttataagttcctgaatgttccaatgtttcgaaatgtctctctgaagtgcctcactgagattgctggtgtgagtgtaagccaatatgaagaacaatttgtaacactatttactctgacaatgatgcaactaaagcagatgcttcctttaaataccaatattcgacttgcgtactcaaatggaaaagatgatgaacagaacttcattcaaaatctcagtttgtttctctgcacctttcttaaggaacatgatcaacttatagaaaaaagattaaatctcagggaaactcttatggaggcccttcattatatgttgttggtatctgaagtagaagaaactgaaatctttaaaatttgtcttgaatactggaatcatttggctgctgaactctatagagagagtccattctctacatctgcctctccgttgctttctggaagtcaacattttgatgttcctcccaggagacagctatatttgcccatgttattcaaggtaacagagcggttggttgagtgttcttcctgttgcatactgtggttttgaggtctgaatccaaatacttctaatctgtgtaaataaattagctataaaaagagaacccaacaacttctccatgagtgtggaaaactagaacatgaaaggagttgagtctagaaccttgattctcaagagtgtggtccttctctcagtatcaacattggttgtgatttcgttaggcaaattcattggccacctgccaatctactaaaccagagtctaggaatgagacacaggaaactcctgtaacagaagttggttaaaaaaatcacattaaaacacacttaaataattataaagccatttttgtagaattacagtgaaaaaaaattttttcttttggagacagggtcttgctctgtggctcaggttggagtgcagtggcgtggtcatagctcactacaatcttgaactcctagactaaagcaattctcttgtgtcagcctcccaagtaattggttgcaggcacacaccaccatgcctagcaaattttaaattttttagttttacttcatttatatttacatagttttttctgttgtgctttaagccccagtatttttattgttttagagattgggtgtcattttgtgttgctcaagctgctctcaaattcctggccacaacagttctttttgcctcggccctccggaatagttggaattataggcatgaatccctacacatggctggcttgtggtttttttggttttgtttgtttttaactaagcttctacactaatgatttcagtgatctaacgatttttttcttgattgatatattgttgagtataggtccgtttattaatggttagtcgaatggctaaaccagaggaagtattggttgtagagaatgatcaaggagaagttgtgagagaattcatgaaggatacagattccataaatttgtataagaatatgagggaaacattgggtaagttaataaatactgttaatctttacctttataaatctattctggggtggaaatacattttaggaaatgtacttgtagtttctaaatattttctaaatgtattgttactcatcaataaaattctgctcattatttgcatttgaaaccatgtttttctttgtagtttatcttactcatctggattatgtagatacagaaagaataatgacagagaagcttcacaatcaagtgaatggtacagagtggtcatggaaaaatttgaatacattgtgttgggcaataggctccattagtggagcaatgcatgaagaggacgaaaaacgatttcttgttactgttataaaggatctattaggattatgtgaacagaaaagaggcaaagataataaagctattattgcatcaaatatcatgtacatagtaggtcaatacccacgttttttgagagctcactggaaatttctgaagactgtagttaacaagctgttcgaattcatgcatgagacccatgatggagtccaggatatggcttgtgatactttcattaaaatagcccaaaaatgccgcaggcatttcgttcaggttcaggttggagaagtgatgccatttattgatgaaattttgaacaacattaacactattatttgtgatcttcagcctcaacaggttcatacgttttatgaagctgtggggtacatgattggtgcacaaacagatcaaacagtacaagaacacttgatagaaaagtacatgttactccctaatcaagtgtgggatagtataatccagcaggcaaccaaaaatgtggatatactgaaagatcctgaaacagtcaagcagcttggtagcattttgaaaacaaatgtgagagcctgcaaagctgttggacacccctttgtaattcagcttggaagaatttatttagatatgcttaatgtatacaagtgcctcagtgaaaatatttctgcagctatccaagctaatggtgaaatggttacaaagcaaccattgattagaagtatgcgaactgtaaaaagggaaactttaaagttaatatctggttgggtgagccgatccaatgatccacagatggtcgctgaaaattttgttccccctctgttggatgcagttctcattgattatcagagaaatgtcccagctgctagagaaccagaagtgcttagtactatggccataattgtcaacaagttagggggacatataacagctgaaatacctcaaatatttgatgctgtttttgaatgcacattgaatatgataaataaggactttgaagaatatcctgaacatagaacgaactttttcttactacttcaggctgtcaattctcattgtttcccagcattccttgctattccacctacacagtttaaacttgttttggattccatcatttgggctttcaaacatactatgaggaatgtcgcagatacgggcttacagatactttttacactcttacaaaatgttgcacaagaagaagctgcagctcagagtttttatcaaacttatttttgtgatattctccagcatatcttttctgttgtgacagacacttcacatactgctggtttaacaatgcatgcatcaattcttgcatatatgtttaatttggttgaagaaggaaaaataagtacatcattaaatcctggaaatccagttaacaaccaaatctttcttcaggaatatgtggctaatctccttaagtcggccttccctcacctacaagatgctcaagtaaagctctttgtgacagggcttttcagcttaaatcaagatattcctgctttcaaggaacatttaagagatttcctagttcaaataaaggaatttgcaggtgaagacacttctgatttgtttttggaagagagagaaatagccctacggcaggctgatgaagagaaacataaacgtcaaatgtctgtccctggcatctttaatccacatgagattccagaagaaatgtgtgattaaaatccaaattcatgctgttttttttctctgcaactcgttagcagaggaaaacagcatgtgggtatttgtcgaccaaaatgatgccaatttgtaaattaaaatgtcacctagtggccctttttcttatgtgtttttttgtataagaaattttctgtgaaatatccttccattgtttaagcttttgttttggtcatctttatttagtttgcatgaagttgaaaattaaggcatttttaaaaattttacttcatgcccatttttgtggctgggctggggggaggaggcaaattcgatttgaacatatacttgtaattctaatgcaaaattatacaatttttcctgtaaacaataccaatttttaattagggagcattttccttctagtctatttcagcctagaagaaaagataatgagtaaaacaaattgcgttgtttaaaggattatagtgctgcattgtctgaagttagcacctcttggactgaatcgtttgtctagactacatgtattacaaagtctctttggcaagattgcagcaagatcatgtgcatatcatcccattgtaaagcgacttcaaaaatatgggaacacagttagttatttttacacagttctttttgtttttgtgtgtgtgtgctgtcgcttgtcgacaacagctttttgttttcctcaatgaggagtgttgctcatttgtgagccttcattaactcgaagtgaaatggttaaaaatatttatcctgttagaataggctgcatctttttaacaactcattaaaaaacaaaacaactctggcttttgagatgacttatactaatttacattgtttaccaagctgtagtgctttaagaacactacttaaaaagcaaaataaacttggtttacattta

SEQ ID NO: 14946 - DNA, 12156 bp, Homo sapiens
ggctttccttcgctctcttttctactcatccctgctcttcgtcccacctcctcctcctccacccctctcctcttgcctttcgaccctccccacttcccctcccccactctgcgggcaaatcgctgctgaaaagaggtaggggccgaagcggcgggctcgtgtggagccgtgaggcgggattgactggcgctcgggccaatgagagataggctcatggcgcggctgtagctggaactgaccaataggagggcgggctgggggcggaggcccaggttccaaacgctccgcggcgccatgggctgaaaactcaaccgagatggaatctcccagtctgaaccggtttcaaccggttccgagtttgaggcactaggaggagggggagaagcggctgcagcggccgcggcaggagcagcgggagctacagcatcagcaagagcaacagtagctacagccccggcggcggtgcctgttccagtctttgctgctgcagtccgtgcaaccacccagagggggaggggggaaccaccagtcgctgaggaacaagagaaggggggaaagtttaggcgagccttgggggggggggggccagcgccggagccgcgtgagagagggagccgtgttttggtaggggggagtcggactgcaactggcagcagagcgtctccccggccgtgtggactctacaccccctactcctgccgcttctgctgctgcctgtggctggagggtccccctggggctgaatctttgggacttgaccccgttccctcccccttccctcactccccagccgggcgggagcatttattccccagattaattccccttttgggggggggcgggtgtgtgtgtgtgtgtgtgtgtgtgtgtgtgttgggggaagcgtccctgaaatagtaaatattattgagctctttttgcccttttcctgtccgtttttttaatttccttttttgaggtgggaaaactgaaacccaccttgattcgtcccctctcccccctccccaccttccctcgccctaatcccccaacgaggaaggaaggagcagttggttcaatctctgggtaagtcgactgtgtcttcggggccgagggtcgggcggcggcgcggccgggcgggcgggaggaggccggcgtggggcgcggcggcggcggccgcgggaagcgagcccgggaggcggcgggcgggccgggggcgcggcgggcccacagcggagcctgcgattgaatggagccgcttttgccgctgggggatggaggcggggaggcggcctcgggaggggagcgcttgctgggtcattcgcgtgtgcgggtggcggtggaggaaggcgaggagtgtgatagtgaagcggggccccgcgcggggtgggaggggttccccagcccctggggctggggagaagttggggtgatttcaggaacatctctgtaaattattaggagtggaagtttccagaaatatttagtgcagcagcattgaaacgtccgcctgcatcacgtggccccctcggtggagagcttgggatgggggagggaggggctgccgactccctgttcctccagcaaggaaactcgaaagctctccggttttgcagagtggcatgtgaagtaggaaagatcagtttttcaggggcctgcacatgggattccgtcttgtagttccttttcaggggtttgaatgtgataagttggttaaaccatttactgttggccttgtacagtggaggatgccctgattctccttcattccgatgtctgtgagtttgggttgggtgggaggaagtggtgtagtagaggaagcattcagtactggctcagcccggacctcctctgatcacgccgaggccatgctgcatagagaaaggggcggtgaacttaaggcgcctggtctaaatgcctcctccgagtaagggcggggtgagtgcgtgctcctgtgtgctatagttagaagggctgcaaatcggttcgggtgggaagcgaggggagggcgggccctaatgaggtgtgtttttcctgaatgaagcgggcgattgcccacacaacctaaggagcagtctttcgccttgtagcgacttgtttttcacctagtgtgaagttattaagcaacggttatgattttctgggttttgtttaggaattggcattgggtgtcacttgtagagtcacattatccattaagctggataatccctagtgtatgttatccagtgagtggattttaggattgaagagcccaatgggaatgagcgttcgtggttacacctctcgcactatggcttgtttgctgtctgattgtatatcttaagtgtgggacactgctgttagtggaaagaatgttttggaagcggtttgatttgggggactaaatgtgcttggcattgaccacaaagccgccatttctgtactatgtacagttcaggaataggtaggtgatttcgaagatagccgctagttctaaggatggcaaactactgtatttaaatccttctattctaaatctcgtttttcacatcagtctagttcggagaattttataagaacagtgtatttgaaaatgaaacttgtaagagtcattttcttaatccttttttgttttagcattcaactatggtagtaaataggtgaaaagtttgttcaatatttaaccgaaatatttgaaaacttttgatacatggatcttggtgctttgtggacattgcttttaagcctcaaataattaagattgttctgatcttttaaattttatggtacttgaaggtggaggagagtttacacattcatttgtggaatatatatttcctctcagtatttagatcttaaggtttttttgtggtgtgtaacaagtattctgctgtttaaaaacgtttgtttaatgcctactacgaaacgttttgaagtctcatcagttttgtcaataatggaccaattcttgaactcctaatttcttgagttttacattatttttacatcatatcaatcataggtgactcatcttttggagttctaatctgttgtaacagacgttatatttaaataagacaattgcattaaaatagaatttgctgccattattgttatggacatttttaagctgttataaaatagccaggaattaatgactttttttccgccctgccaagctagtttgtctaaatataatgtaaagaaattagctactcattttctggtccacgaaagttcctaaaatgggaagaagtggagatctgaccttgttagttctaaatacactaaactgggagtgccatggatggctttcaggatgtcctgaatcctctataattgtatacaaaatcgtgagtttttaaaaactgggttagagctattggttcctcagagtctcaggcatcttagacccccaaaaaggttaaggactactgacttaaccaattaggtttgagtggcattggctttgaagaaaagcagaggaaagatatattttataattctgggcaacaaaaaagtggatgtgtgccagcatcttagagtagaatcctcttaaaaggatagcactgcatatgaactagtaggttttaaccagtgcatatttaggcgaagtagctcatttttctgttagaattcttttttatttgggaatgggcaagcttttacagcttttaccttgccaatgaatacctggaatttaaaaaatcttgttaggcatattgcccataaagttttttttcctagatcatatattcagtaaatatgtttgtagctttatttcaatcccccaattcattgagggttgaaacaatttgaatggtttgagtgtagaagctaagttatttctgtagaggctaagggcatttataccaagatatgttagacttgtggttcctgctaaccattgctgtagacaataggaattactgtatatccacattttaatttttaacatcattctgtctttgtttgtttgtttttgagatggagtctcattctcttgcccaggctagagtgtggtggtgcatctcggcttactgcaaactccgtctcctgggttcaagcagttctcctgcctcagcttcccaagtagctgggattacaggtgcccgcctccatgcctggctgatttttgtatttttagtagagacggggttttgccatgttggccaggctggtctggaactcctgacctcaagtgattcgcccacctcggcctcccaaagtgctgggattacaggtgtgagccaccacgctcggcccattctgtctttatagcattatttttataaagttaagataatgtgaagtgagcttttactgagttattcagaagaccctacttgggaagaaaagaaaatcacattcacttgaacttaatcctacttgcttaaaaagttttgacatcaagatactgaactgtatcacgttttaggaccataaaatcctaatagtggatgcgtttaaataataggttagcatactttataaatgttagtagaataggaaagtcttcctggtgtataaactaaacactagaaaagttgaatggaccataataatttatgtaattatcaaatagctaagtaatttcagcttttgttacttgcttttactatctcagttttctgtaattaaagtctctaaagtattcattaaaatatttgtaataacatggttgaagtaaaataacttgtaggaagtttttgataataccaaaacttgataggcagcttcaattttttttctttattttcagtaatctatgccagcaattatgacaatgttagcagaccatgcagctcgtcagctgcttgatttcagccaaaaactggatatcaacttattagataatgtggtgaattgcttataccatggagaaggagcccaggtaaagtagccaaccaaaactttataacattatgacagtgtaacagagttgttgggtttagaataaaattttaaattatcacctttaaaaaagatattccatagtttgcattaatttggaattctgtattaaccataatgaaaattggtttggagaaagaaattgcatgtttgacatggttagagtgggttgttttggaatattatacttgttttgtccttaagagccaaatgttattaaatactttgtaggtattaaaggttctctgtacttttatatatacttaatatgtttggcactaatacgattcttctacttttaaaacatttacagaagtacttcacagatatgtttgtttaaataaaaacaggaataccaagtatttttatgttagttgaattttgtgcacttttcaaagtggtactgttaatgtagggaattatcttaaacataaaccaaattttgatcagtttaagatttttggtttttttgaacccaactaaaaggtgaaacagaaatgtgtgtacaattttaaattgtatatgtcacaagaaaaaaaacttgattttttacctgtggggccaaacttttttttgagacagtctcgctctgtggtccaggcaggagtgcagtggcgctatctcagctcactgcaacccctgcctcctgggttcaagcgattgtcttgcctcagcctccctggtagctgggattacaggcacacgccaccatgcctggctaatttttgtatttttagtagagatggggtttcaccgtgttggccaggctggtcttggaactcctgacctcaggtgatccacctgactcggcctcccaaagtgctgggattacaggcatgagccaccgcgtgctggcccaaacatgtttttgaatgagtaaaaagttttgcagttgggtcagaaatcttttttttttttcagatggagtcttgctctgtcaccaggcctgagtgcagtggcacagtctcggctcactgcaacctctgcctcccaggttttcaagcaattcacctgccttagcctcccgagtagctgggactacagacgcgccaccatgcccagctaattttttgtattttagtagagatgggtttcatcatattggccaggatggtctccatctcctgacctcgtgatccgcctgccttggcctcccaaagtgtggagatgacaggcatgagccaccgcgcctggccagaaatcttttatggtagttttgttgccagaacagtagatttctggttagataaatgttcagctagtagatgggaggttacttatattgtcaagatatttatatttgcataattaagaaactgagtgccggccgggcgcggtggctcacgcctgtaatcccagcactttgagaggccgacgccggcggatgacgaggtcaggagatcgagaccatcctggctaacacggtgaaaccccgtctctactaaaaacacaaaaaattagccaggcgtggtggcgggcgcctgtagtcccagctactcgggaggctgaggcaggagaatggcgtgaacccgggaggcggagcttgcagtgagccgaggttgcgccactgcactccagcctgggcaacggcatgagacttcgtctcaaaaataaaaataaataaataaaataaaataaaaaaacctaaacctgagtgccattacactttctgaaaatatataaggtggatacagtactatcttttatagtagtccaaaaagcatcatgtataaatgtttccattcccttatgaaatgcaacagtactgcttttactatagtagaaacttgaaaaaggtccatggaaacgctaaaagtagaaaaaattactcttgcagtgattctgtaagcttgttagcccaggtttatacttttagggcgttttgatcagtatattatctcctaaagcattcttgaaaaaattaaccatccgtatttattatccctgtcatttagttgttactcatgctatacattcaacatgaagctttaagcttcatttcttctagcatggatgcatagaaagcagctgcttttggaggaagctatgaaagtaaggttgggttcaactctgaatgtaatattggaagcacaggtctgtagccattgggaaaaagggcatttaattttttccgcatagattcagctactaatactgtttaatcttcacactaaactagttcactacatctaaaggtatgataaataaaccaacatagagcagtgttcttcatggcttgtaacagaattagtggcaatttttgtaattgagaatatattacagcaatactgcttttaataatgtttcatagtattaagaaatttaatggtttgttttaaaattgacttgttaataaaaagtagattaagaaaagtgtttctaaatttttttgtttgtaaggacaataggttaactttcccaaagtaaaaggattttgtctgcagtagttaatagatcatgtgacaaaatcagttgcgtagaaataactagcaaacttattttgtattataaatgaagaaacaagatttagagcttaaagctggttaaggagtccttttggtctctaaaagtcctatgtcgttagttcagtctacttttcgtttaccacctccttgggggtcttatttcaaaggaaaaggagtagtagtagcagcgagctgctatagtggaaaacatgatttttagtgttagacgtcttaatttgattcttggaagctctctctagtcattgcttaagtcccatgtacaaatatgacctgtcctacaagagattggagggttagttatgaggtttaaaagcacctattacagtgcttgataggtagaaggcactcagcttaaagggtacatttagcagtataatgaaaatgatttagcatatgtgatactcattgcttaaaattaaaaaaattttttttttgctactcataaaatatgcactaatgacaagaaaaatttattatgctaattaagcttttaaagtcaactgggaaaaaaagctgtaggtaggtttttttttttttaaaggaatgtgtaacttgggggaggggaagaaattatttacaagggtgacttttaatctgtagacagaacttctgcatacatggttagtatagtaggatatttagcagtgtaacattaggactaccctctaccctctgttatcagcatttttctatttttagccaagtagacagctagaaaaaagatgcgggaagagttggatgttttctccaatattgtgttctgttaaagatcttgaactctattgcttagcaactaaaatgctttcaccattcagttagtagtacaagggagatgctaggttttctctctttagtttgcttttgtgtcttttttttttaaacccctgctggggttttaagtttataaagaacattatgtaagaatggtgggattagaataaatcagaatgcaaatactagaagtagcatcagagagtaaaattacaactaacaggaaagaatattatttatgtagcgattgatgtgagtggtgatagtgtgggaagtatttgattctgtgtagaatgcttatcacttcaaagcatctgacaaaatggtaacttgaccaagtaacttttactgtgtgaggatctttgatacaacttttcctctagttagataaggttatctagctagatattctcagggagaagaccaaaacactgctaaaatgtgctttggccctagataagccacatcattattctttcggccttctgtcatttctcatatgacacattatgcccatcagtcctttaatgaaatcaaatagaaatgtgtatgattgtattttaaagtatacacattaactcttgtaaccacagactcacaatggaagcaggcgtctgatcttttcaggcaaccacagtggttctggtgggtttctgggtagagaacaaccatataagttattgagtgtgtagcagtgtgttttcctgattgatgtatgggatagtcatgaatgtggtattgtatttcctacctgaggaaaaggtcatgattaaaataaagcatcaaagccaggataagcatataatttctttctttttttttttttttgtaatgagacagagtctcactctgtagcccaggctggagtgcagtggtgtgatctcaaatcactgcaacctccgccttccgggtcctggttcaagcaattctcctgcctcagcctcctgagtaactgggattacaagtacgccccaccatgcccagctaatttttgaatttttagtagagacggggtttcaccatgttggccaggctggtcttgaacttctgacctcgtgatccacccaccttggccacccaaagtgttgggattacaggcgtgagccacggtgcccacccgagcatacgattgttttaaaaaagactagaataaaagccaagctaaagattataaggtatctttgtcagaaatggttgtgagagtgcttcctaccctgtttttgatgctttattgtttataaccatagaattaaacccatgataaagtaaagtataagagaaagataactgacagattttaaagtcatcaaacttttttcttgctctgtcacacaggctggagcacaatggcttgatcacagctcactgcagccttgacttcccaggctcaatcttcccacctcagcctcctgagtagctgggaccataagtgcgtgtcccaccacacctggctcattattaatttttctttgttgcccaggctggtcttgaactcctgggattacagacatgagccaccacacctggtccaaactttttgcttacaacttttaatagaaataggtaaaagaaataggaaggatctaattgagttataaaacaacctttaaagatacaaaagtgaaaaagattaagccattgctttttgtcaatagaattaaaagctgttggtaaaaatattaatgtatgaaaaacttattgaaatgaaaaaactatatatatatatatatatatatatatatatatatatatatatatataaataaaatgtcgacatggctggatcttaaaaactgtcaaatgaaaaaaactaattgcaggaaagattttttttttttttttgagagggagtctcacgcagtcaacccaggttggagtgcactggggcaatcttcctgattcttggggaatcttggctcactgcaacctccgctcctggattcaagcgattctcctgcctcagcctcccgagtagctgggactataggcgcacgccaccattcccggctagtttttgtatttttagtagagatggggtttcgccatattggtcaggatggtcttgaactcctgaccttgtgatctgctcacctcggcctcccatagtgccaggattacaggcgtaagccaccgtgcccagcctaaaagatttttaagtatactattaacataaaatttggtagccgtacaaccctattcatgaaatttacacacatgccgtgaaaatgtggacaggaaaagacacactaagttcatgatgaaagccattactttttaaagaaggaacaaaggtgtaatcccagcactttggggaggctgaggcaggcgggtcacgaggtcaggagttcaagaccagcctggccaatacagtgaaaccctgtctctactgaaaatacaaaaattagccaggcgtggtggcaggtgcctgtagtcccagctacttgggaggctgaggcaggagaattgcttgaacccgggaggtgaaggttgcagtgagtcgagatcctgccattgcactccagcctgggtgacagagcaagactccaactttaaaaaaaaaaaagagagaaaaaaggaataaaggaaggaaatggcactagggaaaggcacaaagatgacttccataaactttagttattttatgctaaaagaaaatctgatacaagcacaagatgatgactacgtagattagtatttctgggttgcatgttaaaaatatgaaaataaaaacggaaatagtttccaaaacaaagattttatatatgaaattagtgaaatttcagaatggagaaaggatggttacaataaatgttaggagccctctttaaagagctcaaatggtatgtaagtatttgggatttgtggtttaattagacctagttttcagcagtctttccatgaaatgtatttttgtatttagagagatcttggtaactcttgtaaagcagagtgtcctgctacattacataacttacctaagtaggtgtgcttttttttgtttttctagagacagggtctctgctctttcacccaggctgaagtgtagtggcaccatcatagctcggtgcaaccttgatttccagggctcaagtgatcctcccatctcggtctcctgagtagttaggactataggtgcaagccaccatgtgcagctttcttttttttttttttttggagagtcatggcctcgttacattgcctgtcacctagactggccagctggtcttgaacccctggcctcaagtggtcctcctgcctcagtctcccaaagtattgggattacaggcatgaaacactgctactggcctagataagaatttttatattgtttttggttgatttaagtgctgagaacttatttgcttcagaatagatctttggttgaaatgcagttcagttttgagactaaaaaataaaccagatttactcccaaaaatgttactgtttcaaataagtaaaatatttgcacctttaaagattaggagttggctgggcatggtggctcactcctataatctcagcactttgggaggccaaggcaggcagatcacctgaggtcaggagttcaagaccagcctggccaacatggtgaaaccccatctctactaaaaatacaaaaattagctggctgtggtggcacctgcctataatcccagctactcaggaggctgaggcgggagaatcgcttgaacccaggaggcagaggttgcagggtgctgagatcgcaccactgcagtccagcctgggtgatagagccaagactctgtctcaaaaaaaaaaaaaaaaaattgggagtcatatttatataattttatttctatttctgtaaggtctaatttttgagtatttctgaacatcaataatagaatctctgtccaattagaatttgtgccttgctcagtagttttcattttaatgaatgattcaaaagaatacattagcttaagttttgttttttttaataatattttagcaaagaatggctcaagaagtactgacacatttaaaggagcatcctgatgct

SEQ ID NO: 14947 - DNA, 318 bp, Homo sapiens
ggctttccttcgctctcttttctactcatccctgctcttcgtcccacctcctcctcctccacccctctcctcttgcctttcgaccctccccacttcccctcccccactctgcgggcaaatcgctgctgaaaagagtaatctatgccagcaattatgacaatgttagcagaccatgcagctcgtcagctgcttgatttcagccaaaaactggatatcaacttattagataatgtggtgaattgcttataccatggagaaggagcccagcaaagaatggctcaagaagtactgacacatttaaaggagcatcctgatgct

SEQ ID NO: 14948 - DNA, 29525 bp, Homo sapiens
agaatggctcaagaagtactgacacatttaaaggagcatcctgatgcttggacaagagtcgacacaattttggaattttctcagaatatgaatacgaaagtaagcaagtggtggttttaaaatctgttatttcttttcttccagtcataaactttgaggaaggtatctcatttttagtattagcatttgttatctcaaattattttatattgttaatttgtttcaaaatttagtcttaagcatataattaattcttgcaaatagtcctaagaattatgaatgaagttttgtaatgggactagtatgcaaggtggcttttttggttgtctgattttgtttttttctttttagtatatgtatacaggtctaagtagcataaattctgaatgttattcagagattaaacataacattaaggaattattttgggcaagtaatcaatataatacaggccaggcacctctgacaccaagttgtgtggacagcttaaaaccctactccatggcattgggcttctaatgggacagcactcagtttttatttacaatggaaaatgttataattctggtccttttttaagtttgaacagaagggttgatcaaaatgtgttttgtctgttttaggcttgatgattcacgcttctctttaaactgccttaaagtaataaatactatggcattctgtttaatacacgaaaggtttccacttgatatacattgtgttaaaacagaagatagccatattcacatctgtttctgaaaccagactttgttaattaacagttttaaaatattaattagttttgacatcttgtaaattttaggtcaaaaatacagtccagaacttcctcaaagtgctaaccttaagtaacataacagtgtttgcctgtttgcttgcctggtaaattttgctttttatactgacagacattactaatgtttaagttgatttatcaacagtatttttaaaaactcaaatttgtcttgtgaaaaatgagatgattagaggaacagaaagaaagcaacaggtaaagaattcttcaatttacataaattacaaatgatttggtgctaaatttatgcactatgacatttggcttttatgcaatcatttttttttctttaaagatgttaacactacctgatattaatcataatgttccattatgttgattgcttgtaataggaagaaaaggggtgtcttcctgtgcaactgacacagctaggctttgacggcaggcctccacaaggtctacccttttgattccctttaactgaattctgttcatcaattgtttttgtttcatgggcggtgggaggggaaaggggaattcaatgcataaaataagtatttctaagggctcagtagaaatttctaccatagggatcatttcatgcatttattttttcatttagtctttgctgttatctgtccctcatcttcataactcagcagtggatttctcaagtttggagatgtaaggcaaaagtataattcttcagaatgtttggattgtagtgatttatcattggctttcagatttgactgtcacttcagatttttgagcaaaaatactaaaaaaaaaaagaaaaaaaattctttgaagagacaggacctctgttgcccaggctggagtgcagtggtgtgattatagctcactgtaacctcaaactcctgggcttaagtgacatttctgcctcaactttctgagtagctagggctacaggtgcgtgtcaccatgcctcgctaacttaccaatttttttatagaagtggggtctccctgtgttgctcaggctgatcttgaactcctggccctcccgccttggcctccccaaaatgttgggattacaggcgagggccactttgcctggccccaaataacattttttcaaaggaatgtaaattttttttgttttagtttcataggcaaagtctttatgtctgggagagattggattttaggatattatagtaacagatgtattcctttgacctaacctgggcaaagcatttattgggctccctgcttcaacccccttggcagaaagatgaaatatgaattgtatcttcatcaagcttatgctacctttatacagttgtagaaaatacaggttagtaaatagtaattttaggtaacagtatcaaataggaagaagtaaataaaaaagaaaggacagtgtctttccattaaaaatgtaaaaaagtttggttaaataagatgaagttatctttaagatttttatttgtaactatatttatggtgggttttgtttcttagtgttttaaaggctttttaattgatttttggcaagaggatatattgtaagcagtgcattgctttgacttactgagtcttgacaatctgattttgtgcctataaaattaaagaaaatgcttagggtagtatgtttttaaaagctaattaagaacttcaggcatttggacaactctcttttttttacatatttctcagacctagacataataaatagatatgtttttaaaagtgaacaggttagaaagcatcactatttactgctgattatgaaacattttaatagcatcaaatttgtaattttagaattttgctttggccttgtttttattttgaaagtttttaaggaatgttctgcaaatgtagtactttagttgaaatggcaaaattttcttgaagagtgtgaaatgttaaaatgaaagaaaacagcaaaaacattcactgtttgagcacaatgtagtttgggacagtctatattgtgctttggataaaatgagcattcacatgatccctttggttgaaatactaatgctcctattttattgtgtaatgactaaccattttaaagatgaactcttattctcagccaaaacttgcaatctgaggttatatgtctatatatgaatgagcttacctttcagatattatagctgattcttccctaattctctcagttgaaatgtaccacaacggttttgtcccttttcttcctcctgcctatccacactaattggtcatagtaattcaggtagtaactcctggggctttataaattattataaatattgttgactatttagagtgagtaatcagcaggagggacaaaatggcttgaaagtggtatctctgttttttaattttttatacttttagttataactttcagtatttaggaagaaatacctgaaaggtagatacagattgcaacatgcgtttgtgattattttgactgtgcacaaaagtttatctttaaattagtagaaatagcaactataagggtggggttaaaatataaaataaacccatgggttgtcttgctgctccttaagtaacacaccagtgatgcttgtaaacactttctatagaaagtatctgtgacaatactttaatatttggccaaaagcttataactcctagaggatggtaggaagcttgatagcatccaagctgctaaattcttaggagcctgttcgtgttaaagtacgtgagcctatgagcagtcatttatgctgtgaattcatatctggctgctacttttccttcgacagataagcctatttggctgctaaagggctttttatttggttcttcctcctggtgtgagcatgtataaacagcaggacgttatatagagtagcaaacaataaaatgaggaaaatgcatgaaaactcagtatatgggtgaatagatacttgtttaatatgtgtaattaaacttggtagcataatgtttttgaaactttagatgtaaatgtgtgaatgtctgtccatttgtgaatcctgagagttgccagtcctataagcaatatattcacatgcttctattctccaattttcagtactatggactacaaattttggaaaatgtgataaaaacaaggtggaagattcttccaaggaaccagtgcgaaggtaggaaaataaagaattataaattcagagttttgtttttcctggcatttttattgtagttgactgtttgagggggcatgtaatgaatctttagtatattttgctctaatggagcttattgcttttatcatgaagcaaacaggtctgtttgtattggtgggtacaggaaggccacttacaggttatcttttgggagaaagaggagactggactgttgaaaactctgacaataaatattctagttaaaaatatgggctatggcacagtggcccacgcctgtaatcctaacacttcaggaggccgaggcaagtagatcgcttgagtctgggagttctataccagcctaggcagtatagcaagacctcatctggacaaaaatttaaaaaattagctgggtatggtggttcatgtctgtggtcccagctatgtgggagcattgcttgagctcaaaaggtcgagactgcagtgagccatgatcctgccactgcacttcagcctgggtgacaagagtgagaccccatctccaaaaaaacatatatataaataaaatatgggccgggcacagtggctcaagcctgtaatcccaggacttcgtgaggctgaagtgggagggtcatttaaggccagaagtttgagaccatcctgggtaacatagcgagaccctgtgtttacaaaaaatttaaaaattagccaggtattttggtgcaggtggcggcggggacaggggtatcagtggggtgaggtaggaggatcccttgagccaagaggttgagactgcagtgagccatcattgtgccactgtactctagcctgggcaacgagcgaaactccgtctcaaaaaacaagaacaacaacaacaaaaaaaaccatatgtaaggttaactcgggaatggaaaagccaagtactaaagatcacaaagctgttttgccttttgtggttctgggaatgccttggaagaggttggcttctgaaatgaagaaagatcagaaaatgaaggtgtagtgatacctgttaatgagtaatttaacttttctgtctgtgctaccttgaggaatgtagtcatattttgagaaacctgaggcaacattagtttcttgggattctttgatttagctaatttcagttatgatacactgcctttttacctactatatttcatttatctctgaaaaatagaaatttttttcttgactttattatggggcacatgatacttctagtagtattttcatttaaaatatgtctaatttctttgattatttgtcttttaagtattgtccttcacctgcattctcttatcatcattatggtagaatagtgacatggatttacttagctaatctgacttaaaccttgacaaagtttgagcacatttagagttgaatgtgatgagattttaatgccagtgtctttttttaagaatattaagtatattcagtggcaatatctttaatacatcataaatcatagattaagagtgatagtgcaggagcaaataatgtgccctaaaagaggttctcatttctttaaatgttttattatggtttgaaactattttagatcacgttctgtgatggactgagaaattaataagcacaatttgactatgtggtccaagtaggtccttcatactttattcttcagggatctttagtgtagtcattccttgtttctttactactattgttttactcatgtgttatgagccccagatttaattttggccatggtctgccgtaccaagaaaaggtgatttacttctgtcccattttactgttgtataattttaaatcctccttttgttcttaaatctgcatctctgttttttatcacatttgatggttctggaagatgttttccaggttgaaaatagatatgattatactagtttatcaacactgtagttacatttgttacagacaaaattaatttaaaaaatttttgtttctttctttcttctttgttgagacagattctcactctgttcctcaggctggagtgcattggcaccatcactgcagcttcaaatagctgcggtcaagcaatcctcccacctcagcctcccgagtagctgggaacataggcatgccccaccatgccctactaaattttttttttttttaatgttttgtagggatggtgtctcgctgtgttgcccatgctgctggctgctgggcttgagcaatcctcccaccttggcctgccagagtgctgggattgtaagcatgagccaccatacttagtcaacatgattacctttttaattttaactgggaggcttctctaacctaaagatttatttcacaaaatacactagaacttctgaacattaattttccttcatctttaagtaactttggtattggaaattacataaattaatttaaaacattttatttcctttttctgtaagtgtcctgtcttttaaaggtattcgctttgctttttgctgtagctataccctttgtccaactaccatagcatatatatttgttcacctggggtgcatattgtgcgtttcctttgtaccgattactactaaatattaaggttataaaaatatacatgtacatcaaagtgctgtatgtcacagtgttatagttgggaagacaaaacacatgtaaaagaggaatcataaatcagcaaattaggtgtatataatgagtgcttcacaagctaaaagaacagaatgatgtctaagtccggccctttagctaagtttcattcacataattggaaagaaatgcctggtatattttaaaggaaggaaaggtttcactgcataagagtatgccaaaattagattcctgcattttttttctgatgtagaatttgttttatctgcttttaggttcttgtccacagcatgttaatttttacgtggtgtttttttttttttttttttttttttgagacggagtcttgctctgttgcccaggctggagtgcagtggcgcagtcttggctcactgcaagctccacctcctgggttcatgccattctcctgtctcagcctcctgagtagctgggactacaggcacccgccaccacacccagctaattttttttttttttttttagtagagatggtttcactatgttagccaggaaggtctcgatttcctgaccttttggtcctcccgcctcggcctccatgcctgttgagattacaggcatgagccactgcctggctaacatgttcttttaaattaatgacattttcaatttaggcctcttgtataaatactgtcaggaaaatctcatgattcttgagtgggttagatgtctcttgctgtgttatacgttactgtatcctgtaccagtgggtcacaggagaataaaattttaaagagcaaaagataggctcagcacggtggctcacgcctgtaatcccagcactttgggaggccaaggcaggcagataacgaggtcaggagtttgagaccagtcttaccaacatggagaaaccctatctctactaaaaatacaaaaattagccgggcgtggtggcacatgcctgtaatcccagctactcaggaggctgaggcaagagaattgcttgaacccgggaggcggaggttgcagtgagctgagatcacgccattgcactccaacagagcgagacttcatctcaaaaaaaaagagcaaaagatagacataattagaaagtaaggatgtttaaaagaacatttaattttccaaaagatatttttatagcaagagaaatggcgagataataaaacatttaaataagttgagatttgttatataaaatttattacatttctctggattttcatttagctttaggccgtaagtgtgtgtctatttgtttgtgttttatgtgttttgtccctcacaccccacattacacttggctgttttagtcactttattccccatccttcaaactataagctccttgatattggggctcagagtgtctttttttctttggtttttttttggtctgtttttgtgtttgtttttgtttaagacagagtctcgctctgttgcccaggctggagtgcagtggcgtgatctcggctcagtgcaagctctgcctcccggtttcacaccattctcctgcctcagcctcctgagtatctgggactgcaggcgcctgccaccacgcccggctaactttgtgtgtgtgtgtgtgtgtgtgtgtgtgtgtgtgtgtgtgtgtgtgttttgttttttgttttttgtttttttttttagtagagacggggtttcaccgtgttagccaggatggtctcgatctcctgacctcgtcatccgcctgcctcggcctcccaaagtgctgggattacaggtgcgaaccaccgcgcctggctttttctttgttttttaaagatgtagggtttcactctgttgctcaggctggagtacagtggtgcaatcatggttcactgcagcctggaactcctgggctccagtgatcctcttgcctcaggctttttttcttttttttttgtgagacagagtccctctctgtcacccaggctggagtgcagtggcgcagtcttggctcactgcaccctctgcctcctgggctcaagtgattctcatgtgtcagtctcccaagtagctgggattacagatgcacaccaccatgcctggctaatttttgtatttgttttagtaaggacagggtttcgccatgttgaccaggctggtctcgaactcctgacttcaggtgatcctcaccctcccagagtgctgggattataggcgtgagccattgcatcctgccctcttgcctcagccttgagagtagctagcactgtaggtccgcaccaccatgcccagctaattaaaaaaaatttttttttttagagatagagtctcactgtgaagcccaggctggttttaaactcctgggtttaaagcagtcttcctactttgccgtcccaaattgctaccaagcctggctgggaaattttaatatgtcaaatggaagaattccctaataaagagtggttgctattcatggtagtcttttatttattcatttgttttgagacaagatctcactgtatcacccatgctggagtacagtggcacaatcatagcacactgcagccttaaactcctgagctcaggcagttaccacgccttagcctgccaaaatagctaggactacaggcatgtgccaccacacccagctaagtttttctaattttgatagagacacagtttgcctatgttgtccaggcttgtcttgaactcctggcctcaagtgatgctccaacctcagcatcccaaagtgctggggttacaggtatatcaccactcctagccatcactgaagtcttaaaggtcctctaggactgccagtggtgttgattctttatcagagtcatgattcagataattccccatccctttttaaaaatggcatttaggctgggtgtggtggcttacacctgtaatcccagcactttgggaggctgaggtgggcagatcacctgaggtcagttcgagactagcctggccagtgtggtgaaacccggtctctactaaaaataccaaaattagctgagtgtggtggcagatgcctttaatcccagctaattgagaggctgaggcaagagaatcggttgaacctgggaggtggagcttacagtgagccaagacagcacgactgcactccagcctgggcaacaagagtgaaactctgaaattaaaaaataattaattaattaattaaaaatggcatttagataattcaaataaaaaaaaagaggaagcctcctttgttcctgttggggggaaagatgatgctatataaaggtatttctgtactttttatttaaaccaagggattgttttaatcagttaatgtgtatggcttatagatcatttcattgattgataaaaacttactcacaggcggggcatggtggctcatgcctgtaatcccagcactttgggaggctgaggcgggcagatcacctgaggtccggagttcgagaccagcctgaccaacatggagaaaccccatctctactacaaatacaaaattagccaggcgtggtggcgcatgcctgtaatcccagctattggggaggctgaggcaggagaatcgcttgaacccgggaggcagaggtcgcggtgagctgagatcgcgccattgcactacggcctgggcaccaagagcgaaactcagtctcaaaaaaaaacccacacttggctcacattgaatagagaagaagcgaatttatgaaaaaagtaatccaaagtggaaagatcgtaattacaaggtttgattttttttttttgtttggtttggttttttcgaggcggagtttcgctgttgttgcccaggctggagtgcagtggctcaatctccactcactgcagcctccgcctcctgggttcaagctattctcctgcctcagcctcccgagtagctgggattacaggcatgtgccaccatgcaaggttggttttgttttgttttgtttttttttaattttgcgacggagtttcgctctgtcgcccaggctggagtgtagtggcgagatcttgggtcactggatgctcagcctcctgggttcacaccattcttctgcctcagcctcctgagtagctgggactacaggtgcctgctaccacgtctggctaattttgtgtgtgtgtgtgtgtgtgtgtgtgtgtgtgtgtggtttttttttttttttttagtagagatggggtttcaccgtgttagccaggatggtctcgatctcctgacctcgtgatccaccctcctcggcctcccaaagtgctgggattacaggcgtgagccaccgtgcccggccaggttggattttataagtagttgggccactaaaatttctgagttgtacagtttcatgtctttagttggcagaccaaagctgatccactcataaaattttatttagtgctctcctttgacgtgagacacgtggtatatttattggcaccgtaatactggctacattatttgacctcatatttcagtttgtgttgcaaggttttgggcattagagctaatgtataggaagccctgtgcttacatatgctgagtatgagtaagtagtgggttaccaactgtttttgatgaaatatctgcatttcaccaaattgccatataccagtctcaaaatatcctgaaccttctgaaataccttcctaagtgagctcactaacacctacttttctgtgtcctttacaattttttcaccacaaagtctcaaagtttcagaaacggaactaatagggtcacttctgctgaagatctcctgtagtattgaagatatttaacatgtttcctttaattgatattggcctttgagaatttttgtatttgccttatttattaggtttaaagtgtacagttggataagttttatcttgtgcatgctcctgtgaaactacctctgtataatcaagatctgcctctatccgattactttcaccttcactgcccctcttcacatgtgcttgttgtcacttgcttggtaagagtggaatggctggattgtgtggatttttttttttttttttttaagacagtcacactactctgtcgcccaggctggagtgcagtgtcatgatcttggctcattgcaacctctggctctcgggttcaagcgattcttgtgcctcagcctcccaagtaggtgggattacaagcatgcaccaccacaccagcataatttttgtttttgtaatagagtttcgccatattggcctggctggtctcaaactcccgacctcaggtgatctgtccacttcggcctctcacagtgctgagattatactcataagccactgcgcccagcccatatggatgttttggtgtatgtttaagcatccaactgtattccaaagtggtcatgtcagtctcaccagcagtgtataagtatgtttcacatctcggctgacatttggtatagacaatgtttttagtttggctattgtagtgcatatacaatagcatctcatggtggttttaatttctttcttttttttttttttttttaaagacagagtcttgctctgtcgcccaggctggagtgcagtggcctgatctcggctgactgcaacctctgtttcccgggttcaagcgattctcctgcctcagcctcctgagtagctgagactacaggcatgtgccaccacacccagctaattattttgtatttttagtagagacgagctttcaccatgttggccaggatggtctcgaactcctgacctggtaatcagcccacctcagcctcccaaagtgctgggattacaggcatgagccaccacgcccagccttaatttccatgtggagtagtgttgttctgtgttccatcacatatccttacatgttctttgccatgccagtatgtttttggtgaaatgtctgttcaaaaattttgctcagttttttttttttttgagacggagcctggctctattgccccagctggagtgtggtggcacaatctcagctcactgcaacctctgcctcctgggttcaagcgattctcctgtctcagtctcctgagtagctgggattacaggtatgcaccaccacgccctgctactttttcgtatttttagtagtagagatggggtttcaccatgttagccacgctggtctctatctcctgacctcgtgatccacctgcctcagcctcccaaagcgctaggattacaggcgtgtaagcccaccatgccccgccaattttgcccagtttttattgggctattcccttattgagatctaagggctctttgtattctagtcaggagtattttgttaactgtatattttgcaagtgttttgtctgtggcttcctgtttaatttttgtaatggtgtcttttgcagagcaaaaatttcagattttgattaaaatcagtgttgatttttttttctttatatagttgatgttttttgtgttgtattcaagaaatctttgtcatgcaaaggtcacttaagattttctgtaagtttttggctgggcacagtggctcacgcctgtaattccagcaatttgggaggccgaggcaggcagatctcttgaggtcagcagttcgagacgagcctggtcaacagggtgaaaccgcatgtctactaaagatacaaaaattagctgggtgtgttggtgaattgcttgaactggggaggcagagactgcagtaagcctagatcacaccactgccctccagcctgggtgacagagcaagactctctctcaaaaaaaaaaaaaaaaaaaagatattctgtacgttttcttatagaacctttatagttttagcttttgcattaagatctgtgatttggctgggcacagtagctcacaattgtaatcccagcactgggaggccaaggcaggcggaaacaatacaaacaaattagccaggcgtggtggcatgcacctgtaatcccgactgccaggaagctgaggtgggaggaatgcttgagttgagttcgggaggtggaggttgcagtgagccgagatcatgccactgcactccagcctgggcgacaaagaccctgtctgaaaaaagcatcatgtgattcattttactcaatttttgtatatgaggtgaggtaagggtcaaggtttatatatttatttgagacagagtcatgctctgtctcctggccagagtacagtggcgcgatcttggctcactgcaaactccacctgccagattacaggtgcacaccaccacacccggctaatttttgtatttttagtagagatggggttgccccatgttggccaggctggtctggaactccagacctcaagtgatccgccagtctcagcctcccaaagtgctgggattatgtgtgagctaccgcacccagctccccaactttgtttctaaaaggtttggctattgttggttttttgctgttccataaaaattttagagtgaaatctggcaaatttcaacaaaagctgtcctgaaatttttattgagattgccttggatctgtggatgcatttggagagaatgaacatctttaatgtcaattcctgattatttcttgctaatatagagaattgccattgttcacttatctcttgaacgtgtagtttaatccagctagtcaaagcccagttcaaactcactttcccttcctgttgtgagaaaacacctcaattttgcaaaagctcttggaatttaacatttctgctgcttttccctgtatgtgtggtgtttagtcttttcatagttcgttgactatggaattcagagcagaaaccctatttcctaatttccttgggaagttttcagaactagatgataatgtaagtttctaataagttgatagtgttactcagaggtgattgtttcatttatgattttgaaaagaaaatgtaaatattagacttaagtccttgcatctaaaacaaattcatgagaaatcccacagaatacaatgttagagatgggagcaaaaattatcagtctaatctcagagagttgacaggcattccaaatcgttttttgtcagtatttaaaccatggtaggataatgtaagaaatatacttaatgcctggtgcgatgtctcacgcctgtaatcccagcactttgggaggcctaggcaggcaattgtctgaggtcaggagttcgagaccagtctggccaacatggtgaaaccccgtctctactaaaaatacaaaaaaaattagccgggcatggtggcgtgtgcctgtaatcccagaatcccagctactcggtaggttgcagcaggggagttgcttggaccagggaggtggaggctgcagtgagctgtgatcatgccactgcattccagcctgggcgacagagcaaggctccgtctcaaaaagaaaaaaaagaaaagaaaaagaaatatctgtaagctataaattatgtttttcatttctaaaaaaaacaaggcaggccaggcacagtgattgaggcctgcaatcccagcagtttgggaggctctcttgagcccagaaatttgagatcagccaggacaagatagttagacttctctctactaaaaatacagaaaactagcagtgtatggtcgagtgcccctgtagtttcagccactcaggaggctgaggcgggagaatcatttgagtccaggcaggaggtcgagccctgattgattgcaccactgcactccagcctgggcaacagagtgataatatctgaaaagataggctgggcacagtggctcttgcctgtaatcccaggactttgggaggctgaggcaggcagatcacctgaggttgggagttcgagatcagcctgaccaacatggtgaaaccccatctctactaaaaataacaaaaaaattagctgggcgtggtggcgcattcctgtaatccctgctactctgaaggctgaggccggagaattgcttaaacctgggaggtggaggttgcagtgagccgagattgcgccattgcattccagcctgggcaacaagaacgaaactctgtctaaaaaataaagaaaagaaagcagtattttcaggcacattgtatatgattgataggaatagtatttccatttctggttaatgtaacaatttgccccattccaagtattttgattacaggcctccatgaaaggcctatacttgatacctaacagtgtttgatccctagcttacatccatgtaacttttttttttttttttttttttgagataaggtctcacgctgtcgcccaagctggagtgcagtggcgggatcatggcttaactctagcctcaacttccggggctctagcaatcctcctgcgtcagtctcctgcataactgggactacgtgcgcatgaatcatacctggctcactgtttctattttttgtagagatggggtctcgctatgttgcctaggctggtcctgaactcctgggctcaagcgatcctctgcctcagcctcccaaagtgtttagattacagtcaagagctactgtgctcgacctgctttcaccttttggctatcatgagtgatgctcctgtcaattttaataaaattttaatcttttagattttttgtccagtgtgtttgaggccataaacatccatttaagaatggcggatgtgcatatagatccatttctcttaacattatcaaagcaggttaaattatagattatctgtgggaaccctaacttaactcctgctttagaattattgttagctgtttgtcttccatgtggcattgttcttattaatatttcattgagagaacagtagtaacaatatcctgtatacccttgtgtaagtaaagagagcagatcactattttattgaccatctttcaaaagatcgattttgtgtgtttttttgttttgttttgagatagtctcacattgtcgcccaggctgcttggattgcagtagtacaatcttggctcactgcaacctctgccttccgggttgaagcgattcttgtgcctcagcctccagagtagctggtactacaggtgtgcaccaccatgcctggctatttttttgtattttaatagacaggtttcaccatgttggcctggctggtctcaaactcctggcctcaagtgatccacccacctcggcctcccacagcgctaggattacaggcttgagccaccacatccagccaattttgatgttttcatggactgatacttgtaataaacatttcaattatatatagcattgatgtagaaatgtaccaaatttacatttttttagcttatggaataaataaatgtttaaactgaaattgattcgaaactagattgaacttgcctttttcctatttgtaatttacatttttaatagtgtatcaaaagccttaaaccattttctgtggtgcaggttgactgcctcttgctggaaatgcttgggatgagaagtgttccagactttgggctttttcagattttggaatatttgcattatgctcacgagttaagcattccaaaactgaaatagcccaatgagcatttcctttttttttccttttttttgagacagagtttcgctcttgttgcccaggctggagtgcgacggcatgatctcgactcactgcaacctctgcctcctgggttgaagtgattctcctgcctcatcctcctgtgtagttgggattacagtcatgcggcaccatgcctggctaattttgtagttttagtagagacagggtttcttcatgttggtcaggctggtctcaaactccaaacctcaggtgagccgcccgccttgtgttgggattacaggcgtgagctatctcacccaacctgagcatttccttttagtgccatgttggtgctttaaaacttgcagatttggggttgggcgtggtggctcatgcctgtaatcccagcactttgggaggctgaggcaggtgggttgcctgaggtcaggagttggagaacagcctggccaacatagtgaaaccttgtctttacctaaaaaaaaaaaaaaatcagctgggcgtggtgacgggcacctgtaatcccagctactctgggaggctgaggcaggagaatcgcttgaactcgggaggtggaggttgcagtgagcggagatagcaccattgcactccagcctgggccacaagaatgaaactccatctcaatcagtcagtcaatcttgcagatattggagtgtttcagatttcagatttggggtacttaaactgtacgtgaaaattagctgctggggaggagaggaattggaatatgtaacatggactcccacattttaaggatttttctaggactgcatctttctcttaataagtcagatccttatttggttgaaaatgtttactgcatgactatcactgactatgtaagatgctgatgtacaactctatgacttgaagattgagttgcttctatgggaatatgacaccatttgaattaatttgttctcaatattttaaagagttttagtgaattctgttcatataaaaatcaggttcaataatgcgtgctttttacgctatcattgagtatccagtgtttacaaggtgtttctgagggataagattattattgctgtgtaaagaatttggcagatggtgtgtaccttctaagttagcttgaggtttatttaaatctcatctttttagcttgctgaagttgatactatgcagttgcaagtttatattgactatttgatattgctgtgtttttatttgaaatgggactgttagacacatttttctttatattgagcaatagagctggaatattaaagatgtatgcattaacccttgcatttggaacatttacatgtcataagctgcctttcagtaagtggttaggcatttctacgggtgtgtattatattttgaataaattttatatggctttccaagaaacaattagagcatttgacccaccgactttgttgtttatttttatttttttgagatggagcctcccgcagtagagatagagtttcactatgttggccaggctggtcttgaattccgcctcaggtgatccacgtgccttggcctcccaaagtgctgggattacaggtgtgagccaccatgcccaacctgacctaccaactttggatgtgaatttttttcatttatattgagaagaatagggtcttgggccactagattgtaccagtgctaagtcagtatctgaatccattgaagatcctgttggcaacgtcaggacttatcaaagacacacaacttcaatgagaacctttctttggaattaattaattaatgatatggagccttgatctgtcactcaggctggagtgcagtggcactatttcagctcactaggaatgcatctttctcttctctttctccacctcccaggtttaagcacttctcctgcctcagcctcccgagtagctgggactgcaggcacaagccaccatgctgagctaatttttgtatttttagcagagacaaggttttgccatgttggccaggctggtctcgaactcctggcctcacgtgatctgcccacctcagcctcccaaagtactgggattacaggcttgagccactgtgcccggctgccttgtttgatttttttttttaaagagacagagatcccctctgttgcccaggctgaagtgcagtgacacaatcatagctcgttgtaacttcagtctcctgggtgatgggtagaattctgccacagcccaagtagctaggagtataggcacgaacgactgtgcctagctaatttttttattttttgtggaaatggggccttgctgtgttgcccaagctggtctcaagctcgtttcctcaaaccctcctcccatgtcagccttccaaagctccaggattacaggtgtgagccatcgtgcgtgacttgtttttgatttttgtatcgttttcttcactcttttttttttttttttgagatggagtctcccgctgtcacccaagctggagtgcagtggcacaatcttggctcactgcaactgcatcttgggttcaagtgattctcctgcctcagtctccccaagtagctgggactacaggcgcatgccaccacgcccagctaaatttttttgtttttattttttgcatttttagtagagacgaggtttcaccacgttggccaggctggtcttgaactcttgacctcagatgatctgcccgtctcggcctcccaaagtgctgggattacaggtgtgagccaccgcgcccggccttcttcaccttttgtatcaagctttttaaggaagagcttagaaagccagtttaaaggaattgaaatgtgttatgtaaatgtctgttttgcaactgagacccactaatttatttagaacaaaaagtcagagaccagtaatgggtccttttctgtcaaatttcaagctgagctgtttctgctacttagaaacatttcgattttctacctagatatgtattatatcattgctaattatttatttatttatttatttatttatttgaggtggagtctcactctgtcgcccaggcttgagtgtactaatttatttttaagtgcagtttaacattggatttttttttttttttttgagacggaatcttgctctgtcgcccagactggagtgcagtggcacgatcttggctcagagcaacctctggctcctgggttcaagcgtttctcctgcctcagcttcccaggtagctgggattacaggcatgagccactgctcctggcctacagttggaattttttgttgttgtttttgagacggagtcttgctctgtcacccaggcttgagtgcagtggcgcgatctcagctcactgcattgtccatttcctgggttcaaatgattctcatgcctcagcctcctgagtagctgggattataggcgcgtgccaccatgcctggctaattttgttgtatttttattagagacagggtttcaccatgttggccaggctggtctggaactcctgacctcaagtgatctgcctgcctcggccttccagagtgttgggattacaggcgtgagccatccgtccggctggaatgctattcttaattgacctgcatttatttatttatttatttatttggcaagccttgaggaagggatttggggaatgaacaatggtacttgatcaaataatccttgtactaggcaatcacagtttctagggccactgtacctggccatgggggttttattgataataatctgtaaggaacaaaagggttagtactatcggaatttttgattagatgtagtgagcattaaggacatatggaaagtagtttgaagtaaaatatatacagtataagagtcagaatcagccaggcgcggtggctcatgtaatcccagcacttcgggaggccgaggtgggcggatcacctgaagtcaggagttcgagatggcctggccaaaatggtgaaaccccatctctagtgaaaatacaaaaaaaagccaggtgcggtggctcacgtctgtaatctcagcactttgggatgctgaggcaggataatcgcttaaacctggaaggcagaggttgcagtgagctgagatcacgccactgcacaccaatctggggtacagtgaggctctgtctcaaaaaaaaaatacaaaaaaagtagccagacatagtggcatctacttgtagtccagggtactcaggaggctgaggcaggagaatcacttgaacccaggaggcggccgtgtcagtgagcctagatcacaccactgcactccagcctggaagacagaggaagactccatctcaaaaaaaaaaaaaaaaagtgagaatgttgcatagattacccaagttaattcttataatttagtgttcatttaaaaggaaaattgatttcctactttttgtttttaaaaatagtattaggctgggtatggtgggtcaggcctgtaatcccaacataaaatgtggccaaggcaggaggattgcttgaggtttggagttcaaggccagccccagcaacaatgagaccaggaaaaatcagccaggcacggtgctaagcacctgtggtcccagctagtcagctagctgaggcaggaggatcgcttgagtccagaagttcaaggctgcagtgagctgtgatggcaccactgcattctagtgtgggcaacagaccaagaccctgcctctaaaacaaaatgtaaaaaatatattttccatttccctattcattttatgtatttgtagcataaatgttactatgcatattgacacttaacaccattagatttctcttacatgtattacgttgctttactgcattagtaatatttttttcgtaattaggaaagtccataattactgttacagaaattttttatttgggatattgtgggaaatggctagtgttgtcatagttaataaaaattatataattaagtgccattgaagaaccatagtttgaaagtgaatttaatacattagctcatagttatacaatctcacaagcattttgctgccttcaggttgtcagtttcctgctaatgctaatgactaaattttttatttttcttttcaacgaaaatttcactcagttctatatatgccagatgaggcttggaacatacagctctacaacctttaactgcttttccaaaaatctgaacgctatgaaaatgaaaaatcttcataatttaactgatttggtgacaaagcgtaaagtgaacagatgtgagagtatttgtaattgttaattttacgtagtaggaaatagtaatttgttcaattagggttgctacttcatatccttttagtgtttcaatataggtgtaccacactacttttcctttaaaaatgttctcagaatttaacattctgcaacactcttgaaccctgtgattttggagaatggaacctatagtagatgctcagcaaattctacatgatgcaaattaaaatcaaggatatgagtatcatgtcttaactgtttaaagagtaggttttactatgaagagatccataagtaaagagcatttgaaatgaaaactttttcctaaacttccctcttttttttaacattgtgtgtgtgaagttaatgttgtatttctaatatgagcttaatgttgcaattaatgtatagtggaaaataataacacgtatattaattcatttttgagacaagagttcgctctgttgcccaggctggagtgcagtggcatgatctccgttcactgcagcctccgcctctaggcctcaagcgatccaccggcttcatccttccaaagtgctgggattacaggagtaagccactgtgcccaagccatcaataaatttttatgggttagaagtttgggccaggcctggtggctcatgcctataatcccagcagtctgggaggccaaggcaggtggattacttgaggtcaggagtttcagaccagcctagccaacatggtgaaaacatgtctctataaaaatacaaaaagtagctgggtgtgctgggcgcagtggctcacgcctgtaatcccagcactttgggaggccgaggcaggcagatcacgaggtcaggagatcgagaccatcctggctaacacggtgaaaccccatctctactaaaaatacaaaaaaatagccgagcatggtggcgggcgcctgtagtcccagctacttgggaggctgaggcatgagaatggcgtgaacccaggaggtggagcttgcagtgaggcgagatcgcgccactgcactccagcctgggcgacagagcgagattctgtctcaaaaaaaaaaaaatagtagctggatgtggtggtgcgtgcctgtaatcccagctgctcaggatgctgaggcaggacaattgcttgaacccaggaggtggaggcggaggttgcagtgaaccaagattgcacctctgcactccagcctgggcaacagagcaagactgtctccaaaaaaaagaaagaaaaggccgggtgcagtagctcacacctataatcccagcactttgggaggccgaggagggcggatcacttgaggtcaggagttcaagatcagcctggccaacatggtgaaaccttgtctcttattgaaaatacaaaaattagccaggcatggtggttgatgcctgtactcgggagcctgaggcaggagaatcacttgaacctgggaggcagaggttgcagggagccaagattgtgccactgcactccagtgtgtgtgacataacaggactccgtctcaaaaaaaaaaaaaaaaaagaaaagaaacacatggaaccaaatcaggatgaaagaaactggaatagcagtttgttataggctgggcttgttggcttgttcctgtaattccagcactttgggaggcccaggcaggaggatcacttgagtctatgagtttaagaccaacctgggcaacaatgccagatcccatctttaaaaatatgaatagcacattaaattcattgattttttttttttaagtcttgctctgttgcccaggctggagtgcaatgacgtgatgtctgctcactgcaacctccacctcccggattcaagtgattcccctgcctcagcctcccgagtagctgggattacaggcacccgccaccacgcccagttaatttttgtatttttagtagagacagggtttcaccatgttggtcatgctggtctcgaattcctggcctcaggtgatccacccacctcagcctcccaaagaattgctgggattacaagcgtgagccaccgcaccgggccggaatttttttaaaatgccaatactggtgacaggattagagtatattaactgattttacttagtctttccattcccacattaattagttctcaaaatttatttgcatgctacaaaagagctcaacaatttttttattacgtgcaatttttttaataggaataaaaaaatacgttgttggcctcattatcaagacgtcatctgacccaacttgtgtagaggtaagagtttattttggagcttattgggagagcataaaatcatttagatattgagtctgactacaacctaattctgtcaagacacatagtcacacatatgcacagtcagtcatttacagtagagctgtaatcatttgttaggattgtctggttatattcttatttatacttacctcaggctctcatttaatcttttacttttccttagaaagaaaaggtgtatatcggaaaattaaatatgatccttgttcaggtaagctttaacttaactgttttccttagaagaattatgcttattatttgaacaaaatgttcgacctacttaggaaataaagtatactaatattttgcagaagtagtgatagtattcttataataataggtaacctactgtctagtacttgaatgttaatttgctgtggcagtaatcatcaaataacgttaaagccatcatttatgtggctgcagtgtggactggactctgttggattcttatttatcttttcttttcttttttttttttttttggagacagtctccctctgttgcccaggctggagtgcagtggcatgatctcggctcactgcagcctctgctacccgggttcaagcgattgttctgcctcagcctcctgagtggctggaattacgggtgcttaccaccacgtttggctaattttttgtatttttagtagagacagggtttcaccatgttggccaggctggtctcaaactcttgacctcaggtgatccacccacctcgacctcccaaagtgctgggattataggtgtgagccgctgcacctggccggattgttttttaattttctgatatgcctgtgcatatttcctttgcatgtatgtctctgagtcctttgatttcctcgtccttctaattgatttccatgcttagtccttaaactgtctatgtagactaaatttataatttttatgtttatctgttttctatagtaatatcataaaattttttccagagaaccctggtatgtgtgggggaaaaaacagtaatttctatttaaataagacttagaaacatccaagcttccaaaaattttagtgtattcagtaattaactccagcttttattatactttagagctttctgttagcccttctctgagtggtgagagagaggagagaatataaagaaggttaacatgtatttttataatctgaaaaatcccttgtgtgtgccataaatagtccagacttgcatacaaatataatgcagttcatgaggcttttggttaaaagtttattcaggccccgattgcagtgcgtcctctcttttaaattcatatatccaaaccctactacatttcaaggctcaaattgcatccaataataagctgtcttaaccggtcactttttatcaccaatggttaattaaatccttgagtctcctaggataatttcttcttttcttgtttgaaatggagtgtcgctctgtcgcccatgctggagtgcagtggcaccgtcttagttcactgaaacctccacctcccaggttcaagcaattctcctgccttggcctccccagtagctgagactactggcccgcgccaccacccctggctaatttttgtatttttagtagagacggggtttcaccatgttggccaggctgctcttttttttttttttttttttgagatggagtctcatcctgttgcccagccttgagtgcagtggcctggtctcggctcactgcaacctctgcctcccaggttcaagagattctcctgcctcagcctcccgagcagctgggatcacaggcacacgtcaccatgcctcgctaatttttgtatttttagtagagacagggtttcaccatgttggccaggctggtcttgaactcctgacctcgtgatcctcctacctcggcctcccaaagtgctgggattacaggcacgagctaccacgcccagcctggccaggctgttctcagactcctggcctcaagtgatctgcccaccctggctccccacaaagtgctgggattacaggcatgagcaaccgcgcaaggcctcctagaataatttctacatatctatcaggcagatactaatacacagacagacccattagacggattggacctttcattaggataattgaaaagggtcctgcggtgattaagataaaagactttgtgttttgttttctacccagtagggtgaagagggtggcacatttcttcctttaataaaggaggagaaaatgaaaagtgatttatccttactcctgcctttatccattacataatttctttgaagtttgttttatttgcctttgagaaatgaagtgcgattaacatttcatgtcttgttttagatactgaaacaagaatggcccaaacattggccaacttttatcagtgatattgttggagcaagtaggaccagcgaaagtctctgtcaaaataatatggtgattcttaaactcttgagtgaagaagtatttgatttctctagtggacagataacccaagtcaaatctaagcatttaaaagacaggcaagtaataattatgttttagaattttaaagtgatttctcaaacaatttcaagcagtttggatgtaaattgtagatattttaaggaactatgatcagtaatatgttaaattgcttgtagtggttttcaactgcagattaagaaatagtcctagacggggcctaataatttacctctgaaggttgaaaaatgaattgttcaagacacacttcaggaattgttttgtatggtaactagtttaataggttctaagcaaatgatttgtgtccaaacatacgtattagttattttattttattttgagacaagtcttgctctattgcctggggtggagtgcagcagcgcaatcttggctcaccacaacccccacctcctggattgaggtgattttcttgcctcagtttcccaaatagctgtgactgcaggtgcatgccacagagcctggcctcaaatcagttattgtctctgcttcttttcagttccccaattgttaacaatagtgttctttttaaaacaaaacagaaaactagatttgcctctaatagtaagcaactggtataaactatagttatacttccattaagttttaaacatttgttgtagtcattaggaaatctttttccccttgggttgcccaggctggtctcaaacaatccttctgccatggcctcccaaagttctgcgattacaggcatgagccactgtactgggctttaatcatttttattagtattatagataactgatacttatttctgtgtcttctaaatctgatatttttgtgtgtttttttttttagcatgtgcaatgaattctcacagatatttcaactgtgtcagtttgtaatggtaagtgtttttaatttcatttttaaaaacaataataggaaagcaattatttacaagtgtgttttgttataggaaaattctcaaaatgctccacttgtacatgcaaccttggaaacattgctcagatttctgaactggattcccctgggatatatttttgagaccaaattaatcagcacattgatttataaggtacagtgaatacatttcagttatttgtcaccggatagccacatatattcttttcacatgtaaagctctcatctctgcattctaaaccttattcaaccttgtttctaacacgaggacgctgctcaggagaaatttcccatattcacacctagtaaattatttaaagtgagtttcaaatctgattctgccacttagaccatgtaattttatgaattcattttgaacaatggatttgattatattgcttttagtttgagtaagttacagtgaggtaagtcaagtgctatttctgaaaaatgaaaagttcatcttttaactgataatttaaaattgataccatgttatggcttaagttctataatggtttagcctgggcaagttggtgaaaccggtctctactaaaaatacaaaacagccaggcgtggtggtgtatgcctgtagtcccagctactcgggaggctgtggcaggagaatctcaaactcaggaggcagaaggtgcagtgagccaagatcgtgccactgcactccagcctgggcaacagagcgagaccctgtctcaaaataagtaaagttctacagtggtttatccagagataatcactgttaccagttggttgtattatattttcagatgttttcttgactgatataatgaataaattaagtatctaattggaacattataacttgacctcttcaacttcgtagtttagtttggtaagataatatggatttatagtatttgaatgatcagtttattgcttaattatgtaaaaacctttctattgtcaacagtcctacagagaacattctcagacataagatattatgcaattgtccaaacattaatttatttaaatattttaatgtttaatcaccagattattaggtatgtttaattttaaggttttaatgccccctgatttccaaccccagacgataactgtttatcttctcaacaatagaatatataagccaattttcccatattcttattactcttagatacattgaccatttcccaaaattctaagcaatcacaagttttaggtcctgtgtaattacacagaaagtataacattcctaaaagtcatatcacagattctaggaaagttgttaaggagccttgttattttaggacacatcaaaagaaagcagtttaggccgggcgctgtggctcacgcctgtaatcccagcactttgggaggtcgaggtgagcggatcacgaggtcaggagatcgagaccagcctggcccaacgtggcaaaaccctgtctctactaaaaatacaaaaattagccgggcgtggtggcatgcatgtgtagtcccagctatttgagaggctgaggcaggagaatcgcttgaatccaagaggtgaggttgcagtgagccgagatcaagcccctgcatttcagcctgggcgagcgagactctgtctcaaaaaaacaaaaaaagtttgctcctaaagcatttactgtatactaggtaggcaataaaattccctctcagtatatctgcatgataaaatatgttcattcacttggcctgtttttgacatctacccctatatttaattgttaaagcctttttccttttaattgtgaattttaagtaaagtgtgtatcaggccaattaattttatggttccctccccccttttaaatagttcctgaatgttcc

SEQ ID NO: 14949 - DNA, 537 bp, Homo sapiens
agaatggctcaagaagtactgacacatttaaaggagcatcctgatgcttggacaagagtcgacacaattttggaattttctcagaatatgaatacgaaatactatggactacaaattttggaaaatgtgataaaaacaaggtggaagattcttccaaggaaccagtgcgaagatactgaaacaagaatggcccaaacattggccaacttttatcagtgatattgttggagcaagtaggaccagcgaaagtctctgtcaaaataatatggtgattcttaaactcttgagtgaagaagtatttgatttctctagtggacagataacccaagtcaaatctaagcatttaaaagacagcatgtgcaatgaattctcacagatatttcaactgtgtcagtttgtaatggaaaattctcaaaatgctccacttgtacatgcaaccttggaaacattgctcagatttctgaactggattcccctgggatatatttttgagaccaaattaatcagcacattgatttataagttcctgaatgttcc

SEQ ID NO: 14950 - DNA, 565 bp, Homo sapiens
ggctttccttcgctctcttttctactcatccctgctcttcgtcccacctcctcctcctccacccctctcctcttgcctttcgaccctccccacttcccctcccccactctgcgggcaaatcgctgctgaaaagaggaaggagcagttggttcaatctctggtaatctatgccagcaattatgacaatgttagcagaccatgcagctcgtcagctgcttgatttcagccaaaaactggatatcaacttattagataatgtggtgaattgcttataccatggagaaggagcccagcaaagaatggctcaagaagtactgacacatttaaaggagcatcctgatgcttggacaagagtcgacacaattttggaattttctcagaatatgaatacgaaatactatggactacaaattttggaaaatgtgataaaaacaaggtggaagattcttccaaggaaccagtgcgaaggaataaaaaaatacgttgttggcctcattatcaagacgtcatctgacccaacttgtgtagagaaagaaaaggtgtatatcggaaaattaaatatgat

SEQ ID NO: 14951 - DNA, 10127 bp, Homo sapiens
acaacctaaggagcagtctttcgccttgtagcgacttgtttttcacctagtgtgaagttattaagcaacggttatgattttctgggttttgtttaggaattggcattgggtgtcacttgtagagtcacattatccattaagctggataatccctagtgtatgttatccagtgagtggattttaggattgaagagcccaatgggaatgagcgttcgtggttacacctctcgcactatggcttgtttgctgtctgattgtatatcttaagtgtgggacactgctgttagtggaaagaatgttttggaagcggtttgatttgggggactaaatgtgcttggcattgaccacaaagccgccatttctgtactatgtacagttcaggaataggtaggtgatttcgaagatagccgctagttctaaggatggcaaactactgtatttaaatccttctattctaaatctcgtttttcacatcagtctagttcggagaattttataagaacagtgtatttgaaaatgaaacttgtaagagtcattttcttaatccttttttgttttagcattcaactatggtagtaaataggtgaaaagtttgttcaatatttaaccgaaatatttgaaaacttttgatacatggatcttggtgctttgtggacattgcttttaagcctcaaataattaagattgttctgatcttttaaattttatggtacttgaaggtggaggagagtttacacattcatttgtggaatatatatttcctctcagtatttagatcttaaggtttttttgtggtgtgtaacaagtattctgctgtttaaaaacgtttgtttaatgcctactacgaaacgttttgaagtctcatcagttttgtcaataatggaccaattcttgaactcctaatttcttgagttttacattatttttacatcatatcaatcataggtgactcatcttttggagttctaatctgttgtaacagacgttatatttaaataagacaattgcattaaaatagaatttgctgccattattgttatggacatttttaagctgttataaaatagccaggaattaatgactttttttccgccctgccaagctagtttgtctaaatataatgtaaagaaattagctactcattttctggtccacgaaagttcctaaaatgggaagaagtggagatctgaccttgttagttctaaatacactaaactgggagtgccatggatggctttcaggatgtcctgaatcctctataattgtatacaaaatcgtgagtttttaaaaactgggttagagctattggttcctcagagtctcaggcatcttagacccccaaaaaggttaaggactactgacttaaccaattaggtttgagtggcattggctttgaagaaaagcagaggaaagatatattttataattctgggcaacaaaaaagtggatgtgtgccagcatcttagagtagaatcctcttaaaaggatagcactgcatatgaactagtaggttttaaccagtgcatatttaggcgaagtagctcatttttctgttagaattcttttttatttgggaatgggcaagcttttacagcttttaccttgccaatgaatacctggaatttaaaaaatcttgttaggcatattgcccataaagttttttttcctagatcatatattcagtaaatatgtttgtagctttatttcaatcccccaattcattgagggttgaaacaatttgaatggtttgagtgtagaagctaagttatttctgtagaggctaagggcatttataccaagatatgttagacttgtggttcctgctaaccattgctgtagacaataggaattactgtatatccacattttaatttttaacatcattctgtctttgtttgtttgtttttgagatggagtctcattctcttgcccaggctagagtgtggtggtgcatctcggcttactgcaaactccgtctcctgggttcaagcagttctcctgcctcagcttcccaagtagctgggattacaggtgcccgcctccatgcctggctgatttttgtatttttagtagagacggggttttgccatgttggccaggctggtctggaactcctgacctcaagtgattcgcccacctcggcctcccaaagtgctgggattacaggtgtgagccaccacgctcggcccattctgtctttatagcattatttttataaagttaagataatgtgaagtgagcttttactgagttattcagaagaccctacttgggaagaaaagaaaatcacattcacttgaacttaatcctacttgcttaaaaagttttgacatcaagatactgaactgtatcacgttttaggaccataaaatcctaatagtggatgcgtttaaataataggttagcatactttataaatgttagtagaataggaaagtcttcctggtgtataaactaaacactagaaaagttgaatggaccataataatttatgtaattatcaaatagctaagtaatttcagcttttgttacttgcttttactatctcagttttctgtaattaaagtctctaaagtattcattaaaatatttgtaataacatggttgaagtaaaataacttgtaggaagtttttgataataccaaaacttgataggcagcttcaattttttttctttattttcagtaatctatgccagcaattatgacaatgttagcagaccatgcagctcgtcagctgcttgatttcagccaaaaactggatatcaacttattagataatgtggtgaattgcttataccatggagaaggagcccaggtaaagtagccaaccaaaactttataacattatgacagtgtaacagagttgttgggtttagaataaaattttaaattatcacctttaaaaaagatattccatagtttgcattaatttggaattctgtattaaccataatgaaaattggtttggagaaagaaattgcatgtttgacatggttagagtgggttgttttggaatattatacttgttttgtccttaagagccaaatgttattaaatactttgtaggtattaaaggttctctgtacttttatatatacttaatatgtttggcactaatacgattcttctacttttaaaacatttacagaagtacttcacagatatgtttgtttaaataaaaacaggaataccaagtatttttatgttagttgaattttgtgcacttttcaaagtggtactgttaatgtagggaattatcttaaacataaaccaaattttgatcagtttaagatttttggtttttttgaacccaactaaaaggtgaaacagaaatgtgtgtacaattttaaattgtatatgtcacaagaaaaaaaacttgattttttacctgtggggccaaacttttttttgagacagtctcgctctgtggtccaggcaggagtgcagtggcgctatctcagctcactgcaacccctgcctcctgggttcaagcgattgtcttgcctcagcctccctggtagctgggattacaggcacacgccaccatgcctggctaatttttgtatttttagtagagatggggtttcaccgtgttggccaggctggtcttggaactcctgacctcaggtgatccacctgactcggcctcccaaagtgctgggattacaggcatgagccaccgcgtgctggcccaaacatgtttttgaatgagtaaaaagttttgcagttgggtcagaaatcttttttttttttcagatggagtcttgctctgtcaccaggcctgagtgcagtggcacagtctcggctcactgcaacctctgcctcccaggttttcaagcaattcacctgccttagcctcccgagtagctgggactacagacgcgccaccatgcccagctaattttttgtattttagtagagatgggtttcatcatattggccaggatggtctccatctcctgacctcgtgatccgcctgccttggcctcccaaagtgtggagatgacaggcatgagccaccgcgcctggccagaaatcttttatggtagttttgttgccagaacagtagatttctggttagataaatgttcagctagtagatgggaggttacttatattgtcaagatatttatatttgcataattaagaaactgagtgccggccgggcgcggtggctcacgcctgtaatcccagcactttgagaggccgacgccggcggatgacgaggtcaggagatcgagaccatcctggctaacacggtgaaaccccgtctctactaaaaacacaaaaaattagccaggcgtggtggcgggcgcctgtagtcccagctactcgggaggctgaggcaggagaatggcgtgaacccgggaggcggagcttgcagtgagccgaggttgcgccactgcactccagcctgggcaacggcatgagacttcgtctcaaaaataaaaataaataaataaaataaaataaaaaaacctaaacctgagtgccattacactttctgaaaatatataaggtggatacagtactatcttttatagtagtccaaaaagcatcatgtataaatgtttccattcccttatgaaatgcaacagtactgcttttactatagtagaaacttgaaaaaggtccatggaaacgctaaaagtagaaaaaattactcttgcagtgattctgtaagcttgttagcccaggtttatacttttagggcgttttgatcagtatattatctcctaaagcattcttgaaaaaattaaccatccgtatttattatccctgtcatttagttgttactcatgctatacattcaacatgaagctttaagcttcatttcttctagcatggatgcatagaaagcagctgcttttggaggaagctatgaaagtaaggttgggttcaactctgaatgtaatattggaagcacaggtctgtagccattgggaaaaagggcatttaattttttccgcatagattcagctactaatactgtttaatcttcacactaaactagttcactacatctaaaggtatgataaataaaccaacatagagcagtgttcttcatggcttgtaacagaattagtggcaatttttgtaattgagaatatattacagcaatactgcttttaataatgtttcatagtattaagaaatttaatggtttgttttaaaattgacttgttaataaaaagtagattaagaaaagtgtttctaaatttttttgtttgtaaggacaataggttaactttcccaaagtaaaaggattttgtctgcagtagttaatagatcatgtgacaaaatcagttgcgtagaaataactagcaaacttattttgtattataaatgaagaaacaagatttagagcttaaagctggttaaggagtccttttggtctctaaaagtcctatgtcgttagttcagtctacttttcgtttaccacctccttgggggtcttatttcaaaggaaaaggagtagtagtagcagcgagctgctatagtggaaaacatgatttttagtgttagacgtcttaatttgattcttggaagctctctctagtcattgcttaagtcccatgtacaaatatgacctgtcctacaagagattggagggttagttatgaggtttaaaagcacctattacagtgcttgataggtagaaggcactcagcttaaagggtacatttagcagtataatgaaaatgatttagcatatgtgatactcattgcttaaaattaaaaaaattttttttttgctactcataaaatatgcactaatgacaagaaaaatttattatgctaattaagcttttaaagtcaactgggaaaaaaagctgtaggtaggtttttttttttttaaaggaatgtgtaacttgggggaggggaagaaattatttacaagggtgacttttaatctgtagacagaacttctgcatacatggttagtatagtaggatatttagcagtgtaacattaggactaccctctaccctctgttatcagcatttttctatttttagccaagtagacagctagaaaaaagatgcgggaagagttggatgttttctccaatattgtgttctgttaaagatcttgaactctattgcttagcaactaaaatgctttcaccattcagttagtagtacaagggagatgctaggttttctctctttagtttgcttttgtgtcttttttttttaaacccctgctggggttttaagtttataaagaacattatgtaagaatggtgggattagaataaatcagaatgcaaatactagaagtagcatcagagagtaaaattacaactaacaggaaagaatattatttatgtagcgattgatgtgagtggtgatagtgtgggaagtatttgattctgtgtagaatgcttatcacttcaaagcatctgacaaaatggtaacttgaccaagtaacttttactgtgtgaggatctttgatacaacttttcctctagttagataaggttatctagctagatattctcagggagaagaccaaaacactgctaaaatgtgctttggccctagataagccacatcattattctttcggccttctgtcatttctcatatgacacattatgcccatcagtcctttaatgaaatcaaatagaaatgtgtatgattgtattttaaagtatacacattaactcttgtaaccacagactcacaatggaagcaggcgtctgatcttttcaggcaaccacagtggttctggtgggtttctgggtagagaacaaccatataagttattgagtgtgtagcagtgtgttttcctgattgatgtatgggatagtcatgaatgtggtattgtatttcctacctgaggaaaaggtcatgattaaaataaagcatcaaagccaggataagcatataatttctttctttttttttttttttgtaatgagacagagtctcactctgtagcccaggctggagtgcagtggtgtgatctcaaatcactgcaacctccgccttccgggtcctggttcaagcaattctcctgcctcagcctcctgagtaactgggattacaagtacgccccaccatgcccagctaatttttgaatttttagtagagacggggtttcaccatgttggccaggctggtcttgaacttctgacctcgtgatccacccaccttggccacccaaagtgttgggattacaggcgtgagccacggtgcccacccgagcatacgattgttttaaaaaagactagaataaaagccaagctaaagattataaggtatctttgtcagaaatggttgtgagagtgcttcctaccctgtttttgatgctttattgtttataaccatagaattaaacccatgataaagtaaagtataagagaaagataactgacagattttaaagtcatcaaacttttttcttgctctgtcacacaggctggagcacaatggcttgatcacagctcactgcagccttgacttcccaggctcaatcttcccacctcagcctcctgagtagctgggaccataagtgcgtgtcccaccacacctggctcattattaatttttctttgttgcccaggctggtcttgaactcctgggattacagacatgagccaccacacctggtccaaactttttgcttacaacttttaatagaaataggtaaaagaaataggaaggatctaattgagttataaaacaacctttaaagatacaaaagtgaaaaagattaagccattgctttttgtcaatagaattaaaagctgttggtaaaaatattaatgtatgaaaaacttattgaaatgaaaaaactatatatatatatatatatatatatatatatatatatatatatatataaataaaatgtcgacatggctggatcttaaaaactgtcaaatgaaaaaaactaattgcaggaaagattttttttttttttttgagagggagtctcacgcagtcaacccaggttggagtgcactggggcaatcttcctgattcttggggaatcttggctcactgcaacctccgctcctggattcaagcgattctcctgcctcagcctcccgagtagctgggactataggcgcacgccaccattcccggctagtttttgtatttttagtagagatggggtttcgccatattggtcaggatggtcttgaactcctgaccttgtgatctgctcacctcggcctcccatagtgccaggattacaggcgtaagccaccgtgcccagcctaaaagatttttaagtatactattaacataaaatttggtagccgtacaaccctattcatgaaatttacacacatgccgtgaaaatgtggacaggaaaagacacactaagttcatgatgaaagccattactttttaaagaaggaacaaaggtgtaatcccagcactttggggaggctgaggcaggcgggtcacgaggtcaggagttcaagaccagcctggccaatacagtgaaaccctgtctctactgaaaatacaaaaattagccaggcgtggtggcaggtgcctgtagtcccagctacttgggaggctgaggcaggagaattgcttgaacccgggaggtgaaggttgcagtgagtcgagatcctgccattgcactccagcctgggtgacagagcaagactccaactttaaaaaaaaaaaagagagaaaaaaggaataaaggaaggaaatggcactagggaaaggcacaaagatgacttccataaactttagttattttatgctaaaagaaaatctgatacaagcacaagatgatgactacgtagattagtatttctgggttgcatgttaaaaatatgaaaataaaaacggaaatagtttccaaaacaaagattttatatatgaaattagtgaaatttcagaatggagaaaggatggttacaataaatgttaggagccctctttaaagagctcaaatggtatgtaagtatttgggatttgtggtttaattagacctagttttcagcagtctttccatgaaatgtatttttgtatttagagagatcttggtaactcttgtaaagcagagtgtcctgctacattacataacttacctaagtaggtgtgcttttttttgtttttctagagacagggtctctgctctttcacccaggctgaagtgtagtggcaccatcatagctcggtgcaaccttgatttccagggctcaagtgatcctcccatctcggtctcctgagtagttaggactataggtgcaagccaccatgtgcagctttcttttttttttttttttggagagtcatggcctcgttacattgcctgtcacctagactggccagctggtcttgaacccctggcctcaagtggtcctcctgcctcagtctcccaaagtattgggattacaggcatgaaacactgctactggcctagataagaatttttatattgtttttggttgatttaagtgctgagaacttatttgcttcagaatagatctttggttgaaatgcagttcagttttgagactaaaaaataaaccagatttactcccaaaaatgttactgtttcaaataagtaaaatatttgcacctttaaagattaggagttggctgggcatggtggctcactcctataatctcagcactttgggaggccaaggcaggcagatcacctgaggtcaggagttcaagaccagcctggccaacatggtgaaaccccatctctactaaaaatacaaaaattagctggctgtggtggcacctgcctataatcccagctactcaggaggctgaggcgggagaatcgcttgaacccaggaggcagaggttgcagggtgctgagatcgcaccactgcagtccagcctgggtgatagagccaagactctgtctcaaaaaaaaaaaaaaaaaattgggagtcatatttatataattttatttctatttctgtaaggtctaatttttgagtatttctgaacatcaataatagaatctctgtccaattagaatttgtgccttgctcagtagttttcattttaatgaatgattcaaaagaatacattagcttaagttttgttttttttaataatattttagcaaagaatggctcaagaagtactgacacatttaaaggagcatcctgatgcttggacaaga

SEQ ID NO: 14952 - DNA, 579 bp, Homo sapiens
acaacctaaggagcagtctttcgccttgtagcgacttgtttttcacctagtgtgaagttattaagcaacggttatgattttctgggttttgtttaggaattggcattgggtgtcacttgtagagtcacattatccattaagctggataatccctagtgtatgttatccagtgagtggattttaggattgaagagcccaatgggaatgagcgttcgtggttacacctctcgcactatggcttgtttgctgtctgattgtatatcttaagtgtgggacactgctgttagtggaaagaatgttttggaagcggtttgatttgggggactaaatgtgcttggcattgaccacaaagccgccatttctgtactatgtacagttcaggaatagtaatctatgccagcaattatgacaatgttagcagaccatgcagctcgtcagctgcttgatttcagccaaaaactggatatcaacttattagataatgtggtgaattgcttataccatggagaaggagcccagcaaagaatggctcaagaagtactgacacatttaaaggagcatcctgatgcttggacaaga

SEQ ID NO: 14953 - DNA, 643 bp, Homo sapiens
ggtggagagcttgggatgggggagggaggggctgccgactccctgttcctccagcaaggaaactcgaaagctctccggttttgcagagtggcatgtgaataatctatgccagcaattatgacaatgttagcagaccatgcagctcgtcagctgcttgatttcagccaaaaactggatatcaacttattagataatgtggtgaattgcttataccatggagaaggagcccagcaaagaatggctcaagaagtactgacacatttaaaggagcatcctgatgcttggacaagagtcgacacaattttggaattttctcagaatatgaatacgaaatactatggactacaaattttggaaaatgtgataaaaacaaggtggaagattcttccaaggaaccagtgcgaaggaataaaaaaatacgttgttggcctcattatcaagacgtcatctgacccaacttgtgtagagaaagaaaaggtgtatatcggaaaattaaatatgatccttgttcagatactgaaacaagaatggcccaaacattggccaacttttatcagtgatattgttggagcaagtaggaccagcgaaagtctctgtcaaaataatatggtgattcttaaactcttgagtgaagaagtatttg

SEQ ID NO: 14954 - DNA, 15011 bp, Homo sapiens
gtcccctctcccccctccccaccttccctcgccctaatcccccaacgaggaaggaaggagcagttggttcaatctctgggtaagtcgactgtgtcttcggggccgagggtcgggcggcggcgcggccgggcgggcgggaggaggccggcgtggggcgcggcggcggcggccgcgggaagcgagcccgggaggcggcgggcgggccgggggcgcggcgggcccacagcggagcctgcgattgaatggagccgcttttgccgctgggggatggaggcggggaggcggcctcgggaggggagcgcttgctgggtcattcgcgtgtgcgggtggcggtggaggaaggcgaggagtgtgatagtgaagcggggccccgcgcggggtgggaggggttccccagcccctggggctggggagaagttggggtgatttcaggaacatctctgtaaattattaggagtggaagtttccagaaatatttagtgcagcagcattgaaacgtccgcctgcatcacgtggccccctcggtggagagcttgggatgggggagggaggggctgccgactccctgttcctccagcaaggaaactcgaaagctctccggttttgcagagtggcatgtgaagtaggaaagatcagtttttcaggggcctgcacatgggattccgtcttgtagttccttttcaggggtttgaatgtgataagttggttaaaccatttactgttggccttgtacagtggaggatgccctgattctccttcattccgatgtctgtgagtttgggttgggtgggaggaagtggtgtagtagaggaagcattcagtactggctcagcccggacctcctctgatcacgccgaggccatgctgcatagagaaaggggcggtgaacttaaggcgcctggtctaaatgcctcctccgagtaagggcggggtgagtgcgtgctcctgtgtgctatagttagaagggctgcaaatcggttcgggtgggaagcgaggggagggcgggccctaatgaggtgtgtttttcctgaatgaagcgggcgattgcccacacaacctaaggagcagtctttcgccttgtagcgacttgtttttcacctagtgtgaagttattaagcaacggttatgattttctgggttttgtttaggaattggcattgggtgtcacttgtagagtcacattatccattaagctggataatccctagtgtatgttatccagtgagtggattttaggattgaagagcccaatgggaatgagcgttcgtggttacacctctcgcactatggcttgtttgctgtctgattgtatatcttaagtgtgggacactgctgttagtggaaagaatgttttggaagcggtttgatttgggggactaaatgtgcttggcattgaccacaaagccgccatttctgtactatgtacagttcaggaataggtaggtgatttcgaagatagccgctagttctaaggatggcaaactactgtatttaaatccttctattctaaatctcgtttttcacatcagtctagttcggagaattttataagaacagtgtatttgaaaatgaaacttgtaagagtcattttcttaatccttttttgttttagcattcaactatggtagtaaataggtgaaaagtttgttcaatatttaaccgaaatatttgaaaacttttgatacatggatcttggtgctttgtggacattgcttttaagcctcaaataattaagattgttctgatcttttaaattttatggtacttgaaggtggaggagagtttacacattcatttgtggaatatatatttcctctcagtatttagatcttaaggtttttttgtggtgtgtaacaagtattctgctgtttaaaaacgtttgtttaatgcctactacgaaacgttttgaagtctcatcagttttgtcaataatggaccaattcttgaactcctaatttcttgagttttacattatttttacatcatatcaatcataggtgactcatcttttggagttctaatctgttgtaacagacgttatatttaaataagacaattgcattaaaatagaatttgctgccattattgttatggacatttttaagctgttataaaatagccaggaattaatgactttttttccgccctgccaagctagtttgtctaaatataatgtaaagaaattagctactcattttctggtccacgaaagttcctaaaatgggaagaagtggagatctgaccttgttagttctaaatacactaaactgggagtgccatggatggctttcaggatgtcctgaatcctctataattgtatacaaaatcgtgagtttttaaaaactgggttagagctattggttcctcagagtctcaggcatcttagacccccaaaaaggttaaggactactgacttaaccaattaggtttgagtggcattggctttgaagaaaagcagaggaaagatatattttataattctgggcaacaaaaaagtggatgtgtgccagcatcttagagtagaatcctcttaaaaggatagcactgcatatgaactagtaggttttaaccagtgcatatttaggcgaagtagctcatttttctgttagaattcttttttatttgggaatgggcaagcttttacagcttttaccttgccaatgaatacctggaatttaaaaaatcttgttaggcatattgcccataaagttttttttcctagatcatatattcagtaaatatgtttgtagctttatttcaatcccccaattcattgagggttgaaacaatttgaatggtttgagtgtagaagctaagttatttctgtagaggctaagggcatttataccaagatatgttagacttgtggttcctgctaaccattgctgtagacaataggaattactgtatatccacattttaatttttaacatcattctgtctttgtttgtttgtttttgagatggagtctcattctcttgcccaggctagagtgtggtggtgcatctcggcttactgcaaactccgtctcctgggttcaagcagttctcctgcctcagcttcccaagtagctgggattacaggtgcccgcctccatgcctggctgatttttgtatttttagtagagacggggttttgccatgttggccaggctggtctggaactcctgacctcaagtgattcgcccacctcggcctcccaaagtgctgggattacaggtgtgagccaccacgctcggcccattctgtctttatagcattatttttataaagttaagataatgtgaagtgagcttttactgagttattcagaagaccctacttgggaagaaaagaaaatcacattcacttgaacttaatcctacttgcttaaaaagttttgacatcaagatactgaactgtatcacgttttaggaccataaaatcctaatagtggatgcgtttaaataataggttagcatactttataaatgttagtagaataggaaagtcttcctggtgtataaactaaacactagaaaagttgaatggaccataataatttatgtaattatcaaatagctaagtaatttcagcttttgttacttgcttttactatctcagttttctgtaattaaagtctctaaagtattcattaaaatatttgtaataacatggttgaagtaaaataacttgtaggaagtttttgataataccaaaacttgataggcagcttcaattttttttctttattttcagtaatctatgccagcaattatgacaatgttagcagaccatgcagctcgtcagctgcttgatttcagccaaaaactggatatcaacttattagataatgtggtgaattgcttataccatggagaaggagcccaggtaaagtagccaaccaaaactttataacattatgacagtgtaacagagttgttgggtttagaataaaattttaaattatcacctttaaaaaagatattccatagtttgcattaatttggaattctgtattaaccataatgaaaattggtttggagaaagaaattgcatgtttgacatggttagagtgggttgttttggaatattatacttgttttgtccttaagagccaaatgttattaaatactttgtaggtattaaaggttctctgtacttttatatatacttaatatgtttggcactaatacgattcttctacttttaaaacatttacagaagtacttcacagatatgtttgtttaaataaaaacaggaataccaagtatttttatgttagttgaattttgtgcacttttcaaagtggtactgttaatgtagggaattatcttaaacataaaccaaattttgatcagtttaagatttttggtttttttgaacccaactaaaaggtgaaacagaaatgtgtgtacaattttaaattgtatatgtcacaagaaaaaaaacttgattttttacctgtggggccaaacttttttttgagacagtctcgctctgtggtccaggcaggagtgcagtggcgctatctcagctcactgcaacccctgcctcctgggttcaagcgattgtcttgcctcagcctccctggtagctgggattacaggcacacgccaccatgcctggctaatttttgtatttttagtagagatggggtttcaccgtgttggccaggctggtcttggaactcctgacctcaggtgatccacctgactcggcctcccaaagtgctgggattacaggcatgagccaccgcgtgctggcccaaacatgtttttgaatgagtaaaaagttttgcagttgggtcagaaatcttttttttttttcagatggagtcttgctctgtcaccaggcctgagtgcagtggcacagtctcggctcactgcaacctctgcctcccaggttttcaagcaattcacctgccttagcctcccgagtagctgggactacagacgcgccaccatgcccagctaattttttgtattttagtagagatgggtttcatcatattggccaggatggtctccatctcctgacctcgtgatccgcctgccttggcctcccaaagtgtggagatgacaggcatgagccaccgcgcctggccagaaatcttttatggtagttttgttgccagaacagtagatttctggttagataaatgttcagctagtagatgggaggttacttatattgtcaagatatttatatttgcataattaagaaactgagtgccggccgggcgcggtggctcacgcctgtaatcccagcactttgagaggccgacgccggcggatgacgaggtcaggagatcgagaccatcctggctaacacggtgaaaccccgtctctactaaaaacacaaaaaattagccaggcgtggtggcgggcgcctgtagtcccagctactcgggaggctgaggcaggagaatggcgtgaacccgggaggcggagcttgcagtgagccgaggttgcgccactgcactccagcctgggcaacggcatgagacttcgtctcaaaaataaaaataaataaataaaataaaataaaaaaacctaaacctgagtgccattacactttctgaaaatatataaggtggatacagtactatcttttatagtagtccaaaaagcatcatgtataaatgtttccattcccttatgaaatgcaacagtactgcttttactatagtagaaacttgaaaaaggtccatggaaacgctaaaagtagaaaaaattactcttgcagtgattctgtaagcttgttagcccaggtttatacttttagggcgttttgatcagtatattatctcctaaagcattcttgaaaaaattaaccatccgtatttattatccctgtcatttagttgttactcatgctatacattcaacatgaagctttaagcttcatttcttctagcatggatgcatagaaagcagctgcttttggaggaagctatgaaagtaaggttgggttcaactctgaatgtaatattggaagcacaggtctgtagccattgggaaaaagggcatttaattttttccgcatagattcagctactaatactgtttaatcttcacactaaactagttcactacatctaaaggtatgataaataaaccaacatagagcagtgttcttcatggcttgtaacagaattagtggcaatttttgtaattgagaatatattacagcaatactgcttttaataatgtttcatagtattaagaaatttaatggtttgttttaaaattgacttgttaataaaaagtagattaagaaaagtgtttctaaatttttttgtttgtaaggacaataggttaactttcccaaagtaaaaggattttgtctgcagtagttaatagatcatgtgacaaaatcagttgcgtagaaataactagcaaacttattttgtattataaatgaagaaacaagatttagagcttaaagctggttaaggagtccttttggtctctaaaagtcctatgtcgttagttcagtctacttttcgtttaccacctccttgggggtcttatttcaaaggaaaaggagtagtagtagcagcgagctgctatagtggaaaacatgatttttagtgttagacgtcttaatttgattcttggaagctctctctagtcattgcttaagtcccatgtacaaatatgacctgtcctacaagagattggagggttagttatgaggtttaaaagcacctattacagtgcttgataggtagaaggcactcagcttaaagggtacatttagcagtataatgaaaatgatttagcatatgtgatactcattgcttaaaattaaaaaaattttttttttgctactcataaaatatgcactaatgacaagaaaaatttattatgctaattaagcttttaaagtcaactgggaaaaaaagctgtaggtaggtttttttttttttaaaggaatgtgtaacttgggggaggggaagaaattatttacaagggtgacttttaatctgtagacagaacttctgcatacatggttagtatagtaggatatttagcagtgtaacattaggactaccctctaccctctgttatcagcatttttctatttttagccaagtagacagctagaaaaaagatgcgggaagagttggatgttttctccaatattgtgttctgttaaagatcttgaactctattgcttagcaactaaaatgctttcaccattcagttagtagtacaagggagatgctaggttttctctctttagtttgcttttgtgtcttttttttttaaacccctgctggggttttaagtttataaagaacattatgtaagaatggtgggattagaataaatcagaatgcaaatactagaagtagcatcagagagtaaaattacaactaacaggaaagaatattatttatgtagcgattgatgtgagtggtgatagtgtgggaagtatttgattctgtgtagaatgcttatcacttcaaagcatctgacaaaatggtaacttgaccaagtaacttttactgtgtgaggatctttgatacaacttttcctctagttagataaggttatctagctagatattctcagggagaagaccaaaacactgctaaaatgtgctttggccctagataagccacatcattattctttcggccttctgtcatttctcatatgacacattatgcccatcagtcctttaatgaaatcaaatagaaatgtgtatgattgtattttaaagtatacacattaactcttgtaaccacagactcacaatggaagcaggcgtctgatcttttcaggcaaccacagtggttctggtgggtttctgggtagagaacaaccatataagttattgagtgtgtagcagtgtgttttcctgattgatgtatgggatagtcatgaatgtggtattgtatttcctacctgaggaaaaggtcatgattaaaataaagcatcaaagccaggataagcatataatttctttctttttttttttttttgtaatgagacagagtctcactctgtagcccaggctggagtgcagtggtgtgatctcaaatcactgcaacctccgccttccgggtcctggttcaagcaattctcctgcctcagcctcctgagtaactgggattacaagtacgccccaccatgcccagctaatttttgaatttttagtagagacggggtttcaccatgttggccaggctggtcttgaacttctgacctcgtgatccacccaccttggccacccaaagtgttgggattacaggcgtgagccacggtgcccacccgagcatacgattgttttaaaaaagactagaataaaagccaagctaaagattataaggtatctttgtcagaaatggttgtgagagtgcttcctaccctgtttttgatgctttattgtttataaccatagaattaaacccatgataaagtaaagtataagagaaagataactgacagattttaaagtcatcaaacttttttcttgctctgtcacacaggctggagcacaatggcttgatcacagctcactgcagccttgacttcccaggctcaatcttcccacctcagcctcctgagtagctgggaccataagtgcgtgtcccaccacacctggctcattattaatttttctttgttgcccaggctggtcttgaactcctgggattacagacatgagccaccacacctggtccaaactttttgcttacaacttttaatagaaataggtaaaagaaataggaaggatctaattgagttataaaacaacctttaaagatacaaaagtgaaaaagattaagccattgctttttgtcaatagaattaaaagctgttggtaaaaatattaatgtatgaaaaacttattgaaatgaaaaaactatatatatatatatatatatatatatatatatatatatatatatataaataaaatgtcgacatggctggatcttaaaaactgtcaaatgaaaaaaactaattgcaggaaagattttttttttttttttgagagggagtctcacgcagtcaacccaggttggagtgcactggggcaatcttcctgattcttggggaatcttggctcactgcaacctccgctcctggattcaagcgattctcctgcctcagcctcccgagtagctgggactataggcgcacgccaccattcccggctagtttttgtatttttagtagagatggggtttcgccatattggtcaggatggtcttgaactcctgaccttgtgatctgctcacctcggcctcccatagtgccaggattacaggcgtaagccaccgtgcccagcctaaaagatttttaagtatactattaacataaaatttggtagccgtacaaccctattcatgaaatttacacacatgccgtgaaaatgtggacaggaaaagacacactaagttcatgatgaaagccattactttttaaagaaggaacaaaggtgtaatcccagcactttggggaggctgaggcaggcgggtcacgaggtcaggagttcaagaccagcctggccaatacagtgaaaccctgtctctactgaaaatacaaaaattagccaggcgtggtggcaggtgcctgtagtcccagctacttgggaggctgaggcaggagaattgcttgaacccgggaggtgaaggttgcagtgagtcgagatcctgccattgcactccagcctgggtgacagagcaagactccaactttaaaaaaaaaaaagagagaaaaaaggaataaaggaaggaaatggcactagggaaaggcacaaagatgacttccataaactttagttattttatgctaaaagaaaatctgatacaagcacaagatgatgactacgtagattagtatttctgggttgcatgttaaaaatatgaaaataaaaacggaaatagtttccaaaacaaagattttatatatgaaattagtgaaatttcagaatggagaaaggatggttacaataaatgttaggagccctctttaaagagctcaaatggtatgtaagtatttgggatttgtggtttaattagacctagttttcagcagtctttccatgaaatgtatttttgtatttagagagatcttggtaactcttgtaaagcagagtgtcctgctacattacataacttacctaagtaggtgtgcttttttttgtttttctagagacagggtctctgctctttcacccaggctgaagtgtagtggcaccatcatagctcggtgcaaccttgatttccagggctcaagtgatcctcccatctcggtctcctgagtagttaggactataggtgcaagccaccatgtgcagctttcttttttttttttttttggagagtcatggcctcgttacattgcctgtcacctagactggccagctggtcttgaacccctggcctcaagtggtcctcctgcctcagtctcccaaagtattgggattacaggcatgaaacactgctactggcctagataagaatttttatattgtttttggttgatttaagtgctgagaacttatttgcttcagaatagatctttggttgaaatgcagttcagttttgagactaaaaaataaaccagatttactcccaaaaatgttactgtttcaaataagtaaaatatttgcacctttaaagattaggagttggctgggcatggtggctcactcctataatctcagcactttgggaggccaaggcaggcagatcacctgaggtcaggagttcaagaccagcctggccaacatggtgaaaccccatctctactaaaaatacaaaaattagctggctgtggtggcacctgcctataatcccagctactcaggaggctgaggcgggagaatcgcttgaacccaggaggcagaggttgcagggtgctgagatcgcaccactgcagtccagcctgggtgatagagccaagactctgtctcaaaaaaaaaaaaaaaaaattgggagtcatatttatataattttatttctatttctgtaaggtctaatttttgagtatttctgaacatcaataatagaatctctgtccaattagaatttgtgccttgctcagtagttttcattttaatgaatgattcaaaagaatacattagcttaagttttgttttttttaataatattttagcaaagaatggctcaagaagtactgacacatttaaaggagcatcctgatgcttggacaagagtcgacacaattttggaattttctcagaatatgaatacgaaagtaagcaagtggtggttttaaaatctgttatttcttttcttccagtcataaactttgaggaaggtatctcatttttagtattagcatttgttatctcaaattattttatattgttaatttgtttcaaaatttagtcttaagcatataattaattcttgcaaatagtcctaagaattatgaatgaagttttgtaatgggactagtatgcaaggtggcttttttggttgtctgattttgtttttttctttttagtatatgtatacaggtctaagtagcataaattctgaatgttattcagagattaaacataacattaaggaattattttgggcaagtaatcaatataatacaggccaggcacctctgacaccaagttgtgtggacagcttaaaaccctactccatggcattgggcttctaatgggacagcactcagtttttatttacaatggaaaatgttataattctggtccttttttaagtttgaacagaagggttgatcaaaatgtgttttgtctgttttaggcttgatgattcacgcttctctttaaactgccttaaagtaataaatactatggcattctgtttaatacacgaaaggtttccacttgatatacattgtgttaaaacagaagatagccatattcacatctgtttctgaaaccagactttgttaattaacagttttaaaatattaattagttttgacatcttgtaaattttaggtcaaaaatacagtccagaacttcctcaaagtgctaaccttaagtaacataacagtgtttgcctgtttgcttgcctggtaaattttgctttttatactgacagacattactaatgtttaagttgatttatcaacagtatttttaaaaactcaaatttgtcttgtgaaaaatgagatgattagaggaacagaaagaaagcaacaggtaaagaattcttcaatttacataaattacaaatgatttggtgctaaatttatgcactatgacatttggcttttatgcaatcatttttttttctttaaagatgttaacactacctgatattaatcataatgttccattatgttgattgcttgtaataggaagaaaaggggtgtcttcctgtgcaactgacacagctaggctttgacggcaggcctccacaaggtctacccttttgattccctttaactgaattctgttcatcaattgtttttgtttcatgggcggtgggaggggaaaggggaattcaatgcataaaataagtatttctaagggctcagtagaaatttctaccatagggatcatttcatgcatttattttttcatttagtctttgctgttatctgtccctcatcttcataactcagcagtggatttctcaagtttggagatgtaaggcaaaagtataattcttcagaatgtttggattgtagtgatttatcattggctttcagatttgactgtcacttcagatttttgagcaaaaatactaaaaaaaaaaagaaaaaaaattctttgaagagacaggacctctgttgcccaggctggagtgcagtggtgtgattatagctcactgtaacctcaaactcctgggcttaagtgacatttctgcctcaactttctgagtagctagggctacaggtgcgtgtcaccatgcctcgctaacttaccaatttttttatagaagtggggtctccctgtgttgctcaggctgatcttgaactcctggccctcccgccttggcctccccaaaatgttgggattacaggcgagggccactttgcctggccccaaataacattttttcaaaggaatgtaaattttttttgttttagtttcataggcaaagtctttatgtctgggagagattggattttaggatattatagtaacagatgtattcctttgacctaacctgggcaaagcatttattgggctccctgcttcaacccccttggcagaaagatgaaatatgaattgtatcttcatcaagcttatgctacctttatacagttgtagaaaatacaggttagtaaatagtaattttaggtaacagtatcaaataggaagaagtaaataaaaaagaaaggacagtgtctttccattaaaaatgtaaaaaagtttggttaaataagatgaagttatctttaagatttttatttgtaactatatttatggtgggttttgtttcttagtgttttaaaggctttttaattgatttttggcaagaggatatattgtaagcagtgcattgctttgacttactgagtcttgacaatctgattttgtgcctataaaattaaagaaaatgcttagggtagtatgtttttaaaagctaattaagaacttcaggcatttggacaactctcttttttttacatatttctcagacctagacataataaatagatatgtttttaaaagtgaacaggttagaaagcatcactatttactgctgattatgaaacattttaatagcatcaaatttgtaattttagaattttgctttggccttgtttttattttgaaagtttttaaggaatgttctgcaaatgtagtactttagttgaaatggcaaaattttcttgaagagtgtgaaatgttaaaatgaaagaaaacagcaaaaacattcactgtttgagcacaatgtagtttgggacagtctatattgtgctttggataaaatgagcattcacatgatccctttggttgaaatactaatgctcctattttattgtgtaatgactaaccattttaaagatgaactcttattctcagccaaaacttgcaatctgaggttatatgtctatatatgaatgagcttacctttcagatattatagctgattcttccctaattctctcagttgaaatgtaccacaacggttttgtcccttttcttcctcctgcctatccacactaattggtcatagtaattcaggtagtaactcctggggctttataaattattataaatattgttgactatttagagtgagtaatcagcaggagggacaaaatggcttgaaagtggtatctctgttttttaattttttatacttttagttataactttcagtatttaggaagaaatacctgaaaggtagatacagattgcaacatgcgtttgtgattattttgactgtgcacaaaagtttatctttaaattagtagaaatagcaactataagggtggggttaaaatataaaataaacccatgggttgtcttgctgctccttaagtaacacaccagtgatgcttgtaaacactttctatagaaagtatctgtgacaatactttaatatttggccaaaagcttataactcctagaggatggtaggaagcttgatagcatccaagctgctaaattcttaggagcctgttcgtgttaaagtacgtgagcctatgagcagtcatttatgctgtgaattcatatctggctgctacttttccttcgacagataagcctatttggctgctaaagggctttttatttggttcttcctcctggtgtgagcatgtataaacagcaggacgttatatagagtagcaaacaataaaatgaggaaaatgcatgaaaactcagtatatgggtgaatagatacttgtttaatatgtgtaattaaacttggtagcataatgtttttgaaactttagatgtaaatgtgtgaatgtctgtccatttgtgaatcctgagagttgccagtcctataagcaatatattcacatgcttctattctccaattttcagtactatggactacaaattttggaaaatgtgataaaaacaaggtggaagattctt

SEQ ID NO: 14955 - DNA, 488 bp, Homo sapiens
gtcccctctcccccctccccaccttccctcgccctaatcccccaacgaggaaggaaggagcagttggttcaatctctggatggagtctcattctcttgcccaggctagagtgtggtggtgcatctcggcttactgcaaactccgtctcctgggttcaagcagttctcctgcctcagcttcccaagtagctgggattacagtaatctatgccagcaattatgacaatgttagcagaccatgcagctcgtcagctgcttgatttcagccaaaaactggatatcaacttattagataatgtggtgaattgcttataccatggagaaggagcccagcaaagaatggctcaagaagtactgacacatttaaaggagcatcctgatgcttggacaagagtcgacacaattttggaattttctcagaatatgaatacgaaatactatggactacaaattttggaaaatgtgataaaaacaaggtggaagattctt

SEQ ID NO: 14956 - DNA, 1936 bp, Homo sapiens
atggaaaagatgatgaacagaacttcattcaaaatctcagtttgtttctctgcacctttcttaaggaacatgatcaacttatagaaaaaagattaaatctcagggaaactcttatggaggtaagatatgtggagcttttgctcctaaaattctgctctgcctactaataactcttaaaagtgcctttttctaaaatgtatgtaccttttgagatttcttattacttaatatttgatcagtacattatatatattctcaattctgaattacagttataagcccagttttctgattttatgttctccataaagctaggactaaaaatttataatcaaaattaaattactaattattatatcatttctaaggttaaaatttcaaagaccttattttaaaatttcagttttaattcaaataacatgcatttgttcatttaaagatatacaattcatcgtgtaatcccagcactttgggaggcggaggtgggtggatcacttgaggcaggagttcgagaccagcctggcctacatcgtgaatctctgtctctattaaaaatacaaaaaaattagctgtgcgtggtgtcacatgactgtaatcccagctcctcaggaggctgaagcacaggaattgctttagcccagtaggctgaggttgcagtgagccaagatcacagtactgcactccagcctgagtgacagagcaagactctgtctgaaggaagaaaatgtctctctctctctctttatatatatatataaacttaagtatatatatatataaacataagtatatatatatatacacacacacacacaattcagtggcatattagtatatatacaatgttatacaaccattaatacctagatccaaaacattttcatcacccgaaggtgaccctttacccctaaaacagtcactttctcctttgttctctccccaacttctggcaaccattattttggtttctgtctctgtagatatatctattctgattataccatataaagggaatcatgcatgtgaccttttgtgtctggtttcttttatttggtgttgtgttttcaatgttcttccatgttgtaacctgtatcaatacctcactttttatcatgtctgaagaatattctcattgtatgaatattcagtattttgtttgttctctcctctgtgatggtacatttgggttgtgataccacttattggcacccaaggccttttaaataaatgtcgttccattaggagacatgataaaaatacatattgatcaactactatgtgagagatttttgaagtgctttagggcatgtcagaagaagcagagttactccagagtttgctgtctatttgataagtattgaaatctgagttgtgatgaataaaacatgaatttttattttcccttaaggtgtaacaagtgaaaagcaatttgaagttggtaatgtttaagaattattttaacagttttggtcttctgtgtaggcccttcattatatgttgttggtatctgaagtagaagaaactgaaatctttaaaatttgtcttgaatactggaatcatttggctgctgaactctatagagagagtccattctctacatctgcctctccgttgctttctggaagtcaacattttgatgttcctcccaggagacagctatatttgcccatgttattcaaggtaacagagcggttggttgagtgttcttcctgttgcatactgtggttttgaggtctgaatccaaatacttctaatctgtgtaaataaattagctataaaaagagaacccaacaacttctccatgagtgtggaaaactagaacatgaaaggagttgagtctagaaccttgattctcaagagtgtggtccttctctcagtatcaacattggttgtgatttcgttaggcaaattcattggccacctgccaatctactaa

SEQ ID NO: 14957 - DNA, 573 bp, Homo sapiens
atggaaaagatgatgaacagaacttcattcaaaatctcagtttgtttctctgcacctttcttaaggaacatgatcaacttatagaaaaaagattaaatctcagggaaactcttatggaggcccttcattatatgttgttggtatctgaagtagaagaaactgaaatctttaaaatttgtcttgaatactggaatcatttggctgctgaactctatagagagagtccattctctacatctgcctctccgttgctttctggaagtcaacattttgatgttcctcccaggagacagctatatttgcccatgttattcaaggtaacagagcggttggttgagtgttcttcctgttgcatactgtggttttgaggtctgaatccaaatacttctaatctgtgtaaataaattagctataaaaagagaacccaacaacttctccatgagtgtggaaaactagaacatgaaaggagttgagtctagaaccttgattctcaagagtgtggtccttctctcagtatcaacattggttgtgatttcgttaggcaaattcattggccacctgccaatctactaa

SEQ ID NO: 14958 - DNA, 6039 bp, Homo sapiens
ggaagaatttatttagatatgcttaatgtatacaagtgcctcagtgaaaatatttctgcagctatccaagctaatggtaggtgattctgatttcttacacaatgcagtataaacaaaccacttctcttctactgccttaagtcaaacatttgatgttttttacagatttaaatcagacctcccatttcccaaatgaccctagacatatttaaaacagttaagtgtacctttcccttttaaaattagtcttaaagcttattttcccaataaattttgtgaacttttggctttaaactttttaatggtaaaatggaattgcatctaatgtacacctgagtaccactgtataagtttagtggtaaaattagattccatttgattctgttttgtaggtgaaatggttacaaagcaaccattgattagaagtatgcgaactgtaaaaagggaaactttaaagttaatatctggttgggtgagccgatccaatgatccacagatggtaagtgagagatgctttgcttttgatttctagtgttgatgctgtgttttatggaatatgctatactctattatgtgcattttgctaatttaaagcatatcaactttgtggttattttatggcattttatttattgtagtccttacgttaatatactaatagctgtattccatcttcaaaagaaactgctgttaatcagtagcgaagggtggtgatatgtaacaagatagctaagaaaattgggtcattttatgtttccatagataggttaggaggatttaattaatggagtaccggtgcagtttttgcattcctcttgatttttagaacaattgctagagctacaaagttgtcattactttacctctttagcaaagtgattgcttcccagattaaaggcctgaaagtcttttttacaccctttttcctaaatgatttgcagaaaaggaaatcattttcagtaataaaaaccagctgcgtatgcctcaacttgtaaaattgtgaattagttttaggttttaactgtatcgtttcattcttgttattcaattgagccttgggagagtccaaaaaattctaatactactattacttggaatagtgttggttttttgttttttggtttttttttttacaagtgtgctagttattttcatagttttgaaatttcagtattgtttcttgttaaggaaatacttttcagtaaacttgttctgaatataattcttgtggaatacttaagttggctaacctaaatatcgaaaggttctgaacatgcgtattatgtgaacagaactgtatttaaaatttgaaagcagaaagtaagatgtattgaaggaattgtgatgtttgtaatttacaagaagcttgagcacgtgtcgggagcacagtgggaataatacaaagggtatcatcttttgtaacattaatgttaaagtttgggatatttgttcacatgaaacattgtgtttattttccttgtcttggcttttcacggtggctcatgcctgtaatcccagcactttgggaggccgaggcgggtggatcacttgaagtcaggaggctgaggcaggagaatcacttgaaccccagaggtggaggtgacagtgagccaagattgcgccattgcaccccagtctgggccacaagtgggaaacttcgtctcaaaaaaaaaaaaagaacaagaagttactctttaagtataactcagtttacttagaatcatgaaaatcttactgggcattgtagcatgcacctgtaatcccaaccaccagggagggtaaggcaggcgaatcaccccagctcaagtccagtttaggcaacatggcaagattcagtttcaaaaaaataatagaaatccatagtctttcttattttctgagagtaattgattgatgttatttctgcttgtgaaaatactcaccagttagcattcattagattaaaacattagtctgagttgggtggatcacgaggtcaggaaatcaagaccatcctggctaacacggtgaaacaccccgtctctactaaaaatataaaaaattagctgggcgtggtggcaggtgcctgtactcccagctactcgataggctgaggcaggagaatggcgtgaacctggaggcggagcttgcagtgagccaagatggcaccactgcactccagcctgggcgacagagcaagactccgtctcaaaaataaaaagacagtattgagggctcgcttgctgccatcttacatatacagtatacgtagaatcctgattctgccacctaagttggagacacccactgaattttgagcctcacttttcttattgtgagagttttgtagctgggcatggtgctatacctatagtcccagctactcaggagactgaggcacaagaattgcttgaacctgggaggtggaggttgcagtgagcagagatttgccactgcactctggtctgagtgacagtgagactgtctcaaaaaaaaaaagtcttgaatgacagtgtgtccatgagacttcccaacccattgtgatttcctgctttcttttgctaaaaactgttttgacgtaggaaaccctaatacaaacacaagattttcctgttttcagtagatgatcatgctacatctcatagacaggaataaccttgttgtttaaaatagtcaccatgtacctaaattaaaacataacttttttttccctccccaacaggtcgctgaaaattttgttccccctctgttggatgcagttctcattgattatcagagaaatgtcccagctgctagagaaccagaagtgcttagtactatggccataattgtcaacaagttagggggacatataacagctgaaatacctcaaatatttgatgctgtttttgaatgcacattgaatatgataaataaggtgtgtaatatttcagttatgtaagggggaaattctgcaggatagccttaattcttgaaagctaaagtatgtctgtggatataacataattttaatgccatggagtttaaatatttaaacttgtatattagggaaatactttcttggttttcaagaacttacttcccaggagtttgaaaccaacctgggcaatatagtgagacttcatctctacaaaaagttcaaaaagtaaccagtcatggtggcatgtgccggtagtcccaactactcgaaaggctgaagtgggggggggggtcacttgagcctgggagttcaagatggcagtgagctgagattgcgccactgcactccaagaagaagaatttactacacagaatcttgattggtaaaaagtaaatatggaaaacagattttagcattcacatggtatgtagcatttattgaaacctcataggtcggggcatccttttatgaacgtagttgtattaattggtttgaataaatgagaaagtaagtctgcatgtttcaattataaaagtgtagtatatgcttataagaaactgaaaaatgtgttaacaagagaaaataggctggccatggtggcttacacctgtaatcccagcacttcagaaggccaaggcgggcggatgacctgaggtcgggagttcaagaccagcctgcctaacgtggcaaaaccccatctctattaaaaatacaaaaatggccaggcgtggtggctcaacacctgtaatcccaacactttgagaggccgaggccggtggatcacctgaggtcaggatttcaagaccagcctgaccaacatggtgaaaccccatctctactcaaagattaggctgggtgccgtggctcacgcttgtaatcccagcactttgggaggccgaggtgggcagatcacgaggtcaggagatggagaccatggtgaaaccctgtctctactaaaaatacaaaaaattatccgggtgtggtggtgggcgcctgtagtcccagctactcggagaggctgaggcaggagaatggcatgaacccgggaggcggagcttgcagtgagccaagatcgcgccacgcactccagcctgggtgacagagcaagactctgtctaaagaaaaaaaattagctgggcatggtgccgcatgcctgtagtcccagctactcgggaggctgaggcaggagaatctcttgaacccaggaggcggaggttgcagtcagctgagattgcgccactgcactacagcctgggtgacagagtgagactgtttaaaaagaaaaaagagataaaagatacgttaagtggacacatttacacggtaacttaaatttttttgtaatctgtagtggtgatttcaaattaaaaacaaaagtgatagtagtagtcttatggtaataatggtttagatgagttctctattaaaaaggttgtctttctccttcaatttgataactcatgtgcgtaacgggacagtttcattttccgtgagaggtggattgtattttacttgggtttacctttcaggaggcattctatcttctgtggtttattgaaaactccaaatatttatactggattaagccttgcttttcccctcctgtctagcacaacaaagacactgaaacattattttgtttccaccacttatttttaggactttgaagaatatcctgaacatagaacgaactttttcttactacttcaggctgtcaattctcattgtttcccagcattccttgctattccacctacacagtttaaacttgttttggattccatcatttgggctttcaaacatactatgaggaatgtcgcagatacgggtaaataaaagatgttcttttattcatttgcctgccaatccaaaaatacaaatatagttaattgtacataggaaggtattacttgttcagagttttgagtgtgtgaattacatatatgaacatctgagaaaatcctataagcagtttaatcaactgttccactccactccaagtgagtccataggcagaattgagttatggggagagcggcctagtaataattggtttgcgtaatacaaagttctactgggtagtgatgttgtagaagttcatatagaatcagctgagctttcagaaatggtgaaagggtggtaatagtcataacttagattgtaatttttttcccataggcttttaaaaaatattcatgaggttctttttttatttcaatagtttttggggaacaggtggtttttggttacatgaataagttcttcagtggtgatttctgagattttggtgcacctgtcatgtgagcagtatgaactctactttatgtgtagtcttatccctcatgtgtatgaactccaccttatgtgtagtcttatccctcacccactcctgcccttccccacaagtccccaaagtccattatatgatctttatgcctttacatcttcacagtttagctctcacacaacttattataatttataagtaagccagcattggatatagttgtattccattattaatttaagaaaccttatgcaagtaattattagtcatcatcccaaaaaaaagggagaacagggttagattcagaatactttgataagagctaaatactatcatgagtgctgtcagtctgtagtaactttccattggtattctatgtcttttaggcttacagatactttttacactcttacaaaatgttgcacaagaagaagctgcagctcagagtttttatcaaacttatttttgtgatattctccagcatatcttttctgttgtgacagacacttcacatactgctggtaagaatttaatacgatttaaatgttaagtgccagctgggcacagggcctcacgcctataatcccagcactttgggaggtcgaggcggggagattatgaggtcaggagttcgagaacagcctggccaccatggtgaaactgtctgtactaaaaataccataaaaaaataaaagatacaataaaaatactgggcatggtggcatgtgattgcaatcccacctattcgggaggctgaggcaggagaatggcttggaccgaggaggcagaggttgcagtgaactaagattgcgccacggcattccagcttgggtgacagagcgagactccgtct

SEQ ID NO: 14959 - DNA, 2676 bp, Homo sapiens
ggaagaatttatttagatatgcttaatgtatacaagtgcctcagtgaaaatatttctgcagctatccaagctaatggtgaaatggttacaaagcaaccattgattagaagtatgcgaactgtaaaaagggaaactttaaagttaatatctggttgggtgagccgatccaatgatccacagatggtcgctgaaaattttgttccccctctgttggatgcagttctcattgattatcagagaaatgtcccagctgctagagaaccagaagtgcttagtactatggccataattgtcaacaagttagggggacatataacagctgaaatacctcaaatatttgatgctgtttttgaatgcacattgaatatgataaataaggtgtgtaatatttcagttatgtaagggggaaattctgcaggatagccttaattcttgaaagctaaagtatgtctgtggatataacataattttaatgccatggagtttaaatatttaaacttgtatattagggaaatactttcttggttttcaagaacttacttcccaggagtttgaaaccaacctgggcaatatagtgagacttcatctctacaaaaagttcaaaaagtaaccagtcatggtggcatgtgccggtagtcccaactactcgaaaggctgaagtgggggggggggtcacttgagcctgggagttcaagatggcagtgagctgagattgcgccactgcactccaagaagaagaatttactacacagaatcttgattggtaaaaagtaaatatggaaaacagattttagcattcacatggtatgtagcatttattgaaacctcataggtcggggcatccttttatgaacgtagttgtattaattggtttgaataaatgagaaagtaagtctgcatgtttcaattataaaagtgtagtatatgcttataagaaactgaaaaatgtgttaacaagagaaaataggctggccatggtggcttacacctgtaatcccagcacttcagaaggccaaggcgggcggatgacctgaggtcgggagttcaagaccagcctgcctaacgtggcaaaaccccatctctattaaaaatacaaaaatggccaggcgtggtggctcaacacctgtaatcccaacactttgagaggccgaggccggtggatcacctgaggtcaggatttcaagaccagcctgaccaacatggtgaaaccccatctctactcaaagattaggctgggtgccgtggctcacgcttgtaatcccagcactttgggaggccgaggtgggcagatcacgaggtcaggagatggagaccatggtgaaaccctgtctctactaaaaatacaaaaaattatccgggtgtggtggtgggcgcctgtagtcccagctactcggagaggctgaggcaggagaatggcatgaacccgggaggcggagcttgcagtgagccaagatcgcgccacgcactccagcctgggtgacagagcaagactctgtctaaagaaaaaaaattagctgggcatggtgccgcatgcctgtagtcccagctactcgggaggctgaggcaggagaatctcttgaacccaggaggcggaggttgcagtcagctgagattgcgccactgcactacagcctgggtgacagagtgagactgtttaaaaagaaaaaagagataaaagatacgttaagtggacacatttacacggtaacttaaatttttttgtaatctgtagtggtgatttcaaattaaaaacaaaagtgatagtagtagtcttatggtaataatggtttagatgagttctctattaaaaaggttgtctttctccttcaatttgataactcatgtgcgtaacgggacagtttcattttccgtgagaggtggattgtattttacttgggtttacctttcaggaggcattctatcttctgtggtttattgaaaactccaaatatttatactggattaagccttgcttttcccctcctgtctagcacaacaaagacactgaaacattattttgtttccaccacttatttttaggactttgaagaatatcctgaacatagaacgaactttttcttactacttcaggctgtcaattctcattgtttcccagcattccttgctattccacctacacagtttaaacttgttttggattccatcatttgggctttcaaacatactatgaggaatgtcgcagatacgggcttacagatactttttacactcttacaaaatgttgcacaagaagaagctgcagctcagagtttttatcaaacttatttttgtgatattctccagcatatcttttctgttgtgacagacacttcacatactgctggtaagaatttaatacgatttaaatgttaagtgccagctgggcacagggcctcacgcctataatcccagcactttgggaggtcgaggcggggagattatgaggtcaggagttcgagaacagcctggccaccatggtgaaactgtctgtactaaaaataccataaaaaaataaaagatacaataaaaatactgggcatggtggcatgtgattgcaatcccacctattcgggaggctgaggcaggagaatggcttggaccgaggaggcagaggttgcagtgaactaagattgcgccacggcattccagcttgggtgacagagcgagactccgtct

SEQ ID NO: 14960 - DNA, 23486 bp, Homo sapiens
tcacatctgtttctgaaaccagactttgttaattaacagttttaaaatattaattagttttgacatcttgtaaattttaggtcaaaaatacagtccagaacttcctcaaagtgctaaccttaagtaacataacagtgtttgcctgtttgcttgcctggtaaattttgctttttatactgacagacattactaatgtttaagttgatttatcaacagtatttttaaaaactcaaatttgtcttgtgaaaaatgagatgattagaggaacagaaagaaagcaacaggtaaagaattcttcaatttacataaattacaaatgatttggtgctaaatttatgcactatgacatttggcttttatgcaatcatttttttttctttaaagatgttaacactacctgatattaatcataatgttccattatgttgattgcttgtaataggaagaaaaggggtgtcttcctgtgcaactgacacagctaggctttgacggcaggcctccacaaggtctacccttttgattccctttaactgaattctgttcatcaattgtttttgtttcatgggcggtgggaggggaaaggggaattcaatgcataaaataagtatttctaagggctcagtagaaatttctaccatagggatcatttcatgcatttattttttcatttagtctttgctgttatctgtccctcatcttcataactcagcagtggatttctcaagtttggagatgtaaggcaaaagtataattcttcagaatgtttggattgtagtgatttatcattggctttcagatttgactgtcacttcagatttttgagcaaaaatactaaaaaaaaaaagaaaaaaaattctttgaagagacaggacctctgttgcccaggctggagtgcagtggtgtgattatagctcactgtaacctcaaactcctgggcttaagtgacatttctgcctcaactttctgagtagctagggctacaggtgcgtgtcaccatgcctcgctaacttaccaatttttttatagaagtggggtctccctgtgttgctcaggctgatcttgaactcctggccctcccgccttggcctccccaaaatgttgggattacaggcgagggccactttgcctggccccaaataacattttttcaaaggaatgtaaattttttttgttttagtttcataggcaaagtctttatgtctgggagagattggattttaggatattatagtaacagatgtattcctttgacctaacctgggcaaagcatttattgggctccctgcttcaacccccttggcagaaagatgaaatatgaattgtatcttcatcaagcttatgctacctttatacagttgtagaaaatacaggttagtaaatagtaattttaggtaacagtatcaaataggaagaagtaaataaaaaagaaaggacagtgtctttccattaaaaatgtaaaaaagtttggttaaataagatgaagttatctttaagatttttatttgtaactatatttatggtgggttttgtttcttagtgttttaaaggctttttaattgatttttggcaagaggatatattgtaagcagtgcattgctttgacttactgagtcttgacaatctgattttgtgcctataaaattaaagaaaatgcttagggtagtatgtttttaaaagctaattaagaacttcaggcatttggacaactctcttttttttacatatttctcagacctagacataataaatagatatgtttttaaaagtgaacaggttagaaagcatcactatttactgctgattatgaaacattttaatagcatcaaatttgtaattttagaattttgctttggccttgtttttattttgaaagtttttaaggaatgttctgcaaatgtagtactttagttgaaatggcaaaattttcttgaagagtgtgaaatgttaaaatgaaagaaaacagcaaaaacattcactgtttgagcacaatgtagtttgggacagtctatattgtgctttggataaaatgagcattcacatgatccctttggttgaaatactaatgctcctattttattgtgtaatgactaaccattttaaagatgaactcttattctcagccaaaacttgcaatctgaggttatatgtctatatatgaatgagcttacctttcagatattatagctgattcttccctaattctctcagttgaaatgtaccacaacggttttgtcccttttcttcctcctgcctatccacactaattggtcatagtaattcaggtagtaactcctggggctttataaattattataaatattgttgactatttagagtgagtaatcagcaggagggacaaaatggcttgaaagtggtatctctgttttttaattttttatacttttagttataactttcagtatttaggaagaaatacctgaaaggtagatacagattgcaacatgcgtttgtgattattttgactgtgcacaaaagtttatctttaaattagtagaaatagcaactataagggtggggttaaaatataaaataaacccatgggttgtcttgctgctccttaagtaacacaccagtgatgcttgtaaacactttctatagaaagtatctgtgacaatactttaatatttggccaaaagcttataactcctagaggatggtaggaagcttgatagcatccaagctgctaaattcttaggagcctgttcgtgttaaagtacgtgagcctatgagcagtcatttatgctgtgaattcatatctggctgctacttttccttcgacagataagcctatttggctgctaaagggctttttatttggttcttcctcctggtgtgagcatgtataaacagcaggacgttatatagagtagcaaacaataaaatgaggaaaatgcatgaaaactcagtatatgggtgaatagatacttgtttaatatgtgtaattaaacttggtagcataatgtttttgaaactttagatgtaaatgtgtgaatgtctgtccatttgtgaatcctgagagttgccagtcctataagcaatatattcacatgcttctattctccaattttcagtactatggactacaaattttggaaaatgtgataaaaacaaggtggaagattcttccaaggaaccagtgcgaaggtaggaaaataaagaattataaattcagagttttgtttttcctggcatttttattgtagttgactgtttgagggggcatgtaatgaatctttagtatattttgctctaatggagcttattgcttttatcatgaagcaaacaggtctgtttgtattggtgggtacaggaaggccacttacaggttatcttttgggagaaagaggagactggactgttgaaaactctgacaataaatattctagttaaaaatatgggctatggcacagtggcccacgcctgtaatcctaacacttcaggaggccgaggcaagtagatcgcttgagtctgggagttctataccagcctaggcagtatagcaagacctcatctggacaaaaatttaaaaaattagctgggtatggtggttcatgtctgtggtcccagctatgtgggagcattgcttgagctcaaaaggtcgagactgcagtgagccatgatcctgccactgcacttcagcctgggtgacaagagtgagaccccatctccaaaaaaacatatatataaataaaatatgggccgggcacagtggctcaagcctgtaatcccaggacttcgtgaggctgaagtgggagggtcatttaaggccagaagtttgagaccatcctgggtaacatagcgagaccctgtgtttacaaaaaatttaaaaattagccaggtattttggtgcaggtggcggcggggacaggggtatcagtggggtgaggtaggaggatcccttgagccaagaggttgagactgcagtgagccatcattgtgccactgtactctagcctgggcaacgagcgaaactccgtctcaaaaaacaagaacaacaacaacaaaaaaaaccatatgtaaggttaactcgggaatggaaaagccaagtactaaagatcacaaagctgttttgccttttgtggttctgggaatgccttggaagaggttggcttctgaaatgaagaaagatcagaaaatgaaggtgtagtgatacctgttaatgagtaatttaacttttctgtctgtgctaccttgaggaatgtagtcatattttgagaaacctgaggcaacattagtttcttgggattctttgatttagctaatttcagttatgatacactgcctttttacctactatatttcatttatctctgaaaaatagaaatttttttcttgactttattatggggcacatgatacttctagtagtattttcatttaaaatatgtctaatttctttgattatttgtcttttaagtattgtccttcacctgcattctcttatcatcattatggtagaatagtgacatggatttacttagctaatctgacttaaaccttgacaaagtttgagcacatttagagttgaatgtgatgagattttaatgccagtgtctttttttaagaatattaagtatattcagtggcaatatctttaatacatcataaatcatagattaagagtgatagtgcaggagcaaataatgtgccctaaaagaggttctcatttctttaaatgttttattatggtttgaaactattttagatcacgttctgtgatggactgagaaattaataagcacaatttgactatgtggtccaagtaggtccttcatactttattcttcagggatctttagtgtagtcattccttgtttctttactactattgttttactcatgtgttatgagccccagatttaattttggccatggtctgccgtaccaagaaaaggtgatttacttctgtcccattttactgttgtataattttaaatcctccttttgttcttaaatctgcatctctgttttttatcacatttgatggttctggaagatgttttccaggttgaaaatagatatgattatactagtttatcaacactgtagttacatttgttacagacaaaattaatttaaaaaatttttgtttctttctttcttctttgttgagacagattctcactctgttcctcaggctggagtgcattggcaccatcactgcagcttcaaatagctgcggtcaagcaatcctcccacctcagcctcccgagtagctgggaacataggcatgccccaccatgccctactaaattttttttttttttaatgttttgtagggatggtgtctcgctgtgttgcccatgctgctggctgctgggcttgagcaatcctcccaccttggcctgccagagtgctgggattgtaagcatgagccaccatacttagtcaacatgattacctttttaattttaactgggaggcttctctaacctaaagatttatttcacaaaatacactagaacttctgaacattaattttccttcatctttaagtaactttggtattggaaattacataaattaatttaaaacattttatttcctttttctgtaagtgtcctgtcttttaaaggtattcgctttgctttttgctgtagctataccctttgtccaactaccatagcatatatatttgttcacctggggtgcatattgtgcgtttcctttgtaccgattactactaaatattaaggttataaaaatatacatgtacatcaaagtgctgtatgtcacagtgttatagttgggaagacaaaacacatgtaaaagaggaatcataaatcagcaaattaggtgtatataatgagtgcttcacaagctaaaagaacagaatgatgtctaagtccggccctttagctaagtttcattcacataattggaaagaaatgcctggtatattttaaaggaaggaaaggtttcactgcataagagtatgccaaaattagattcctgcattttttttctgatgtagaatttgttttatctgcttttaggttcttgtccacagcatgttaatttttacgtggtgtttttttttttttttttttttttttgagacggagtcttgctctgttgcccaggctggagtgcagtggcgcagtcttggctcactgcaagctccacctcctgggttcatgccattctcctgtctcagcctcctgagtagctgggactacaggcacccgccaccacacccagctaattttttttttttttttttagtagagatggtttcactatgttagccaggaaggtctcgatttcctgaccttttggtcctcccgcctcggcctccatgcctgttgagattacaggcatgagccactgcctggctaacatgttcttttaaattaatgacattttcaatttaggcctcttgtataaatactgtcaggaaaatctcatgattcttgagtgggttagatgtctcttgctgtgttatacgttactgtatcctgtaccagtgggtcacaggagaataaaattttaaagagcaaaagataggctcagcacggtggctcacgcctgtaatcccagcactttgggaggccaaggcaggcagataacgaggtcaggagtttgagaccagtcttaccaacatggagaaaccctatctctactaaaaatacaaaaattagccgggcgtggtggcacatgcctgtaatcccagctactcaggaggctgaggcaagagaattgcttgaacccgggaggcggaggttgcagtgagctgagatcacgccattgcactccaacagagcgagacttcatctcaaaaaaaaagagcaaaagatagacataattagaaagtaaggatgtttaaaagaacatttaattttccaaaagatatttttatagcaagagaaatggcgagataataaaacatttaaataagttgagatttgttatataaaatttattacatttctctggattttcatttagctttaggccgtaagtgtgtgtctatttgtttgtgttttatgtgttttgtccctcacaccccacattacacttggctgttttagtcactttattccccatccttcaaactataagctccttgatattggggctcagagtgtctttttttctttggtttttttttggtctgtttttgtgtttgtttttgtttaagacagagtctcgctctgttgcccaggctggagtgcagtggcgtgatctcggctcagtgcaagctctgcctcccggtttcacaccattctcctgcctcagcctcctgagtatctgggactgcaggcgcctgccaccacgcccggctaactttgtgtgtgtgtgtgtgtgtgtgtgtgtgtgtgtgtgtgtgtgtgtgttttgttttttgttttttgtttttttttttagtagagacggggtttcaccgtgttagccaggatggtctcgatctcctgacctcgtcatccgcctgcctcggcctcccaaagtgctgggattacaggtgcgaaccaccgcgcctggctttttctttgttttttaaagatgtagggtttcactctgttgctcaggctggagtacagtggtgcaatcatggttcactgcagcctggaactcctgggctccagtgatcctcttgcctcaggctttttttcttttttttttgtgagacagagtccctctctgtcacccaggctggagtgcagtggcgcagtcttggctcactgcaccctctgcctcctgggctcaagtgattctcatgtgtcagtctcccaagtagctgggattacagatgcacaccaccatgcctggctaatttttgtatttgttttagtaaggacagggtttcgccatgttgaccaggctggtctcgaactcctgacttcaggtgatcctcaccctcccagagtgctgggattataggcgtgagccattgcatcctgccctcttgcctcagccttgagagtagctagcactgtaggtccgcaccaccatgcccagctaattaaaaaaaatttttttttttagagatagagtctcactgtgaagcccaggctggttttaaactcctgggtttaaagcagtcttcctactttgccgtcccaaattgctaccaagcctggctgggaaattttaatatgtcaaatggaagaattccctaataaagagtggttgctattcatggtagtcttttatttattcatttgttttgagacaagatctcactgtatcacccatgctggagtacagtggcacaatcatagcacactgcagccttaaactcctgagctcaggcagttaccacgccttagcctgccaaaatagctaggactacaggcatgtgccaccacacccagctaagtttttctaattttgatagagacacagtttgcctatgttgtccaggcttgtcttgaactcctggcctcaagtgatgctccaacctcagcatcccaaagtgctggggttacaggtatatcaccactcctagccatcactgaagtcttaaaggtcctctaggactgccagtggtgttgattctttatcagagtcatgattcagataattccccatccctttttaaaaatggcatttaggctgggtgtggtggcttacacctgtaatcccagcactttgggaggctgaggtgggcagatcacctgaggtcagttcgagactagcctggccagtgtggtgaaacccggtctctactaaaaataccaaaattagctgagtgtggtggcagatgcctttaatcccagctaattgagaggctgaggcaagagaatcggttgaacctgggaggtggagcttacagtgagccaagacagcacgactgcactccagcctgggcaacaagagtgaaactctgaaattaaaaaataattaattaattaattaaaaatggcatttagataattcaaataaaaaaaaagaggaagcctcctttgttcctgttggggggaaagatgatgctatataaaggtatttctgtactttttatttaaaccaagggattgttttaatcagttaatgtgtatggcttatagatcatttcattgattgataaaaacttactcacaggcggggcatggtggctcatgcctgtaatcccagcactttgggaggctgaggcgggcagatcacctgaggtccggagttcgagaccagcctgaccaacatggagaaaccccatctctactacaaatacaaaattagccaggcgtggtggcgcatgcctgtaatcccagctattggggaggctgaggcaggagaatcgcttgaacccgggaggcagaggtcgcggtgagctgagatcgcgccattgcactacggcctgggcaccaagagcgaaactcagtctcaaaaaaaaacccacacttggctcacattgaatagagaagaagcgaatttatgaaaaaagtaatccaaagtggaaagatcgtaattacaaggtttgattttttttttttgtttggtttggttttttcgaggcggagtttcgctgttgttgcccaggctggagtgcagtggctcaatctccactcactgcagcctccgcctcctgggttcaagctattctcctgcctcagcctcccgagtagctgggattacaggcatgtgccaccatgcaaggttggttttgttttgttttgtttttttttaattttgcgacggagtttcgctctgtcgcccaggctggagtgtagtggcgagatcttgggtcactggatgctcagcctcctgggttcacaccattcttctgcctcagcctcctgagtagctgggactacaggtgcctgctaccacgtctggctaattttgtgtgtgtgtgtgtgtgtgtgtgtgtgtgtgtgtggtttttttttttttttttagtagagatggggtttcaccgtgttagccaggatggtctcgatctcctgacctcgtgatccaccctcctcggcctcccaaagtgctgggattacaggcgtgagccaccgtgcccggccaggttggattttataagtagttgggccactaaaatttctgagttgtacagtttcatgtctttagttggcagaccaaagctgatccactcataaaattttatttagtgctctcctttgacgtgagacacgtggtatatttattggcaccgtaatactggctacattatttgacctcatatttcagtttgtgttgcaaggttttgggcattagagctaatgtataggaagccctgtgcttacatatgctgagtatgagtaagtagtgggttaccaactgtttttgatgaaatatctgcatttcaccaaattgccatataccagtctcaaaatatcctgaaccttctgaaataccttcctaagtgagctcactaacacctacttttctgtgtcctttacaattttttcaccacaaagtctcaaagtttcagaaacggaactaatagggtcacttctgctgaagatctcctgtagtattgaagatatttaacatgtttcctttaattgatattggcctttgagaatttttgtatttgccttatttattaggtttaaagtgtacagttggataagttttatcttgtgcatgctcctgtgaaactacctctgtataatcaagatctgcctctatccgattactttcaccttcactgcccctcttcacatgtgcttgttgtcacttgcttggtaagagtggaatggctggattgtgtggatttttttttttttttttttaagacagtcacactactctgtcgcccaggctggagtgcagtgtcatgatcttggctcattgcaacctctggctctcgggttcaagcgattcttgtgcctcagcctcccaagtaggtgggattacaagcatgcaccaccacaccagcataatttttgtttttgtaatagagtttcgccatattggcctggctggtctcaaactcccgacctcaggtgatctgtccacttcggcctctcacagtgctgagattatactcataagccactgcgcccagcccatatggatgttttggtgtatgtttaagcatccaactgtattccaaagtggtcatgtcagtctcaccagcagtgtataagtatgtttcacatctcggctgacatttggtatagacaatgtttttagtttggctattgtagtgcatatacaatagcatctcatggtggttttaatttctttcttttttttttttttttttaaagacagagtcttgctctgtcgcccaggctggagtgcagtggcctgatctcggctgactgcaacctctgtttcccgggttcaagcgattctcctgcctcagcctcctgagtagctgagactacaggcatgtgccaccacacccagctaattattttgtatttttagtagagacgagctttcaccatgttggccaggatggtctcgaactcctgacctggtaatcagcccacctcagcctcccaaagtgctgggattacaggcatgagccaccacgcccagccttaatttccatgtggagtagtgttgttctgtgttccatcacatatccttacatgttctttgccatgccagtatgtttttggtgaaatgtctgttcaaaaattttgctcagttttttttttttttgagacggagcctggctctattgccccagctggagtgtggtggcacaatctcagctcactgcaacctctgcctcctgggttcaagcgattctcctgtctcagtctcctgagtagctgggattacaggtatgcaccaccacgccctgctactttttcgtatttttagtagtagagatggggtttcaccatgttagccacgctggtctctatctcctgacctcgtgatccacctgcctcagcctcccaaagcgctaggattacaggcgtgtaagcccaccatgccccgccaattttgcccagtttttattgggctattcccttattgagatctaagggctctttgtattctagtcaggagtattttgttaactgtatattttgcaagtgttttgtctgtggcttcctgtttaatttttgtaatggtgtcttttgcagagcaaaaatttcagattttgattaaaatcagtgttgatttttttttctttatatagttgatgttttttgtgttgtattcaagaaatctttgtcatgcaaaggtcacttaagattttctgtaagtttttggctgggcacagtggctcacgcctgtaattccagcaatttgggaggccgaggcaggcagatctcttgaggtcagcagttcgagacgagcctggtcaacagggtgaaaccgcatgtctactaaagatacaaaaattagctgggtgtgttggtgaattgcttgaactggggaggcagagactgcagtaagcctagatcacaccactgccctccagcctgggtgacagagcaagactctctctcaaaaaaaaaaaaaaaaaaaagatattctgtacgttttcttatagaacctttatagttttagcttttgcattaagatctgtgatttggctgggcacagtagctcacaattgtaatcccagcactgggaggccaaggcaggcggaaacaatacaaacaaattagccaggcgtggtggcatgcacctgtaatcccgactgccaggaagctgaggtgggaggaatgcttgagttgagttcgggaggtggaggttgcagtgagccgagatcatgccactgcactccagcctgggcgacaaagaccctgtctgaaaaaagcatcatgtgattcattttactcaatttttgtatatgaggtgaggtaagggtcaaggtttatatatttatttgagacagagtcatgctctgtctcctggccagagtacagtggcgcgatcttggctcactgcaaactccacctgccagattacaggtgcacaccaccacacccggctaatttttgtatttttagtagagatggggttgccccatgttggccaggctggtctggaactccagacctcaagtgatccgccagtctcagcctcccaaagtgctgggattatgtgtgagctaccgcacccagctccccaactttgtttctaaaaggtttggctattgttggttttttgctgttccataaaaattttagagtgaaatctggcaaatttcaacaaaagctgtcctgaaatttttattgagattgccttggatctgtggatgcatttggagagaatgaacatctttaatgtcaattcctgattatttcttgctaatatagagaattgccattgttcacttatctcttgaacgtgtagtttaatccagctagtcaaagcccagttcaaactcactttcccttcctgttgtgagaaaacacctcaattttgcaaaagctcttggaatttaacatttctgctgcttttccctgtatgtgtggtgtttagtcttttcatagttcgttgactatggaattcagagcagaaaccctatttcctaatttccttgggaagttttcagaactagatgataatgtaagtttctaataagttgatagtgttactcagaggtgattgtttcatttatgattttgaaaagaaaatgtaaatattagacttaagtccttgcatctaaaacaaattcatgagaaatcccacagaatacaatgttagagatgggagcaaaaattatcagtctaatctcagagagttgacaggcattccaaatcgttttttgtcagtatttaaaccatggtaggataatgtaagaaatatacttaatgcctggtgcgatgtctcacgcctgtaatcccagcactttgggaggcctaggcaggcaattgtctgaggtcaggagttcgagaccagtctggccaacatggtgaaaccccgtctctactaaaaatacaaaaaaaattagccgggcatggtggcgtgtgcctgtaatcccagaatcccagctactcggtaggttgcagcaggggagttgcttggaccagggaggtggaggctgcagtgagctgtgatcatgccactgcattccagcctgggcgacagagcaaggctccgtctcaaaaagaaaaaaaagaaaagaaaaagaaatatctgtaagctataaattatgtttttcatttctaaaaaaaacaaggcaggccaggcacagtgattgaggcctgcaatcccagcagtttgggaggctctcttgagcccagaaatttgagatcagccaggacaagatagttagacttctctctactaaaaatacagaaaactagcagtgtatggtcgagtgcccctgtagtttcagccactcaggaggctgaggcgggagaatcatttgagtccaggcaggaggtcgagccctgattgattgcaccactgcactccagcctgggcaacagagtgataatatctgaaaagataggctgggcacagtggctcttgcctgtaatcccaggactttgggaggctgaggcaggcagatcacctgaggttgggagttcgagatcagcctgaccaacatggtgaaaccccatctctactaaaaataacaaaaaaattagctgggcgtggtggcgcattcctgtaatccctgctactctgaaggctgaggccggagaattgcttaaacctgggaggtggaggttgcagtgagccgagattgcgccattgcattccagcctgggcaacaagaacgaaactctgtctaaaaaataaagaaaagaaagcagtattttcaggcacattgtatatgattgataggaatagtatttccatttctggttaatgtaacaatttgccccattccaagtattttgattacaggcctccatgaaaggcctatacttgatacctaacagtgtttgatccctagcttacatccatgtaacttttttttttttttttttttttgagataaggtctcacgctgtcgcccaagctggagtgcagtggcgggatcatggcttaactctagcctcaacttccggggctctagcaatcctcctgcgtcagtctcctgcataactgggactacgtgcgcatgaatcatacctggctcactgtttctattttttgtagagatggggtctcgctatgttgcctaggctggtcctgaactcctgggctcaagcgatcctctgcctcagcctcccaaagtgtttagattacagtcaagagctactgtgctcgacctgctttcaccttttggctatcatgagtgatgctcctgtcaattttaataaaattttaatcttttagattttttgtccagtgtgtttgaggccataaacatccatttaagaatggcggatgtgcatatagatccatttctcttaacattatcaaagcaggttaaattatagattatctgtgggaaccctaacttaactcctgctttagaattattgttagctgtttgtcttccatgtggcattgttcttattaatatttcattgagagaacagtagtaacaatatcctgtatacccttgtgtaagtaaagagagcagatcactattttattgaccatctttcaaaagatcgattttgtgtgtttttttgttttgttttgagatagtctcacattgtcgcccaggctgcttggattgcagtagtacaatcttggctcactgcaacctctgccttccgggttgaagcgattcttgtgcctcagcctccagagtagctggtactacaggtgtgcaccaccatgcctggctatttttttgtattttaatagacaggtttcaccatgttggcctggctggtctcaaactcctggcctcaagtgatccacccacctcggcctcccacagcgctaggattacaggcttgagccaccacatccagccaattttgatgttttcatggactgatacttgtaataaacatttcaattatatatagcattgatgtagaaatgtaccaaatttacatttttttagcttatggaataaataaatgtttaaactgaaattgattcgaaactagattgaacttgcctttttcctatttgtaatttacatttttaatagtgtatcaaaagccttaaaccattttctgtggtgcaggttgactgcctcttgctggaaatgcttgggatgagaagtgttccagactttgggctttttcagattttggaatatttgcattatgctcacgagttaagcattccaaaactgaaatagcccaatgagcatttcctttttttttccttttttttgagacagagtttcgctcttgttgcccaggctggagtgcgacggcatgatctcgactcactgcaacctctgcctcctgggttgaagtgattctcctgcctcatcctcctgtgtagttgggattacagtcatgcggcaccatgcctggctaattttgtagttttagtagagacagggtttcttcatgttggtcaggctggtctcaaactccaaacctcaggtgagccgcccgccttgtgttgggattacaggcgtgagctatctcacccaacctgagcatttccttttagtgccatgttggtgctttaaaacttgcagatttggggttgggcgtggtggctcatgcctgtaatcccagcactttgggaggctgaggcaggtgggttgcctgaggtcaggagttggagaacagcctggccaacatagtgaaaccttgtctttacctaaaaaaaaaaaaaaatcagctgggcgtggtgacgggcacctgtaatcccagctactctgggaggctgaggcaggagaatcgcttgaactcgggaggtggaggttgcagtgagcggagatagcaccattgcactccagcctgggccacaagaatgaaactccatctcaatcagtcagtcaatcttgcagatattggagtgtttcagatttcagatttggggtacttaaactgtacgtgaaaattagctgctggggaggagaggaattggaatatgtaacatggactcccacattttaaggatttttctaggactgcatctttctcttaataagtcagatccttatttggttgaaaatgtttactgcatgactatcactgactatgtaagatgctgatgtacaactctatgacttgaagattgagttgcttctatgggaatatgacaccatttgaattaatttgttctcaatattttaaagagttttagtgaattctgttcatataaaaatcaggttcaataatgcgtgctttttacgctatcattgagtatccagtgtttacaaggtgtttctgagggataagattattattgctgtgtaaagaatttggcagatggtgtgtaccttctaagttagcttgaggtttatttaaatctcatctttttagcttgctgaagttgatactatgcagttgcaagtttatattgactatttgatattgctgtgtttttatttgaaatgggactgttagacacatttttctttatattgagcaatagagctggaatattaaagatgtatgcattaacccttgcatttggaacatttacatgtcataagctgcctttcagtaagtggttaggcatttctacgggtgtgtattatattttgaataaattttatatggctttccaagaaacaattagagcatttgacccaccgactttgttgtttatttttatttttttgagatggagcctcccgcagtagagatagagtttcactatgttggccaggctggtcttgaattccgcctcaggtgatccacgtgccttggcctcccaaagtgctgggattacaggtgtgagccaccatgcccaacctgacctaccaactttggatgtgaatttttttcatttatattgagaagaatagggtcttgggccactagattgtaccagtgctaagtcagtatctgaatccattgaagatcctgttggcaacgtcaggacttatcaaagacacacaacttcaatgagaacctttctttggaattaattaattaatgatatggagccttgatctgtcactcaggctggagtgcagtggcactatttcagctcactaggaatgcatctttctcttctctttctccacctcccaggtttaagcacttctcctgcctcagcctcccgagtagctgggactgcaggcacaagccaccatgctgagctaatttttgtatttttagcagagacaaggttttgccatgttggccaggctggtctcgaactcctggcctcacgtgatctgcccacctcagcctcccaaagtactgggattacaggcttgagccactgtgcccggctgccttgtttgatttttttttttaaagagacagagatcccctctgttgcccaggctgaagtgcagtgacacaatcatagctcgttgtaacttcagtctcctgggtgatgggtagaattctgccacagcccaagtagctaggagtataggcacgaacgactgtgcctagctaatttttttattttttgtggaaatggggccttgctgtgttgcccaagctggtctcaagctcgtttcctcaaaccctcctcccatgtcagccttccaaagctccaggattacaggtgtgagccatcgtgcgtgacttgtttttgatttttgtatcgttttcttcactcttttttttttttttttgagatggagtctcccgctgtcacccaagctggagtgcagtggcacaatcttggctcactgcaactgcatcttgggttcaagtgattctcctgcctcagtctccccaagtagctgggactacaggcgcatgccaccacgcccagctaaatttttttgtttttattttttgcatttttagtagagacgaggtttcaccacgttggccaggctggtcttgaactcttgacctcagatgatctgcccgtctcggcctcccaaagtgctgggattacaggtgtgagccaccgcgcccggccttcttcaccttttgtatcaagctttttaaggaagagcttagaaagccagtttaaaggaattgaaatgtgttatgtaaatgtctgttttgcaactgagacccactaatttatttagaacaaaaagtcagagaccagtaatgggtccttttctgtcaaatttcaagctgagctgtttctgctacttagaaacatttcgattttctacctagatatgtattatatcattgctaattatttatttatttatttatttatttatttgaggtggagtctcactctgtcgcccaggcttgagtgtactaatttatttttaagtgcagtttaacattggatttttttttttttttttgagacggaatcttgctctgtcgcccagactggagtgcagtggcacgatcttggctcagagcaacctctggctcctgggttcaagcgtttctcctgcctcagcttcccaggtagctgggattacaggcatgagccactgctcctggcctacagttggaattttttgttgttgtttttgagacggagtcttgctctgtcacccaggcttgagtgcagtggcgcgatctcagctcactgcattgtccatttcctgggttcaaatgattctcatgcctcagcctcctgagtagctgggattataggcgcgtgccaccatgcctggctaattttgttgtatttttattagagacagggtttcaccatgttggccaggctggtctggaactcctgacctcaagtgatctgcctgcctcggccttccagagtgttgggattacaggcgtgagccatccgtccggctggaatgctattcttaattgacctgcatttatttatttatttatttatttggcaagccttgaggaagggatttggggaatgaacaatggtacttgatcaaataatccttgtactaggcaatcacagtttctagggccactgtacctggccatgggggttttattgataataatctgtaaggaacaaaagggttagtactatcggaatttttgattagatgtagtgagcattaaggacatatggaaagtagtttgaagtaaaatatatacagtataagagtcagaatcagccaggcgcggtggctcatgtaatcccagcacttcgggaggccgaggtgggcggatcacctgaagtcaggagttcgagatggcctggccaaaatggtgaaaccccatctctagtgaaaatacaaaaaaaagccaggtgcggtggctcacgtctgtaatctcagcactttgggatgctgaggcaggataatcgcttaaacctggaaggcagaggttgcagtgagctgagatcacgccactgcacaccaatctggggtacagtgaggctctgtctcaaaaaaaaaatacaaaaaaagtagccagacatagtggcatctacttgtagtccagggtactcaggaggctgaggcaggagaatcacttgaacccaggaggcggccgtgtcagtgagcctagatcacaccactgcactccagcctggaagacagaggaagactccatctcaaaaaaaaaaaaaaaaagtgagaatgttgcatagattacccaagttaattcttataatttagtgttcatttaaaaggaaaattgatttcctactttttgtttttaaaaatagtattaggctgggtatggtgggtcaggcctgtaatcccaacataaaatgtggccaaggcaggaggattgcttgaggtttggagttcaaggccagccccagcaacaatgagaccaggaaaaatcagccaggcacggtgctaagcacctgtggtcccagctagtcagctagctgaggcaggaggatcgcttgagtccagaagttcaaggctgcagtgagctgtgatggcaccactgcattctagtgtgggcaacagaccaagaccctgcctctaaaacaaaatgtaaaaaatatattttccatttccctattcattttatgtatttgtagcataaatgttactatgcatattgacacttaacaccattagatttctcttacatgtattacgttgctttactgcattagtaatatttttttcgtaattaggaaagtccataattactgttacagaaattttttatttgggatattgtgggaaatggctagtgttgtcatagttaataaaaattatataattaagtgccattgaagaaccatagtttgaaagtgaatttaatacattagctcatagttatacaatctcacaagcattttgctgccttcaggttgtcagtttcctgctaatgctaatgactaaattttttatttttcttttcaacgaaaatttcactcagttctatatatgccagatgaggcttggaacatacagctctacaacctttaactgcttttccaaaaatctgaacgctatgaaaatgaaaaatcttcataatttaactgatttggtgacaaagcgtaaagtgaacagatgtgagagtatttgtaattgttaattttacgtagtaggaaatagtaatttgttcaattagggttgctacttcatatccttttagtgtttcaatataggtgtaccacactacttttcctttaaaaatgttctcagaatttaacattctgcaacactcttgaaccctgtgattttggagaatggaacctatagtagatgctcagcaaattctacatgatgcaaattaaaatcaaggatatgagtatcatgtcttaactgtttaaagagtaggttttactatgaagagatccataagtaaagagcatttgaaatgaaaactttttcctaaacttccctcttttttttaacattgtgtgtgtgaagttaatgttgtatttctaatatgagcttaatgttgcaattaatgtatagtggaaaataataacacgtatattaattcatttttgagacaagagttcgctctgttgcccaggctggagtgcagtggcatgatctccgttcactgcagcctccgcctctaggcctcaagcgatccaccggcttcatccttccaaagtgctgggattacaggagtaagccactgtgcccaagccatcaataaatttttatgggttagaagtttgggccaggcctggtggctcatgcctataatcccagcagtctgggaggccaaggcaggtggattacttgaggtcaggagtttcagaccagcctagccaacatggtgaaaacatgtctctataaaaatacaaaaagtagctgggtgtgctgggcgcagtggctcacgcctgtaatcccagcactttgggaggccgaggcaggcagatcacgaggtcaggagatcgagaccatcctggctaacacggtgaaaccccatctctactaaaaatacaaaaaaatagccgagcatggtggcgggcgcctgtagtcccagctacttgggaggctgaggcatgagaatggcgtgaacccaggaggtggagcttgcagtgaggcgagatcgcgccactgcactccagcctgggcgacagagcgagattctgtctcaaaaaaaaaaaaatagtagctggatgtggtggtgcgtgcctgtaatcccagctgctcaggatgctgaggcaggacaattgcttgaacccaggaggtggaggcggaggttgcagtgaaccaagattgcacctctgcactccagcctgggcaacagagcaagactgtctccaaaaaaaagaaagaaaaggccgggtgcagtagctcacacctataatcccagcactttgggaggccgaggagggcggatcacttgaggtcaggagttcaagatcagcctggccaacatggtgaaaccttgtctcttattgaaaatacaaaaattagccaggcatggtggttgatgcctgtactcgggagcctgaggcaggagaatcacttgaacctgggaggcagaggttgcagggagccaagattgtgccactgcactccagtgtgtgtgacataacaggactccgtctcaaaaaaaaaaaaaaaaaagaaaagaaacacatggaaccaaatcaggatgaaagaaactggaatagcagtttgttataggctgggcttgttggcttgttcctgtaattccagcactttgggaggcccaggcaggaggatcacttgagtctatgagtttaagaccaacctgggcaacaatgccagatcccatctttaaaaatatgaatagcacattaaattcattgattttttttttttaagtcttgctctgttgcccaggctggagtgcaatgacgtgatgtctgctcactgcaacctccacctcccggattcaagtgattcccctgcctcagcctcccgagtagctgggattacaggcacccgccaccacgcccagttaatttttgtatttttagtagagacagggtttcaccatgttggtcatgctggtctcgaattcctggcctcaggtgatccacccacctcagcctcccaaagaattgctgggattacaagcgtgagccaccgcaccgggccggaatttttttaaaatgccaatactggtgacaggattagagtatattaactgattttacttagtctttccattcccacattaattagttctcaaaatttatttgcatgctacaaaagagctcaacaatttttttattacgtgcaatttttttaataggaataaaaaaatacgttgttg

SEQ ID NO: 14961 - DNA, 600 bp, Homo sapiens
tcacatctgtttctgaaaccagactttgttaattaacagttttaaaatattaattagttttgacatcttgtaaattttaggtcaaaaatacagtccagaacttcctcaaagtgctaaccttaagtaacataacagtgtttgcctgtttgcttgcctggtaaattttgctttttatactgacagacattactaatgtttaagttgatttatcaacagtatttttaaaaactcaaatttgtcttgtgaaaaatgagatgattagaggaacagaaagaaagcaacaggtaaagaattcttcaatttacataaattacaaatgatttggtgctaaatttatgcactatgacatttggcttttatgcaatcatttttttttctttaaagatgttaacactacctgatattaatcataatgttccattatgttgattgcttgtaataggaagaaaaggggtgtcttcctgtgcaactgacacagctaggctttgacggcaggcctccacaagtactatggactacaaattttggaaaatgtgataaaaacaaggtggaagattcttccaaggaaccagtgcgaaggaataaaaaaatacgttgttg

SEQ ID NO: 14962 - DNA, 653 bp, Homo sapiens
tgatcaaggagaagttgtgagagaattcatgaaggatacagattccataaatttgtataagaatatgagggaaacattgggtaagttaataaatactgttaatctttacctttataaatctattctggggtggaaatacattttaggaaatgtacttgtagtttctaaatattttctaaatgtattgttactcatcaataaaattctgctcattatttgcatttgaaaccatgtttttctttgtagtttatcttactcatctggattatgtagatacagaaagaataatgacagagaagcttcacaatcaagtgaatggtacagagtggtcatggaaaaatttgaatacattgtgttgggcaataggctccattagtggagcaatgcatgaagaggacgaaaaacgatttcttgttactgttataaaggtatgcaagggataggtatgaattagaattgctaaataagtattatgttgttacaataaataatacaaatttgtcttatttacaggatctattaggattatgtgaacagaaaagaggcaaagataataaagctattattgcatcaaatatcatgtacatagtaggtcaatacccacgttttttgagagctcactggaaatttctgaagactgtagttaacaagct

SEQ ID NO: 14963 - DNA, 568 bp, Homo sapiens
tgatcaaggagaagttgtgagagaattcatgaaggatacagattccataaatttgtataagaatatgagggaaacattgggtaagttaataaatactgttaatctttacctttataaatctattctggggtggaaatacattttaggaaatgtacttgtagtttctaaatattttctaaatgtattgttactcatcaataaaattctgctcattatttgcatttgaaaccatgtttttctttgtagtttatcttactcatctggattatgtagatacagaaagaataatgacagagaagcttcacaatcaagtgaatggtacagagtggtcatggaaaaatttgaatacattgtgttgggcaataggctccattagtggagcaatgcatgaagaggacgaaaaacgatttcttgttactgttataaaggatctattaggattatgtgaacagaaaagaggcaaagataataaagctattattgcatcaaatatcatgtacatagtaggtcaatacccacgttttttgagagctcactggaaatttctgaagactgtagttaacaagct

SEQ ID NO: 14964 - DNA, 1914 bp, Homo sapiens
gtttgtaatggtaagtgtttttaatttcatttttaaaaacaataataggaaagcaattatttacaagtgtgttttgttataggaaaattctcaaaatgctccacttgtacatgcaaccttggaaacattgctcagatttctgaactggattcccctgggatatatttttgagaccaaattaatcagcacattgatttataaggtacagtgaatacatttcagttatttgtcaccggatagccacatatattcttttcacatgtaaagctctcatctctgcattctaaaccttattcaaccttgtttctaacacgaggacgctgctcaggagaaatttcccatattcacacctagtaaattatttaaagtgagtttcaaatctgattctgccacttagaccatgtaattttatgaattcattttgaacaatggatttgattatattgcttttagtttgagtaagttacagtgaggtaagtcaagtgctatttctgaaaaatgaaaagttcatcttttaactgataatttaaaattgataccatgttatggcttaagttctataatggtttagcctgggcaagttggtgaaaccggtctctactaaaaatacaaaacagccaggcgtggtggtgtatgcctgtagtcccagctactcgggaggctgtggcaggagaatctcaaactcaggaggcagaaggtgcagtgagccaagatcgtgccactgcactccagcctgggcaacagagcgagaccctgtctcaaaataagtaaagttctacagtggtttatccagagataatcactgttaccagttggttgtattatattttcagatgttttcttgactgatataatgaataaattaagtatctaattggaacattataacttgacctcttcaacttcgtagtttagtttggtaagataatatggatttatagtatttgaatgatcagtttattgcttaattatgtaaaaacctttctattgtcaacagtcctacagagaacattctcagacataagatattatgcaattgtccaaacattaatttatttaaatattttaatgtttaatcaccagattattaggtatgtttaattttaaggttttaatgccccctgatttccaaccccagacgataactgtttatcttctcaacaatagaatatataagccaattttcccatattcttattactcttagatacattgaccatttcccaaaattctaagcaatcacaagttttaggtcctgtgtaattacacagaaagtataacattcctaaaagtcatatcacagattctaggaaagttgttaaggagccttgttattttaggacacatcaaaagaaagcagtttaggccgggcgctgtggctcacgcctgtaatcccagcactttgggaggtcgaggtgagcggatcacgaggtcaggagatcgagaccagcctggcccaacgtggcaaaaccctgtctctactaaaaatacaaaaattagccgggcgtggtggcatgcatgtgtagtcccagctatttgagaggctgaggcaggagaatcgcttgaatccaagaggtgaggttgcagtgagccgagatcaagcccctgcatttcagcctgggcgagcgagactctgtctcaaaaaaacaaaaaaagtttgctcctaaagcatttactgtatactaggtaggcaataaaattccctctcagtatatctgcatgataaaatatgttcattcacttggcctgtttttgacatctacccctatatttaattgttaaagcctttttccttttaattgtgaattttaagtaaagtgtgtatcaggccaattaattttatggttccctccccccttttaaatagttcctgaatgttccaatgtttcgaaatgtctctctgaagtgcctcac

SEQ ID NO: 14965 - DNA, 249 bp, Homo sapiens
gtttgtaatggtaagtgtttttaatttcatttttaaaaacaataataggaaagcaattatttacaagtgtgttttgttataggaaaattctcaaaatgctccacttgtacatgcaaccttggaaacattgctcagatttctgaactggattcccctgggatatatttttgagaccaaattaatcagcacattgatttataagttcctgaatgttccaatgtttcgaaatgtctctctgaagtgcctcac

SEQ ID NO: 14966 - DNA, 24378 bp, Homo sapiens
agcaaagaatggctcaagaagtactgacacatttaaaggagcatcctgatgcttggacaagagtcgacacaattttggaattttctcagaatatgaatacgaaagtaagcaagtggtggttttaaaatctgttatttcttttcttccagtcataaactttgaggaaggtatctcatttttagtattagcatttgttatctcaaattattttatattgttaatttgtttcaaaatttagtcttaagcatataattaattcttgcaaatagtcctaagaattatgaatgaagttttgtaatgggactagtatgcaaggtggcttttttggttgtctgattttgtttttttctttttagtatatgtatacaggtctaagtagcataaattctgaatgttattcagagattaaacataacattaaggaattattttgggcaagtaatcaatataatacaggccaggcacctctgacaccaagttgtgtggacagcttaaaaccctactccatggcattgggcttctaatgggacagcactcagtttttatttacaatggaaaatgttataattctggtccttttttaagtttgaacagaagggttgatcaaaatgtgttttgtctgttttaggcttgatgattcacgcttctctttaaactgccttaaagtaataaatactatggcattctgtttaatacacgaaaggtttccacttgatatacattgtgttaaaacagaagatagccatattcacatctgtttctgaaaccagactttgttaattaacagttttaaaatattaattagttttgacatcttgtaaattttaggtcaaaaatacagtccagaacttcctcaaagtgctaaccttaagtaacataacagtgtttgcctgtttgcttgcctggtaaattttgctttttatactgacagacattactaatgtttaagttgatttatcaacagtatttttaaaaactcaaatttgtcttgtgaaaaatgagatgattagaggaacagaaagaaagcaacaggtaaagaattcttcaatttacataaattacaaatgatttggtgctaaatttatgcactatgacatttggcttttatgcaatcatttttttttctttaaagatgttaacactacctgatattaatcataatgttccattatgttgattgcttgtaataggaagaaaaggggtgtcttcctgtgcaactgacacagctaggctttgacggcaggcctccacaaggtctacccttttgattccctttaactgaattctgttcatcaattgtttttgtttcatgggcggtgggaggggaaaggggaattcaatgcataaaataagtatttctaagggctcagtagaaatttctaccatagggatcatttcatgcatttattttttcatttagtctttgctgttatctgtccctcatcttcataactcagcagtggatttctcaagtttggagatgtaaggcaaaagtataattcttcagaatgtttggattgtagtgatttatcattggctttcagatttgactgtcacttcagatttttgagcaaaaatactaaaaaaaaaaagaaaaaaaattctttgaagagacaggacctctgttgcccaggctggagtgcagtggtgtgattatagctcactgtaacctcaaactcctgggcttaagtgacatttctgcctcaactttctgagtagctagggctacaggtgcgtgtcaccatgcctcgctaacttaccaatttttttatagaagtggggtctccctgtgttgctcaggctgatcttgaactcctggccctcccgccttggcctccccaaaatgttgggattacaggcgagggccactttgcctggccccaaataacattttttcaaaggaatgtaaattttttttgttttagtttcataggcaaagtctttatgtctgggagagattggattttaggatattatagtaacagatgtattcctttgacctaacctgggcaaagcatttattgggctccctgcttcaacccccttggcagaaagatgaaatatgaattgtatcttcatcaagcttatgctacctttatacagttgtagaaaatacaggttagtaaatagtaattttaggtaacagtatcaaataggaagaagtaaataaaaaagaaaggacagtgtctttccattaaaaatgtaaaaaagtttggttaaataagatgaagttatctttaagatttttatttgtaactatatttatggtgggttttgtttcttagtgttttaaaggctttttaattgatttttggcaagaggatatattgtaagcagtgcattgctttgacttactgagtcttgacaatctgattttgtgcctataaaattaaagaaaatgcttagggtagtatgtttttaaaagctaattaagaacttcaggcatttggacaactctcttttttttacatatttctcagacctagacataataaatagatatgtttttaaaagtgaacaggttagaaagcatcactatttactgctgattatgaaacattttaatagcatcaaatttgtaattttagaattttgctttggccttgtttttattttgaaagtttttaaggaatgttctgcaaatgtagtactttagttgaaatggcaaaattttcttgaagagtgtgaaatgttaaaatgaaagaaaacagcaaaaacattcactgtttgagcacaatgtagtttgggacagtctatattgtgctttggataaaatgagcattcacatgatccctttggttgaaatactaatgctcctattttattgtgtaatgactaaccattttaaagatgaactcttattctcagccaaaacttgcaatctgaggttatatgtctatatatgaatgagcttacctttcagatattatagctgattcttccctaattctctcagttgaaatgtaccacaacggttttgtcccttttcttcctcctgcctatccacactaattggtcatagtaattcaggtagtaactcctggggctttataaattattataaatattgttgactatttagagtgagtaatcagcaggagggacaaaatggcttgaaagtggtatctctgttttttaattttttatacttttagttataactttcagtatttaggaagaaatacctgaaaggtagatacagattgcaacatgcgtttgtgattattttgactgtgcacaaaagtttatctttaaattagtagaaatagcaactataagggtggggttaaaatataaaataaacccatgggttgtcttgctgctccttaagtaacacaccagtgatgcttgtaaacactttctatagaaagtatctgtgacaatactttaatatttggccaaaagcttataactcctagaggatggtaggaagcttgatagcatccaagctgctaaattcttaggagcctgttcgtgttaaagtacgtgagcctatgagcagtcatttatgctgtgaattcatatctggctgctacttttccttcgacagataagcctatttggctgctaaagggctttttatttggttcttcctcctggtgtgagcatgtataaacagcaggacgttatatagagtagcaaacaataaaatgaggaaaatgcatgaaaactcagtatatgggtgaatagatacttgtttaatatgtgtaattaaacttggtagcataatgtttttgaaactttagatgtaaatgtgtgaatgtctgtccatttgtgaatcctgagagttgccagtcctataagcaatatattcacatgcttctattctccaattttcagtactatggactacaaattttggaaaatgtgataaaaacaaggtggaagattcttccaaggaaccagtgcgaaggtaggaaaataaagaattataaattcagagttttgtttttcctggcatttttattgtagttgactgtttgagggggcatgtaatgaatctttagtatattttgctctaatggagcttattgcttttatcatgaagcaaacaggtctgtttgtattggtgggtacaggaaggccacttacaggttatcttttgggagaaagaggagactggactgttgaaaactctgacaataaatattctagttaaaaatatgggctatggcacagtggcccacgcctgtaatcctaacacttcaggaggccgaggcaagtagatcgcttgagtctgggagttctataccagcctaggcagtatagcaagacctcatctggacaaaaatttaaaaaattagctgggtatggtggttcatgtctgtggtcccagctatgtgggagcattgcttgagctcaaaaggtcgagactgcagtgagccatgatcctgccactgcacttcagcctgggtgacaagagtgagaccccatctccaaaaaaacatatatataaataaaatatgggccgggcacagtggctcaagcctgtaatcccaggacttcgtgaggctgaagtgggagggtcatttaaggccagaagtttgagaccatcctgggtaacatagcgagaccctgtgtttacaaaaaatttaaaaattagccaggtattttggtgcaggtggcggcggggacaggggtatcagtggggtgaggtaggaggatcccttgagccaagaggttgagactgcagtgagccatcattgtgccactgtactctagcctgggcaacgagcgaaactccgtctcaaaaaacaagaacaacaacaacaaaaaaaaccatatgtaaggttaactcgggaatggaaaagccaagtactaaagatcacaaagctgttttgccttttgtggttctgggaatgccttggaagaggttggcttctgaaatgaagaaagatcagaaaatgaaggtgtagtgatacctgttaatgagtaatttaacttttctgtctgtgctaccttgaggaatgtagtcatattttgagaaacctgaggcaacattagtttcttgggattctttgatttagctaatttcagttatgatacactgcctttttacctactatatttcatttatctctgaaaaatagaaatttttttcttgactttattatggggcacatgatacttctagtagtattttcatttaaaatatgtctaatttctttgattatttgtcttttaagtattgtccttcacctgcattctcttatcatcattatggtagaatagtgacatggatttacttagctaatctgacttaaaccttgacaaagtttgagcacatttagagttgaatgtgatgagattttaatgccagtgtctttttttaagaatattaagtatattcagtggcaatatctttaatacatcataaatcatagattaagagtgatagtgcaggagcaaataatgtgccctaaaagaggttctcatttctttaaatgttttattatggtttgaaactattttagatcacgttctgtgatggactgagaaattaataagcacaatttgactatgtggtccaagtaggtccttcatactttattcttcagggatctttagtgtagtcattccttgtttctttactactattgttttactcatgtgttatgagccccagatttaattttggccatggtctgccgtaccaagaaaaggtgatttacttctgtcccattttactgttgtataattttaaatcctccttttgttcttaaatctgcatctctgttttttatcacatttgatggttctggaagatgttttccaggttgaaaatagatatgattatactagtttatcaacactgtagttacatttgttacagacaaaattaatttaaaaaatttttgtttctttctttcttctttgttgagacagattctcactctgttcctcaggctggagtgcattggcaccatcactgcagcttcaaatagctgcggtcaagcaatcctcccacctcagcctcccgagtagctgggaacataggcatgccccaccatgccctactaaattttttttttttttaatgttttgtagggatggtgtctcgctgtgttgcccatgctgctggctgctgggcttgagcaatcctcccaccttggcctgccagagtgctgggattgtaagcatgagccaccatacttagtcaacatgattacctttttaattttaactgggaggcttctctaacctaaagatttatttcacaaaatacactagaacttctgaacattaattttccttcatctttaagtaactttggtattggaaattacataaattaatttaaaacattttatttcctttttctgtaagtgtcctgtcttttaaaggtattcgctttgctttttgctgtagctataccctttgtccaactaccatagcatatatatttgttcacctggggtgcatattgtgcgtttcctttgtaccgattactactaaatattaaggttataaaaatatacatgtacatcaaagtgctgtatgtcacagtgttatagttgggaagacaaaacacatgtaaaagaggaatcataaatcagcaaattaggtgtatataatgagtgcttcacaagctaaaagaacagaatgatgtctaagtccggccctttagctaagtttcattcacataattggaaagaaatgcctggtatattttaaaggaaggaaaggtttcactgcataagagtatgccaaaattagattcctgcattttttttctgatgtagaatttgttttatctgcttttaggttcttgtccacagcatgttaatttttacgtggtgtttttttttttttttttttttttttgagacggagtcttgctctgttgcccaggctggagtgcagtggcgcagtcttggctcactgcaagctccacctcctgggttcatgccattctcctgtctcagcctcctgagtagctgggactacaggcacccgccaccacacccagctaattttttttttttttttttagtagagatggtttcactatgttagccaggaaggtctcgatttcctgaccttttggtcctcccgcctcggcctccatgcctgttgagattacaggcatgagccactgcctggctaacatgttcttttaaattaatgacattttcaatttaggcctcttgtataaatactgtcaggaaaatctcatgattcttgagtgggttagatgtctcttgctgtgttatacgttactgtatcctgtaccagtgggtcacaggagaataaaattttaaagagcaaaagataggctcagcacggtggctcacgcctgtaatcccagcactttgggaggccaaggcaggcagataacgaggtcaggagtttgagaccagtcttaccaacatggagaaaccctatctctactaaaaatacaaaaattagccgggcgtggtggcacatgcctgtaatcccagctactcaggaggctgaggcaagagaattgcttgaacccgggaggcggaggttgcagtgagctgagatcacgccattgcactccaacagagcgagacttcatctcaaaaaaaaagagcaaaagatagacataattagaaagtaaggatgtttaaaagaacatttaattttccaaaagatatttttatagcaagagaaatggcgagataataaaacatttaaataagttgagatttgttatataaaatttattacatttctctggattttcatttagctttaggccgtaagtgtgtgtctatttgtttgtgttttatgtgttttgtccctcacaccccacattacacttggctgttttagtcactttattccccatccttcaaactataagctccttgatattggggctcagagtgtctttttttctttggtttttttttggtctgtttttgtgtttgtttttgtttaagacagagtctcgctctgttgcccaggctggagtgcagtggcgtgatctcggctcagtgcaagctctgcctcccggtttcacaccattctcctgcctcagcctcctgagtatctgggactgcaggcgcctgccaccacgcccggctaactttgtgtgtgtgtgtgtgtgtgtgtgtgtgtgtgtgtgtgtgtgtgtgttttgttttttgttttttgtttttttttttagtagagacggggtttcaccgtgttagccaggatggtctcgatctcctgacctcgtcatccgcctgcctcggcctcccaaagtgctgggattacaggtgcgaaccaccgcgcctggctttttctttgttttttaaagatgtagggtttcactctgttgctcaggctggagtacagtggtgcaatcatggttcactgcagcctggaactcctgggctccagtgatcctcttgcctcaggctttttttcttttttttttgtgagacagagtccctctctgtcacccaggctggagtgcagtggcgcagtcttggctcactgcaccctctgcctcctgggctcaagtgattctcatgtgtcagtctcccaagtagctgggattacagatgcacaccaccatgcctggctaatttttgtatttgttttagtaaggacagggtttcgccatgttgaccaggctggtctcgaactcctgacttcaggtgatcctcaccctcccagagtgctgggattataggcgtgagccattgcatcctgccctcttgcctcagccttgagagtagctagcactgtaggtccgcaccaccatgcccagctaattaaaaaaaatttttttttttagagatagagtctcactgtgaagcccaggctggttttaaactcctgggtttaaagcagtcttcctactttgccgtcccaaattgctaccaagcctggctgggaaattttaatatgtcaaatggaagaattccctaataaagagtggttgctattcatggtagtcttttatttattcatttgttttgagacaagatctcactgtatcacccatgctggagtacagtggcacaatcatagcacactgcagccttaaactcctgagctcaggcagttaccacgccttagcctgccaaaatagctaggactacaggcatgtgccaccacacccagctaagtttttctaattttgatagagacacagtttgcctatgttgtccaggcttgtcttgaactcctggcctcaagtgatgctccaacctcagcatcccaaagtgctggggttacaggtatatcaccactcctagccatcactgaagtcttaaaggtcctctaggactgccagtggtgttgattctttatcagagtcatgattcagataattccccatccctttttaaaaatggcatttaggctgggtgtggtggcttacacctgtaatcccagcactttgggaggctgaggtgggcagatcacctgaggtcagttcgagactagcctggccagtgtggtgaaacccggtctctactaaaaataccaaaattagctgagtgtggtggcagatgcctttaatcccagctaattgagaggctgaggcaagagaatcggttgaacctgggaggtggagcttacagtgagccaagacagcacgactgcactccagcctgggcaacaagagtgaaactctgaaattaaaaaataattaattaattaattaaaaatggcatttagataattcaaataaaaaaaaagaggaagcctcctttgttcctgttggggggaaagatgatgctatataaaggtatttctgtactttttatttaaaccaagggattgttttaatcagttaatgtgtatggcttatagatcatttcattgattgataaaaacttactcacaggcggggcatggtggctcatgcctgtaatcccagcactttgggaggctgaggcgggcagatcacctgaggtccggagttcgagaccagcctgaccaacatggagaaaccccatctctactacaaatacaaaattagccaggcgtggtggcgcatgcctgtaatcccagctattggggaggctgaggcaggagaatcgcttgaacccgggaggcagaggtcgcggtgagctgagatcgcgccattgcactacggcctgggcaccaagagcgaaactcagtctcaaaaaaaaacccacacttggctcacattgaatagagaagaagcgaatttatgaaaaaagtaatccaaagtggaaagatcgtaattacaaggtttgattttttttttttgtttggtttggttttttcgaggcggagtttcgctgttgttgcccaggctggagtgcagtggctcaatctccactcactgcagcctccgcctcctgggttcaagctattctcctgcctcagcctcccgagtagctgggattacaggcatgtgccaccatgcaaggttggttttgttttgttttgtttttttttaattttgcgacggagtttcgctctgtcgcccaggctggagtgtagtggcgagatcttgggtcactggatgctcagcctcctgggttcacaccattcttctgcctcagcctcctgagtagctgggactacaggtgcctgctaccacgtctggctaattttgtgtgtgtgtgtgtgtgtgtgtgtgtgtgtgtgtggtttttttttttttttttagtagagatggggtttcaccgtgttagccaggatggtctcgatctcctgacctcgtgatccaccctcctcggcctcccaaagtgctgggattacaggcgtgagccaccgtgcccggccaggttggattttataagtagttgggccactaaaatttctgagttgtacagtttcatgtctttagttggcagaccaaagctgatccactcataaaattttatttagtgctctcctttgacgtgagacacgtggtatatttattggcaccgtaatactggctacattatttgacctcatatttcagtttgtgttgcaaggttttgggcattagagctaatgtataggaagccctgtgcttacatatgctgagtatgagtaagtagtgggttaccaactgtttttgatgaaatatctgcatttcaccaaattgccatataccagtctcaaaatatcctgaaccttctgaaataccttcctaagtgagctcactaacacctacttttctgtgtcctttacaattttttcaccacaaagtctcaaagtttcagaaacggaactaatagggtcacttctgctgaagatctcctgtagtattgaagatatttaacatgtttcctttaattgatattggcctttgagaatttttgtatttgccttatttattaggtttaaagtgtacagttggataagttttatcttgtgcatgctcctgtgaaactacctctgtataatcaagatctgcctctatccgattactttcaccttcactgcccctcttcacatgtgcttgttgtcacttgcttggtaagagtggaatggctggattgtgtggatttttttttttttttttttaagacagtcacactactctgtcgcccaggctggagtgcagtgtcatgatcttggctcattgcaacctctggctctcgggttcaagcgattcttgtgcctcagcctcccaagtaggtgggattacaagcatgcaccaccacaccagcataatttttgtttttgtaatagagtttcgccatattggcctggctggtctcaaactcccgacctcaggtgatctgtccacttcggcctctcacagtgctgagattatactcataagccactgcgcccagcccatatggatgttttggtgtatgtttaagcatccaactgtattccaaagtggtcatgtcagtctcaccagcagtgtataagtatgtttcacatctcggctgacatttggtatagacaatgtttttagtttggctattgtagtgcatatacaatagcatctcatggtggttttaatttctttcttttttttttttttttttaaagacagagtcttgctctgtcgcccaggctggagtgcagtggcctgatctcggctgactgcaacctctgtttcccgggttcaagcgattctcctgcctcagcctcctgagtagctgagactacaggcatgtgccaccacacccagctaattattttgtatttttagtagagacgagctttcaccatgttggccaggatggtctcgaactcctgacctggtaatcagcccacctcagcctcccaaagtgctgggattacaggcatgagccaccacgcccagccttaatttccatgtggagtagtgttgttctgtgttccatcacatatccttacatgttctttgccatgccagtatgtttttggtgaaatgtctgttcaaaaattttgctcagttttttttttttttgagacggagcctggctctattgccccagctggagtgtggtggcacaatctcagctcactgcaacctctgcctcctgggttcaagcgattctcctgtctcagtctcctgagtagctgggattacaggtatgcaccaccacgccctgctactttttcgtatttttagtagtagagatggggtttcaccatgttagccacgctggtctctatctcctgacctcgtgatccacctgcctcagcctcccaaagcgctaggattacaggcgtgtaagcccaccatgccccgccaattttgcccagtttttattgggctattcccttattgagatctaagggctctttgtattctagtcaggagtattttgttaactgtatattttgcaagtgttttgtctgtggcttcctgtttaatttttgtaatggtgtcttttgcagagcaaaaatttcagattttgattaaaatcagtgttgatttttttttctttatatagttgatgttttttgtgttgtattcaagaaatctttgtcatgcaaaggtcacttaagattttctgtaagtttttggctgggcacagtggctcacgcctgtaattccagcaatttgggaggccgaggcaggcagatctcttgaggtcagcagttcgagacgagcctggtcaacagggtgaaaccgcatgtctactaaagatacaaaaattagctgggtgtgttggtgaattgcttgaactggggaggcagagactgcagtaagcctagatcacaccactgccctccagcctgggtgacagagcaagactctctctcaaaaaaaaaaaaaaaaaaaagatattctgtacgttttcttatagaacctttatagttttagcttttgcattaagatctgtgatttggctgggcacagtagctcacaattgtaatcccagcactgggaggccaaggcaggcggaaacaatacaaacaaattagccaggcgtggtggcatgcacctgtaatcccgactgccaggaagctgaggtgggaggaatgcttgagttgagttcgggaggtggaggttgcagtgagccgagatcatgccactgcactccagcctgggcgacaaagaccctgtctgaaaaaagcatcatgtgattcattttactcaatttttgtatatgaggtgaggtaagggtcaaggtttatatatttatttgagacagagtcatgctctgtctcctggccagagtacagtggcgcgatcttggctcactgcaaactccacctgccagattacaggtgcacaccaccacacccggctaatttttgtatttttagtagagatggggttgccccatgttggccaggctggtctggaactccagacctcaagtgatccgccagtctcagcctcccaaagtgctgggattatgtgtgagctaccgcacccagctccccaactttgtttctaaaaggtttggctattgttggttttttgctgttccataaaaattttagagtgaaatctggcaaatttcaacaaaagctgtcctgaaatttttattgagattgccttggatctgtggatgcatttggagagaatgaacatctttaatgtcaattcctgattatttcttgctaatatagagaattgccattgttcacttatctcttgaacgtgtagtttaatccagctagtcaaagcccagttcaaactcactttcccttcctgttgtgagaaaacacctcaattttgcaaaagctcttggaatttaacatttctgctgcttttccctgtatgtgtggtgtttagtcttttcatagttcgttgactatggaattcagagcagaaaccctatttcctaatttccttgggaagttttcagaactagatgataatgtaagtttctaataagttgatagtgttactcagaggtgattgtttcatttatgattttgaaaagaaaatgtaaatattagacttaagtccttgcatctaaaacaaattcatgagaaatcccacagaatacaatgttagagatgggagcaaaaattatcagtctaatctcagagagttgacaggcattccaaatcgttttttgtcagtatttaaaccatggtaggataatgtaagaaatatacttaatgcctggtgcgatgtctcacgcctgtaatcccagcactttgggaggcctaggcaggcaattgtctgaggtcaggagttcgagaccagtctggccaacatggtgaaaccccgtctctactaaaaatacaaaaaaaattagccgggcatggtggcgtgtgcctgtaatcccagaatcccagctactcggtaggttgcagcaggggagttgcttggaccagggaggtggaggctgcagtgagctgtgatcatgccactgcattccagcctgggcgacagagcaaggctccgtctcaaaaagaaaaaaaagaaaagaaaaagaaatatctgtaagctataaattatgtttttcatttctaaaaaaaacaaggcaggccaggcacagtgattgaggcctgcaatcccagcagtttgggaggctctcttgagcccagaaatttgagatcagccaggacaagatagttagacttctctctactaaaaatacagaaaactagcagtgtatggtcgagtgcccctgtagtttcagccactcaggaggctgaggcgggagaatcatttgagtccaggcaggaggtcgagccctgattgattgcaccactgcactccagcctgggcaacagagtgataatatctgaaaagataggctgggcacagtggctcttgcctgtaatcccaggactttgggaggctgaggcaggcagatcacctgaggttgggagttcgagatcagcctgaccaacatggtgaaaccccatctctactaaaaataacaaaaaaattagctgggcgtggtggcgcattcctgtaatccctgctactctgaaggctgaggccggagaattgcttaaacctgggaggtggaggttgcagtgagccgagattgcgccattgcattccagcctgggcaacaagaacgaaactctgtctaaaaaataaagaaaagaaagcagtattttcaggcacattgtatatgattgataggaatagtatttccatttctggttaatgtaacaatttgccccattccaagtattttgattacaggcctccatgaaaggcctatacttgatacctaacagtgtttgatccctagcttacatccatgtaacttttttttttttttttttttttgagataaggtctcacgctgtcgcccaagctggagtgcagtggcgggatcatggcttaactctagcctcaacttccggggctctagcaatcctcctgcgtcagtctcctgcataactgggactacgtgcgcatgaatcatacctggctcactgtttctattttttgtagagatggggtctcgctatgttgcctaggctggtcctgaactcctgggctcaagcgatcctctgcctcagcctcccaaagtgtttagattacagtcaagagctactgtgctcgacctgctttcaccttttggctatcatgagtgatgctcctgtcaattttaataaaattttaatcttttagattttttgtccagtgtgtttgaggccataaacatccatttaagaatggcggatgtgcatatagatccatttctcttaacattatcaaagcaggttaaattatagattatctgtgggaaccctaacttaactcctgctttagaattattgttagctgtttgtcttccatgtggcattgttcttattaatatttcattgagagaacagtagtaacaatatcctgtatacccttgtgtaagtaaagagagcagatcactattttattgaccatctttcaaaagatcgattttgtgtgtttttttgttttgttttgagatagtctcacattgtcgcccaggctgcttggattgcagtagtacaatcttggctcactgcaacctctgccttccgggttgaagcgattcttgtgcctcagcctccagagtagctggtactacaggtgtgcaccaccatgcctggctatttttttgtattttaatagacaggtttcaccatgttggcctggctggtctcaaactcctggcctcaagtgatccacccacctcggcctcccacagcgctaggattacaggcttgagccaccacatccagccaattttgatgttttcatggactgatacttgtaataaacatttcaattatatatagcattgatgtagaaatgtaccaaatttacatttttttagcttatggaataaataaatgtttaaactgaaattgattcgaaactagattgaacttgcctttttcctatttgtaatttacatttttaatagtgtatcaaaagccttaaaccattttctgtggtgcaggttgactgcctcttgctggaaatgcttgggatgagaagtgttccagactttgggctttttcagattttggaatatttgcattatgctcacgagttaagcattccaaaactgaaatagcccaatgagcatttcctttttttttccttttttttgagacagagtttcgctcttgttgcccaggctggagtgcgacggcatgatctcgactcactgcaacctctgcctcctgggttgaagtgattctcctgcctcatcctcctgtgtagttgggattacagtcatgcggcaccatgcctggctaattttgtagttttagtagagacagggtttcttcatgttggtcaggctggtctcaaactccaaacctcaggtgagccgcccgccttgtgttgggattacaggcgtgagctatctcacccaacctgagcatttccttttagtgccatgttggtgctttaaaacttgcagatttggggttgggcgtggtggctcatgcctgtaatcccagcactttgggaggctgaggcaggtgggttgcctgaggtcaggagttggagaacagcctggccaacatagtgaaaccttgtctttacctaaaaaaaaaaaaaaatcagctgggcgtggtgacgggcacctgtaatcccagctactctgggaggctgaggcaggagaatcgcttgaactcgggaggtggaggttgcagtgagcggagatagcaccattgcactccagcctgggccacaagaatgaaactccatctcaatcagtcagtcaatcttgcagatattggagtgtttcagatttcagatttggggtacttaaactgtacgtgaaaattagctgctggggaggagaggaattggaatatgtaacatggactcccacattttaaggatttttctaggactgcatctttctcttaataagtcagatccttatttggttgaaaatgtttactgcatgactatcactgactatgtaagatgctgatgtacaactctatgacttgaagattgagttgcttctatgggaatatgacaccatttgaattaatttgttctcaatattttaaagagttttagtgaattctgttcatataaaaatcaggttcaataatgcgtgctttttacgctatcattgagtatccagtgtttacaaggtgtttctgagggataagattattattgctgtgtaaagaatttggcagatggtgtgtaccttctaagttagcttgaggtttatttaaatctcatctttttagcttgctgaagttgatactatgcagttgcaagtttatattgactatttgatattgctgtgtttttatttgaaatgggactgttagacacatttttctttatattgagcaatagagctggaatattaaagatgtatgcattaacccttgcatttggaacatttacatgtcataagctgcctttcagtaagtggttaggcatttctacgggtgtgtattatattttgaataaattttatatggctttccaagaaacaattagagcatttgacccaccgactttgttgtttatttttatttttttgagatggagcctcccgcagtagagatagagtttcactatgttggccaggctggtcttgaattccgcctcaggtgatccacgtgccttggcctcccaaagtgctgggattacaggtgtgagccaccatgcccaacctgacctaccaactttggatgtgaatttttttcatttatattgagaagaatagggtcttgggccactagattgtaccagtgctaagtcagtatctgaatccattgaagatcctgttggcaacgtcaggacttatcaaagacacacaacttcaatgagaacctttctttggaattaattaattaatgatatggagccttgatctgtcactcaggctggagtgcagtggcactatttcagctcactaggaatgcatctttctcttctctttctccacctcccaggtttaagcacttctcctgcctcagcctcccgagtagctgggactgcaggcacaagccaccatgctgagctaatttttgtatttttagcagagacaaggttttgccatgttggccaggctggtctcgaactcctggcctcacgtgatctgcccacctcagcctcccaaagtactgggattacaggcttgagccactgtgcccggctgccttgtttgatttttttttttaaagagacagagatcccctctgttgcccaggctgaagtgcagtgacacaatcatagctcgttgtaacttcagtctcctgggtgatgggtagaattctgccacagcccaagtagctaggagtataggcacgaacgactgtgcctagctaatttttttattttttgtggaaatggggccttgctgtgttgcccaagctggtctcaagctcgtttcctcaaaccctcctcccatgtcagccttccaaagctccaggattacaggtgtgagccatcgtgcgtgacttgtttttgatttttgtatcgttttcttcactcttttttttttttttttgagatggagtctcccgctgtcacccaagctggagtgcagtggcacaatcttggctcactgcaactgcatcttgggttcaagtgattctcctgcctcagtctccccaagtagctgggactacaggcgcatgccaccacgcccagctaaatttttttgtttttattttttgcatttttagtagagacgaggtttcaccacgttggccaggctggtcttgaactcttgacctcagatgatctgcccgtctcggcctcccaaagtgctgggattacaggtgtgagccaccgcgcccggccttcttcaccttttgtatcaagctttttaaggaagagcttagaaagccagtttaaaggaattgaaatgtgttatgtaaatgtctgttttgcaactgagacccactaatttatttagaacaaaaagtcagagaccagtaatgggtccttttctgtcaaatttcaagctgagctgtttctgctacttagaaacatttcgattttctacctagatatgtattatatcattgctaattatttatttatttatttatttatttatttgaggtggagtctcactctgtcgcccaggcttgagtgtactaatttatttttaagtgcagtttaacattggatttttttttttttttttgagacggaatcttgctctgtcgcccagactggagtgcagtggcacgatcttggctcagagcaacctctggctcctgggttcaagcgtttctcctgcctcagcttcccaggtagctgggattacaggcatgagccactgctcctggcctacagttggaattttttgttgttgtttttgagacggagtcttgctctgtcacccaggcttgagtgcagtggcgcgatctcagctcactgcattgtccatttcctgggttcaaatgattctcatgcctcagcctcctgagtagctgggattataggcgcgtgccaccatgcctggctaattttgttgtatttttattagagacagggtttcaccatgttggccaggctggtctggaactcctgacctcaagtgatctgcctgcctcggccttccagagtgttgggattacaggcgtgagccatccgtccggctggaatgctattcttaattgacctgcatttatttatttatttatttatttggcaagccttgaggaagggatttggggaatgaacaatggtacttgatcaaataatccttgtactaggcaatcacagtttctagggccactgtacctggccatgggggttttattgataataatctgtaaggaacaaaagggttagtactatcggaatttttgattagatgtagtgagcattaaggacatatggaaagtagtttgaagtaaaatatatacagtataagagtcagaatcagccaggcgcggtggctcatgtaatcccagcacttcgggaggccgaggtgggcggatcacctgaagtcaggagttcgagatggcctggccaaaatggtgaaaccccatctctagtgaaaatacaaaaaaaagccaggtgcggtggctcacgtctgtaatctcagcactttgggatgctgaggcaggataatcgcttaaacctggaaggcagaggttgcagtgagctgagatcacgccactgcacaccaatctggggtacagtgaggctctgtctcaaaaaaaaaatacaaaaaaagtagccagacatagtggcatctacttgtagtccagggtactcaggaggctgaggcaggagaatcacttgaacccaggaggcggccgtgtcagtgagcctagatcacaccactgcactccagcctggaagacagaggaagactccatctcaaaaaaaaaaaaaaaaagtgagaatgttgcatagattacccaagttaattcttataatttagtgttcatttaaaaggaaaattgatttcctactttttgtttttaaaaatagtattaggctgggtatggtgggtcaggcctgtaatcccaacataaaatgtggccaaggcaggaggattgcttgaggtttggagttcaaggccagccccagcaacaatgagaccaggaaaaatcagccaggcacggtgctaagcacctgtggtcccagctagtcagctagctgaggcaggaggatcgcttgagtccagaagttcaaggctgcagtgagctgtgatggcaccactgcattctagtgtgggcaacagaccaagaccctgcctctaaaacaaaatgtaaaaaatatattttccatttccctattcattttatgtatttgtagcataaatgttactatgcatattgacacttaacaccattagatttctcttacatgtattacgttgctttactgcattagtaatatttttttcgtaattaggaaagtccataattactgttacagaaattttttatttgggatattgtgggaaatggctagtgttgtcatagttaataaaaattatataattaagtgccattgaagaaccatagtttgaaagtgaatttaatacattagctcatagttatacaatctcacaagcattttgctgccttcaggttgtcagtttcctgctaatgctaatgactaaattttttatttttcttttcaacgaaaatttcactcagttctatatatgccagatgaggcttggaacatacagctctacaacctttaactgcttttccaaaaatctgaacgctatgaaaatgaaaaatcttcataatttaactgatttggtgacaaagcgtaaagtgaacagatgtgagagtatttgtaattgttaattttacgtagtaggaaatagtaatttgttcaattagggttgctacttcatatccttttagtgtttcaatataggtgtaccacactacttttcctttaaaaatgttctcagaatttaacattctgcaacactcttgaaccctgtgattttggagaatggaacctatagtagatgctcagcaaattctacatgatgcaaattaaaatcaaggatatgagtatcatgtcttaactgtttaaagagtaggttttactatgaagagatccataagtaaagagcatttgaaatgaaaactttttcctaaacttccctcttttttttaacattgtgtgtgtgaagttaatgttgtatttctaatatgagcttaatgttgcaattaatgtatagtggaaaataataacacgtatattaattcatttttgagacaagagttcgctctgttgcccaggctggagtgcagtggcatgatctccgttcactgcagcctccgcctctaggcctcaagcgatccaccggcttcatccttccaaagtgctgggattacaggagtaagccactgtgcccaagccatcaataaatttttatgggttagaagtttgggccaggcctggtggctcatgcctataatcccagcagtctgggaggccaaggcaggtggattacttgaggtcaggagtttcagaccagcctagccaacatggtgaaaacatgtctctataaaaatacaaaaagtagctgggtgtgctgggcgcagtggctcacgcctgtaatcccagcactttgggaggccgaggcaggcagatcacgaggtcaggagatcgagaccatcctggctaacacggtgaaaccccatctctactaaaaatacaaaaaaatagccgagcatggtggcgggcgcctgtagtcccagctacttgggaggctgaggcatgagaatggcgtgaacccaggaggtggagcttgcagtgaggcgagatcgcgccactgcactccagcctgggcgacagagcgagattctgtctcaaaaaaaaaaaaatagtagctggatgtggtggtgcgtgcctgtaatcccagctgctcaggatgctgaggcaggacaattgcttgaacccaggaggtggaggcggaggttgcagtgaaccaagattgcacctctgcactccagcctgggcaacagagcaagactgtctccaaaaaaaagaaagaaaaggccgggtgcagtagctcacacctataatcccagcactttgggaggccgaggagggcggatcacttgaggtcaggagttcaagatcagcctggccaacatggtgaaaccttgtctcttattgaaaatacaaaaattagccaggcatggtggttgatgcctgtactcgggagcctgaggcaggagaatcacttgaacctgggaggcagaggttgcagggagccaagattgtgccactgcactccagtgtgtgtgacataacaggactccgtctcaaaaaaaaaaaaaaaaaagaaaagaaacacatggaaccaaatcaggatgaaagaaactggaatagcagtttgttataggctgggcttgttggcttgttcctgtaattccagcactttgggaggcccaggcaggaggatcacttgagtctatgagtttaagaccaacctgggcaacaatgccagatcccatctttaaaaatatgaatagcacattaaattcattgattttttttttttaagtcttgctctgttgcccaggctggagtgcaatgacgtgatgtctgctcactgcaacctccacctcccggattcaagtgattcccctgcctcagcctcccgagtagctgggattacaggcacccgccaccacgcccagttaatttttgtatttttagtagagacagggtttcaccatgttggtcatgctggtctcgaattcctggcctcaggtgatccacccacctcagcctcccaaagaattgctgggattacaagcgtgagccaccgcaccgggccggaatttttttaaaatgccaatactggtgacaggattagagtatattaactgattttacttagtctttccattcccacattaattagttctcaaaatttatttgcatgctacaaaagagctcaacaatttttttattacgtgcaatttttttaataggaataaaaaaatacgttgttggcctcattatcaagacgtcatctgacccaacttgtgtagaggtaagagtttattttggagcttattgggagagcataaaatcatttagatattgagtctgactacaacctaattctgtcaagacacatagtcacacatatgcac

SEQ ID NO: 14967 - DNA, 342 bp, Homo sapiens
agcaaagaatggctcaagaagtactgacacatttaaaggagcatcctgatgcttggacaagagtcgacacaattttggaattttctcagaatatgaatacgaaatactatggactacaaattttggaaaatgtgataaaaacaaggtggaagattcttccaaggaaccagtgcgaaggaataaaaaaatacgttgttggcctcattatcaagacgtcatctgacccaacttgtgtagaggtaagagtttattttggagcttattgggagagcataaaatcatttagatattgagtctgactacaacctaattctgtcaagacacatagtcacacatatgcac

SEQ ID NO: 14968 - DNA, 16809 bp, Homo sapiens
agtatatatacaatgttatacaaccattaatacctagatccaaaacattttcatcacccgaaggtgaccctttacccctaaaacagtcactttctcctttgttctctccccaacttctggcaaccattattttggtttctgtctctgtagatatatctattctgattataccatataaagggaatcatgcatgtgaccttttgtgtctggtttcttttatttggtgttgtgttttcaatgttcttccatgttgtaacctgtatcaatacctcactttttatcatgtctgaagaatattctcattgtatgaatattcagtattttgtttgttctctcctctgtgatggtacatttgggttgtgataccacttattggcacccaaggccttttaaataaatgtcgttccattaggagacatgataaaaatacatattgatcaactactatgtgagagatttttgaagtgctttagggcatgtcagaagaagcagagttactccagagtttgctgtctatttgataagtattgaaatctgagttgtgatgaataaaacatgaatttttattttcccttaaggtgtaacaagtgaaaagcaatttgaagttggtaatgtttaagaattattttaacagttttggtcttctgtgtaggcccttcattatatgttgttggtatctgaagtagaagaaactgaaatctttaaaatttgtcttgaatactggaatcatttggctgctgaactctatagagagagtccattctctacatctgcctctccgttgctttctggaagtcaacattttgatgttcctcccaggagacagctatatttgcccatgttattcaaggtaacagagcggttggttgagtgttcttcctgttgcatactgtggttttgaggtctgaatccaaatacttctaatctgtgtaaataaattagctataaaaagagaacccaacaacttctccatgagtgtggaaaactagaacatgaaaggagttgagtctagaaccttgattctcaagagtgtggtccttctctcagtatcaacattggttgtgatttcgttaggcaaattcattggccacctgccaatctactaaaccagagtctaggaatgagacacaggaaactcctgtaacagaagttggttaaaaaaatcacattaaaacacacttaaataattataaagccatttttgtagaattacagtgaaaaaaaattttttcttttggagacagggtcttgctctgtggctcaggttggagtgcagtggcgtggtcatagctcactacaatcttgaactcctagactaaagcaattctcttgtgtcagcctcccaagtaattggttgcaggcacacaccaccatgcctagcaaattttaaattttttagttttacttcatttatatttacatagttttttctgttgtgctttaagccccagtatttttattgttttagagattgggtgtcattttgtgttgctcaagctgctctcaaattcctggccacaacagttctttttgcctcggccctccggaatagttggaattataggcatgaatccctacacatggctggcttgtggtttttttggttttgtttgtttttaactaagcttctacactaatgatttcagtgatctaacgatttttttcttgattgatatattgttgagtataggtccgtttattaatggttagtcgaatggctaaaccagaggaagtattggttgtagagaatgatcaaggagaagttgtgagagaattcatgaaggatacagattccataaatttgtataagaatatgagggaaacattgggtaagttaataaatactgttaatctttacctttataaatctattctggggtggaaatacattttaggaaatgtacttgtagtttctaaatattttctaaatgtattgttactcatcaataaaattctgctcattatttgcatttgaaaccatgtttttctttgtagtttatcttactcatctggattatgtagatacagaaagaataatgacagagaagcttcacaatcaagtgaatggtacagagtggtcatggaaaaatttgaatacattgtgttgggcaataggctccattagtggagcaatgcatgaagaggacgaaaaacgatttcttgttactgttataaaggtatgcaagggataggtatgaattagaattgctaaataagtattatgttgttacaataaataatacaaatttgtcttatttacaggatctattaggattatgtgaacagaaaagaggcaaagataataaagctattattgcatcaaatatcatgtacatagtaggtcaatacccacgttttttgagagctcactggaaatttctgaagactgtagttaacaagctgttcgaattcatgcatggtaaatctctttctttactatattttgcttttatttttattgaagaaaataaatgaatgtttttgtcttgttagagacccatgatggagtccaggacaaaataaatgaatatttttgtcttgttagagacccatgatggagtccaggatatggcttgtgatactttcattaaaatagcccaaaaatgccgcaggcatttcgttcaggttcaggttggagaagtgatgccatttattgatgaaattttgaacaacattaacactattatttgtgatcttcagcctcaacaggtatgttaagcactgagcatatgttatttttagaaagtaacacttgtatcaatctgtatgtatcaatggaaataggagggcaactattggatccaatagaagtgtttctgattaaattttctttcttttttccttgagacagggtcttactctgttgcccaggcttgagtgcagtggcacaattacggctcactgcagccttgaactcccaggctcaggtgatcctcccaccttggcctcgtgggtagctgggactacaggcatgcactgccatcacactcagctaacctttttcccccccttggtagagatggggttttgccaagtggcccaggctggtcttgaactcctagcttcaagcgatacgcttgcctcagcctcccaaaatgattttatatgtgtgagccaccacgcccagcctggttaaattttcatagtgagacagattcttgaccagaagattgttaggctgttgtcctatgtaaaattattccgaacaaacaaaatcaggtgttttttgttttgttttgttttggggtgtgtgtgtgtgtgtgtgtgtgtgtgtgtgtgtgtgtttgttttttgagatggagtttcactctgtcgtccatgctggagtgcagtggcgcaatctcggctcactgcagccttgcctcctggggtcaaacgattctcttcctcagtggctatgattaacaggtgcttgccaccacgcccagctaatttttttatttttagtagagacggggtttctccatgttggtcaggctcatctccaactcctgacctcatgatccgcccgcctcggcctcccaaagtgctgggattacaggcgtgagccaccaccatgcctggccagtttgggttgtttgtttgtttgttttttgaggtggagtcttcctctgtcacccaggctcgagtgcagtattgcaatctcggctcactgcaacctctgcctcccaggttcaagcaattcaaacctcccaagtaactggaattataggcacctgccaccacgcttggctaatttctttgtatttgtagaagagatggggtttcaccacgttggtcaggctggtctgcaactcctgaccacaagtgattggcctgccttggcttctcaaagtattgggattacaggagtgatccactgcacctgggccaaaatcagtttcaagacgtttgtgaattgcttgtgtgtggttttccttattagggtgtataacataaacgttaaaatgtctgctttttaaaataggttcatacgttttatgaagctgtggggtacatgattggtgcacaaacagatcaaacagtacaagaacacttgatagaaaagtacatgttactccctaatcaagtgtgggatagtataatccagcaggcaaccaaagtaagtatttctaccttttcttaaaagttttcatgggatttaacaagacgtgttctttacaaatgtattgaattcaagccttttaacatgtatgtgtgatccataagtgcttttatgtgtgtctttctataatttattatctgggcgaggtgtggtggctcacgcctgtaatcctggcacattggaaggccgaggcgggcggatcacctgaggccagaagttcgagatcagcctggccaacatggcaaaaccccgtctctactaaaaatacaaaaattagctgggcgtggttgcacatgcctgtaatcccagctactgaggaggcttaggcaggagaatcacttgaacccaagaggcagaggttgcagtgagccgagattgagctactgttctctagccgagacgacagagcaagactctgtctcaaaaaaaaaaaaataaatgaaaaatctgggccgggctcggtggctcacgcctgtaatcccagcactttgggagaccgagacgggtggatcactaggtcaggagattgagaccatcctggccaacgtggtgaaaccccgtctctactaaaaatacaaaaattagccaggcatggtggtgggcgcctgtaatcccagctactcgggaggctgagccaggagaatggcttgaacccaggaggcggagcttgcagtgagtcaagagcatgccactgcactccagcctggtgacagaggaagactctgtctcaaaaaaaaaaaaaaatactgtaatttccattctcatttgatattaaaataggaataggctgggtgtggtggctcatgcctgtaatcccagcactttgggaggccgaggcaggcggatcaccaggtcaggggatcgagaccatcatggctaacgcagtgaaaccctgtctctactaaaaatacaaaaattagctgagtgtggcggcgggcgcctgtaagtcccagctactcaggaggctgaggcaggagaatggcgtgaacctgggaggcagagcttgcagtgagccgagatcacgccgctgcactctagcctgggcaacagaacgagactccgtcccaaaaaaaaaaaaatagaactatattacttcattcttaagtagatgtagacaaaaaggcgtttgtgttcgtttttaccatttgggattataaatatggtttagggtaagggaagcgtaatggcttttgctttggtaattatgtggattttttttttttttgagatggagtttcactcttggtgcccgggctggagtgcaatggcgtgatctcggctcactgcaacctctgcctcccgagctcaagcagttctcctgcctcagcctcccaagtggctgggattacaagcaagcaccattgtgcctggctaattttgtatttttagtagagacagggtttctccatgttggtcaggctggtcttgaactcccgacctcaggtgatgcacccgactcagcctcccaaagtgctgggattataggtgtgagccacctcgcctggccattatgatggataattctttttttttttttgagacggagtcttgctctttcgcccaggctggagtgcagtggtgcgatctcggctcactgcaaactccatctctagcgttcacgccgttctcctgcctcaacctcccgagtaggtgggactacaggcggctgccaccacgcctggctattttttttgtatttttagtagagacggggtttcaccgtgttatccaggatggtcccgatctcctgaactcatcatccgcccgcctcggcctctcagagtgctgggattacaggcgtgagccactgttcccagccgtggataattcttatatgataaatggaatttgctttttttcctccaagaatgtggatatactgaaagatcctgaaacagtcaagcagcttggtagcattttgaaaacaaatgtgagagcctgcaaagctgttggacacccctttgtaattcagcttggaagaatttatttagatatgcttaatgtatacaagtgcctcagtgaaaatatttctgcagctatccaagctaatggtaggtgattctgatttcttacacaatgcagtataaacaaaccacttctcttctactgccttaagtcaaacatttgatgttttttacagatttaaatcagacctcccatttcccaaatgaccctagacatatttaaaacagttaagtgtacctttcccttttaaaattagtcttaaagcttattttcccaataaattttgtgaacttttggctttaaactttttaatggtaaaatggaattgcatctaatgtacacctgagtaccactgtataagtttagtggtaaaattagattccatttgattctgttttgtaggtgaaatggttacaaagcaaccattgattagaagtatgcgaactgtaaaaagggaaactttaaagttaatatctggttgggtgagccgatccaatgatccacagatggtaagtgagagatgctttgcttttgatttctagtgttgatgctgtgttttatggaatatgctatactctattatgtgcattttgctaatttaaagcatatcaactttgtggttattttatggcattttatttattgtagtccttacgttaatatactaatagctgtattccatcttcaaaagaaactgctgttaatcagtagcgaagggtggtgatatgtaacaagatagctaagaaaattgggtcattttatgtttccatagataggttaggaggatttaattaatggagtaccggtgcagtttttgcattcctcttgatttttagaacaattgctagagctacaaagttgtcattactttacctctttagcaaagtgattgcttcccagattaaaggcctgaaagtcttttttacaccctttttcctaaatgatttgcagaaaaggaaatcattttcagtaataaaaaccagctgcgtatgcctcaacttgtaaaattgtgaattagttttaggttttaactgtatcgtttcattcttgttattcaattgagccttgggagagtccaaaaaattctaatactactattacttggaatagtgttggttttttgttttttggtttttttttttacaagtgtgctagttattttcatagttttgaaatttcagtattgtttcttgttaaggaaatacttttcagtaaacttgttctgaatataattcttgtggaatacttaagttggctaacctaaatatcgaaaggttctgaacatgcgtattatgtgaacagaactgtatttaaaatttgaaagcagaaagtaagatgtattgaaggaattgtgatgtttgtaatttacaagaagcttgagcacgtgtcgggagcacagtgggaataatacaaagggtatcatcttttgtaacattaatgttaaagtttgggatatttgttcacatgaaacattgtgtttattttccttgtcttggcttttcacggtggctcatgcctgtaatcccagcactttgggaggccgaggcgggtggatcacttgaagtcaggaggctgaggcaggagaatcacttgaaccccagaggtggaggtgacagtgagccaagattgcgccattgcaccccagtctgggccacaagtgggaaacttcgtctcaaaaaaaaaaaaagaacaagaagttactctttaagtataactcagtttacttagaatcatgaaaatcttactgggcattgtagcatgcacctgtaatcccaaccaccagggagggtaaggcaggcgaatcaccccagctcaagtccagtttaggcaacatggcaagattcagtttcaaaaaaataatagaaatccatagtctttcttattttctgagagtaattgattgatgttatttctgcttgtgaaaatactcaccagttagcattcattagattaaaacattagtctgagttgggtggatcacgaggtcaggaaatcaagaccatcctggctaacacggtgaaacaccccgtctctactaaaaatataaaaaattagctgggcgtggtggcaggtgcctgtactcccagctactcgataggctgaggcaggagaatggcgtgaacctggaggcggagcttgcagtgagccaagatggcaccactgcactccagcctgggcgacagagcaagactccgtctcaaaaataaaaagacagtattgagggctcgcttgctgccatcttacatatacagtatacgtagaatcctgattctgccacctaagttggagacacccactgaattttgagcctcacttttcttattgtgagagttttgtagctgggcatggtgctatacctatagtcccagctactcaggagactgaggcacaagaattgcttgaacctgggaggtggaggttgcagtgagcagagatttgccactgcactctggtctgagtgacagtgagactgtctcaaaaaaaaaaagtcttgaatgacagtgtgtccatgagacttcccaacccattgtgatttcctgctttcttttgctaaaaactgttttgacgtaggaaaccctaatacaaacacaagattttcctgttttcagtagatgatcatgctacatctcatagacaggaataaccttgttgtttaaaatagtcaccatgtacctaaattaaaacataacttttttttccctccccaacaggtcgctgaaaattttgttccccctctgttggatgcagttctcattgattatcagagaaatgtcccagctgctagagaaccagaagtgcttagtactatggccataattgtcaacaagttagggggacatataacagctgaaatacctcaaatatttgatgctgtttttgaatgcacattgaatatgataaataaggtgtgtaatatttcagttatgtaagggggaaattctgcaggatagccttaattcttgaaagctaaagtatgtctgtggatataacataattttaatgccatggagtttaaatatttaaacttgtatattagggaaatactttcttggttttcaagaacttacttcccaggagtttgaaaccaacctgggcaatatagtgagacttcatctctacaaaaagttcaaaaagtaaccagtcatggtggcatgtgccggtagtcccaactactcgaaaggctgaagtgggggggggggtcacttgagcctgggagttcaagatggcagtgagctgagattgcgccactgcactccaagaagaagaatttactacacagaatcttgattggtaaaaagtaaatatggaaaacagattttagcattcacatggtatgtagcatttattgaaacctcataggtcggggcatccttttatgaacgtagttgtattaattggtttgaataaatgagaaagtaagtctgcatgtttcaattataaaagtgtagtatatgcttataagaaactgaaaaatgtgttaacaagagaaaataggctggccatggtggcttacacctgtaatcccagcacttcagaaggccaaggcgggcggatgacctgaggtcgggagttcaagaccagcctgcctaacgtggcaaaaccccatctctattaaaaatacaaaaatggccaggcgtggtggctcaacacctgtaatcccaacactttgagaggccgaggccggtggatcacctgaggtcaggatttcaagaccagcctgaccaacatggtgaaaccccatctctactcaaagattaggctgggtgccgtggctcacgcttgtaatcccagcactttgggaggccgaggtgggcagatcacgaggtcaggagatggagaccatggtgaaaccctgtctctactaaaaatacaaaaaattatccgggtgtggtggtgggcgcctgtagtcccagctactcggagaggctgaggcaggagaatggcatgaacccgggaggcggagcttgcagtgagccaagatcgcgccacgcactccagcctgggtgacagagcaagactctgtctaaagaaaaaaaattagctgggcatggtgccgcatgcctgtagtcccagctactcgggaggctgaggcaggagaatctcttgaacccaggaggcggaggttgcagtcagctgagattgcgccactgcactacagcctgggtgacagagtgagactgtttaaaaagaaaaaagagataaaagatacgttaagtggacacatttacacggtaacttaaatttttttgtaatctgtagtggtgatttcaaattaaaaacaaaagtgatagtagtagtcttatggtaataatggtttagatgagttctctattaaaaaggttgtctttctccttcaatttgataactcatgtgcgtaacgggacagtttcattttccgtgagaggtggattgtattttacttgggtttacctttcaggaggcattctatcttctgtggtttattgaaaactccaaatatttatactggattaagccttgcttttcccctcctgtctagcacaacaaagacactgaaacattattttgtttccaccacttatttttaggactttgaagaatatcctgaacatagaacgaactttttcttactacttcaggctgtcaattctcattgtttcccagcattccttgctattccacctacacagtttaaacttgttttggattccatcatttgggctttcaaacatactatgaggaatgtcgcagatacgggtaaataaaagatgttcttttattcatttgcctgccaatccaaaaatacaaatatagttaattgtacataggaaggtattacttgttcagagttttgagtgtgtgaattacatatatgaacatctgagaaaatcctataagcagtttaatcaactgttccactccactccaagtgagtccataggcagaattgagttatggggagagcggcctagtaataattggtttgcgtaatacaaagttctactgggtagtgatgttgtagaagttcatatagaatcagctgagctttcagaaatggtgaaagggtggtaatagtcataacttagattgtaatttttttcccataggcttttaaaaaatattcatgaggttctttttttatttcaatagtttttggggaacaggtggtttttggttacatgaataagttcttcagtggtgatttctgagattttggtgcacctgtcatgtgagcagtatgaactctactttatgtgtagtcttatccctcatgtgtatgaactccaccttatgtgtagtcttatccctcacccactcctgcccttccccacaagtccccaaagtccattatatgatctttatgcctttacatcttcacagtttagctctcacacaacttattataatttataagtaagccagcattggatatagttgtattccattattaatttaagaaaccttatgcaagtaattattagtcatcatcccaaaaaaaagggagaacagggttagattcagaatactttgataagagctaaatactatcatgagtgctgtcagtctgtagtaactttccattggtattctatgtcttttaggcttacagatactttttacactcttacaaaatgttgcacaagaagaagctgcagctcagagtttttatcaaacttatttttgtgatattctccagcatatcttttctgttgtgacagacacttcacatactgctggtaagaatttaatacgatttaaatgttaagtgccagctgggcacagggcctcacgcctataatcccagcactttgggaggtcgaggcggggagattatgaggtcaggagttcgagaacagcctggccaccatggtgaaactgtctgtactaaaaataccataaaaaaataaaagatacaataaaaatactgggcatggtggcatgtgattgcaatcccacctattcgggaggctgaggcaggagaatggcttggaccgaggaggcagaggttgcagtgaactaagattgcgccacggcattccagcttgggtgacagagcgagactccgtctaaaaaaaaaaaacaaaacaaaaaaaaacgctaagatctatagttatattacattttggagttaataattttcttcttatcaacaggtttaacaatgcatgcatcaattcttgcatatatgtttaatttggttgaagaaggaaaaataagtacatcattaaatcctggaaatccagttaacaaccaaatctttcttcaggaatatgtggctaatctccttaagtcggccttccctcacctacaagagtaaatataccttttaataaacgtagaatgttcctggtcgggcacagtggctcacacctgtaatcccagcactttgggaagcctaaggtgggaggattgcttgggcccaaaagttggagaccaacctagacaacaaaacaagatcccgtctctacaaaaaaaaaagtagtcagaagtggtatgcatctgtaggaccagctgttggagaggctgaggcgagagggttgtttgcatcctggagtttaagactgcagtgagctatgatcgcaccactgtacaccagcctgggtgatagagtgagaccctgcctctttaaaaaagcaaaaaaaaaaaaaaaaaaaaaaaggccacgcacggtggctcatgactgtaatcccaacactttgggaggctgaggtgggtgaatcacaaggtcaggagttcaagaccagcctggccaagatggtgaaaccccgtttctactaaaaatacaaaaaattagttgggcatggtggtgggtgcctgaaatcccagctacttgggaggctgagggggagaactgcttgaacccaggaggcagaggttgcagtgagccgagattgtgccactgcactccagtgtgggtgacagagcaagactgtctcaaaaaataaaaaggctgggcacggtggcaaacgcctgtaatccaagcactttgggaggcctaggcgggcagattacctgaggtcaggagtttgagatttgcctgaccaacatggagaaaccctgtctctactaaaaatacaaattagccgggcatggtggtgcatgcctgtaatcccagctacttgggaggctgaggcaggagaatagcttcagaggttgcggtgagccgcgattgtgcgattgtactccaacctggtaaacgagcaaaactttgtctcaaaaattaaaaaaaaattcttgattaaaaaaaaaaaacattattgggacgctgaggcaggagaatgtcttgaacccgggaggcagagattacagtgagcagagatcatgccactgtactccagcctggtgacagagcaatactctgtctcgggggaaaaataaatcattatttaatcattgtgttttgatttgcagtgctcaagtaaagctctttgtgacagggcttttcagcttaaatcaagatattcctgctttcaaggaacatttaagagatttcctagttcaaataaaggtatgtatttatttgctcttgcagaaatattaggggtagatgtgaccacttttatgttacattgtagaatttttatcacttgatttgtcatgccaaataaatggggtttcaagataatacgtttacacaatctctgtaatcaaaaaacctgagactggtaatacagtgaaaaactaaagtccaataaggatagatatgtttgagatgttattcggataaacttattactaatgtaattcattttaggtagtcttaaatgtataatggaatattgggtaagaaaaacgttggtagttctttttataattttataccaattttgttagttgagggaacttgtgaaagttactagatagaatgtctttcttctgctgttatacagtgctttattcatacttttgggaagggtttttctttgaacatcttgctttaaagaaatttggaagtactgtgaaaccctaagtagttgatgaatagtttatccatgattgttgaataagaattagtctcttagctcttaaatattttctccaaaatacaaaggttttttttttttactgtaaaaatattagccaatttttaaaaaactaatgaaagttacctaggctgggcgcagttgctcatgcctgtaatcccagcactttgggaggccaaggtgggtgggtcacctgatgtcgggagtttgagactagcacggccaacatggtgaaacccccgtctctactaataatacaaaaattagccaggcgtggtggcgcacagctgtattcgcagctacttgagaggctgaggcaagagaattgcttgaacccacgaggcaaaggttgcggtgagccgagatcacgtcattgcactccaacctgggtgacaagagtgaaacttcatctcaaaaaaaaaaaaaaaaagttaactgatagctacgaagtcaatgataatataactaaacttaatttaatgacagttattaattagccttaggagaaacatctttcttggtatcttggcatatgaagaatttttagctgggcacagtggctcacacctgtaatcccagcactttgggaggccgaggcagacagatcagttgaggtcaggagttcaggatcagcccggccaacatggtgaaacctcatctctactaaaaatacaaaaattagccaggtctggtggcaggtgcctgtagtcccagctactcgggaggcagaggcaggagaatcacttgaacccaggaggcagaggtttcagtgagctgagatcataacactgcacgccagcctgggcgacagagcaagactgcctctcaaaagaaaagagaaaaaagtgtctgggtgcagtggctcatgcctgtaatcctagcactttgggaggccgagacaggtggattgtctgagcttgggagtttgagatcagcctgggcaacatggtgaaactacgtctctagtaaaaatacaaaaaatgagccagatgtggtggtgcctgtaatcccagctgctggggaggctgaggcaggagaattgcttgcatcttggaggaagaggttgagataatgtgctggggctacagaacaagactctatcacaaagagaacaaaatttgtgtgaatacatagtaggtgtatatacttaggggatgggatgcatgagatacttcggtagaagcatacaatgcataataatcacattgaagactatttactgtaaggtatcacaccattttttttgttttttttgggggggcacagtctcgcttttatcacccaggctggagagcagtggcgtgatcttggctcactgcaacctccgccatgcaggttcaagtgattctcctgcctcagcctcccaagtagctgggattacaggcgcctgtgccaccatgcatggctaattttagtaatgacagggtttcaccatgttggccagggtggtctcctgacatcaagtattcttcccgtctctgcctcccaaagttgggattacaggcgtgagccaccatgccggggcccatgattcttttgtaatcttcccccccaccagttaacaggtttgcagttcattcagctatgtagtatactgtgtcactatcctataatttaaaacccagccactttatggataatttatattccttccttctctaaaaaggaaattgctcatctatgatttctttctttgcaagttgaagtttattgcgttgacatttcaactatctgttttcacaggaatttgcaggtgaagacacttctgatttgtttttggaagagagagaaatagccctacggcaggctgatgaagagaaacataaacgtcaaatgtctgtccctggcatctttaatccacatgagattccagaagaaatgtgtgattaaaatccaaattcatgctgttttttttctctgcaactcgttagcagaggaaaacagcatgtgggtatttgtcgaccaaaatgatgccaatttgtaaattaaaatgtcacctagtggccctttttcttatgtgtttttttgtataagaaattttctgtgaaatatccttccattgtttaagcttttgttttggtcatctttatttagtttgcatgaagttgaaaattaaggcatttttaaaaattttacttcatgcccatttttgtggctgggctggggggaggaggcaaattcgatttgaacatatacttgtaattctaatgcaaaattatacaatttttcctgtaaacaataccaatttttaattagggagcattttccttctagtctatttcagcctagaagaaaagataatgagtaaaacaaattgcgttgtttaaaggattatagtgctgcattgtctgaagttagcacctcttggactgaatcgtttgtctagactacatgtattacaaagtctctttggcaagattgcagcaagatcatgtgcatatcatcccattgtaaagcgacttcaaaaatatgggaacacagttagttatttttacacagttctttttgtttttgtgtgtgtgtgctgtcgcttgtcgacaacagctttttgttttcctcaatgaggagtgttgctcatttgtgagccttcattaactcgaagtgaaatggttaaaaatatttatcctgttagaataggctgcatctttttaacaactcattaaaaaacaaaacaactctggcttttgagatgacttatactaatttacattgtttaccaagctgtagtgctttaagaacactacttaaaaagcaaaataaacttggtttacattt

SEQ ID NO: 14969 - DNA, 3706 bp, Homo sapiens
agtatatatacaatgttatacaaccattaatacctagatccaaaacattttcatcacccgaaggtgaccctttacccctaaaacagtcactttctcctttgttctctccccaacttctggcaaccattattttggtttctgtctctgtagatatatctattctgattataccatataaagggaatcatgcatgtgaccttttgtgtctggtttcttttatttggtgttgtgttttcaatgttcttccatgttgtaacctgtatcaatacctcactttttatcatgtctgaagaatattctcattgtatgaatattcagtattttgtttgttctctcctctgtgatggtacatttgggttgtgataccacttattggcacccaaggccttttaaataaatgtcgttccattaggagacatgataaaaatacatattgatcaactactatgtgagagatttttgaagtgctttagggcatgtcagaagaagcagagttactccagagtttgctgtctatttgataagtattgaaatctgagttgtgatgaataaaacatgaatttttattttcccttaaggtgtaacaagtgaaaagcaatttgaagttggtaatgtttaagaattattttaacagttttggtcttctgtgtaggcccttcattatatgttgttggtatctgaagtagaagaaactgaaatctttaaaatttgtcttgaatactggaatcatttggctgctgaactctatagagagagtccattctctacatctgcctctccgttgctttctggaagtcaacattttgatgttcctcccaggagacagctatatttgcccatgttattcaaggtccgtttattaatggttagtcgaatggctaaaccagaggaagtattggttgtagagaatgatcaaggagaagttgtgagagaattcatgaaggatacagattccataaatttgtataagaatatgagggaaacattggtttatcttactcatctggattatgtagatacagaaagaataatgacagagaagcttcacaatcaagtgaatggtacagagtggtcatggaaaaatttgaatacattgtgttgggcaataggctccattagtggagcaatgcatgaagaggacgaaaaacgatttcttgttactgttataaaggatctattaggattatgtgaacagaaaagaggcaaagataataaagctattattgcatcaaatatcatgtacatagtaggtcaatacccacgttttttgagagctcactggaaatttctgaagactgtagttaacaagctgttcgaattcatgcatgagacccatgatggagtccaggatatggcttgtgatactttcattaaaatagcccaaaaatgccgcaggcatttcgttcaggttcaggttggagaagtgatgccatttattgatgaaattttgaacaacattaacactattatttgtgatcttcagcctcaacaggttcatacgttttatgaagctgtggggtacatgattggtgcacaaacagatcaaacagtacaagaacacttgatagaaaagtacatgttactccctaatcaagtgtgggatagtataatccagcaggcaaccaaaaatgtggatatactgaaagatcctgaaacagtcaagcagcttggtagcattttgaaaacaaatgtgagagcctgcaaagctgttggacacccctttgtaattcagcttggaagaatttatttagatatgcttaatgtatacaagtgcctcagtgaaaatatttctgcagctatccaagctaatggtgaaatggttacaaagcaaccattgattagaagtatgcgaactgtaaaaagggaaactttaaagttaatatctggttgggtgagccgatccaatgatccacagatggtcgctgaaaattttgttccccctctgttggatgcagttctcattgattatcagagaaatgtcccagctgctagagaaccagaagtgcttagtactatggccataattgtcaacaagttagggggacatataacagctgaaatacctcaaatatttgatgctgtttttgaatgcacattgaatatgataaataaggactttgaagaatatcctgaacatagaacgaactttttcttactacttcaggctgtcaattctcattgtttcccagcattccttgctattccacctacacagtttaaacttgttttggattccatcatttgggctttcaaacatactatgaggaatgtcgcagatacgggcttacagatactttttacactcttacaaaatgttgcacaagaagaagctgcagctcagagtttttatcaaacttatttttgtgatattctccagcatatcttttctgttgtgacagacacttcacatactgctggtttaacaatgcatgcatcaattcttgcatatatgtttaatttggttgaagaaggaaaaataagtacatcattaaatcctggaaatccagttaacaaccaaatctttcttcaggaatatgtggctaatctccttaagtcggccttccctcacctacaagatgctcaagtaaagctctttgtgacagggcttttcagcttaaatcaagatattcctgctttcaaggaacatttaagagatttcctagttcaaataaaggaatttgcaggtgaagacacttctgatttgtttttggaagagagagaaatagccctacggcaggctgatgaagagaaacataaacgtcaaatgtctgtccctggcatctttaatccacatgagattccagaagaaatgtgtgattaaaatccaaattcatgctgttttttttctctgcaactcgttagcagaggaaaacagcatgtgggtatttgtcgaccaaaatgatgccaatttgtaaattaaaatgtcacctagtggccctttttcttatgtgtttttttgtataagaaattttctgtgaaatatccttccattgtttaagcttttgttttggtcatctttatttagtttgcatgaagttgaaaattaaggcatttttaaaaattttacttcatgcccatttttgtggctgggctggggggaggaggcaaattcgatttgaacatatacttgtaattctaatgcaaaattatacaatttttcctgtaaacaataccaatttttaattagggagcattttccttctagtctatttcagcctagaagaaaagataatgagtaaaacaaattgcgttgtttaaaggattatagtgctgcattgtctgaagttagcacctcttggactgaatcgtttgtctagactacatgtattacaaagtctctttggcaagattgcagcaagatcatgtgcatatcatcccattgtaaagcgacttcaaaaatatgggaacacagttagttatttttacacagttctttttgtttttgtgtgtgtgtgctgtcgcttgtcgacaacagctttttgttttcctcaatgaggagtgttgctcatttgtgagccttcattaactcgaagtgaaatggttaaaaatatttatcctgttagaataggctgcatctttttaacaactcattaaaaaacaaaacaactctggcttttgagatgacttatactaatttacattgtttaccaagctgtagtgctttaagaacactacttaaaaagcaaaataaacttggtttacattt

SEQ ID NO: 14970 - DNA, 11628 bp, Homo sapiens
ccgtttttttaatttccttttttgaggtgggaaaactgaaacccaccttgattcgtcccctctcccccctccccaccttccctcgccctaatcccccaacgaggaaggaaggagcagttggttcaatctctgggtaagtcgactgtgtcttcggggccgagggtcgggcggcggcgcggccgggcgggcgggaggaggccggcgtggggcgcggcggcggcggccgcgggaagcgagcccgggaggcggcgggcgggccgggggcgcggcgggcccacagcggagcctgcgattgaatggagccgcttttgccgctgggggatggaggcggggaggcggcctcgggaggggagcgcttgctgggtcattcgcgtgtgcgggtggcggtggaggaaggcgaggagtgtgatagtgaagcggggccccgcgcggggtgggaggggttccccagcccctggggctggggagaagttggggtgatttcaggaacatctctgtaaattattaggagtggaagtttccagaaatatttagtgcagcagcattgaaacgtccgcctgcatcacgtggccccctcggtggagagcttgggatgggggagggaggggctgccgactccctgttcctccagcaaggaaactcgaaagctctccggttttgcagagtggcatgtgaagtaggaaagatcagtttttcaggggcctgcacatgggattccgtcttgtagttccttttcaggggtttgaatgtgataagttggttaaaccatttactgttggccttgtacagtggaggatgccctgattctccttcattccgatgtctgtgagtttgggttgggtgggaggaagtggtgtagtagaggaagcattcagtactggctcagcccggacctcctctgatcacgccgaggccatgctgcatagagaaaggggcggtgaacttaaggcgcctggtctaaatgcctcctccgagtaagggcggggtgagtgcgtgctcctgtgtgctatagttagaagggctgcaaatcggttcgggtgggaagcgaggggagggcgggccctaatgaggtgtgtttttcctgaatgaagcgggcgattgcccacacaacctaaggagcagtctttcgccttgtagcgacttgtttttcacctagtgtgaagttattaagcaacggttatgattttctgggttttgtttaggaattggcattgggtgtcacttgtagagtcacattatccattaagctggataatccctagtgtatgttatccagtgagtggattttaggattgaagagcccaatgggaatgagcgttcgtggttacacctctcgcactatggcttgtttgctgtctgattgtatatcttaagtgtgggacactgctgttagtggaaagaatgttttggaagcggtttgatttgggggactaaatgtgcttggcattgaccacaaagccgccatttctgtactatgtacagttcaggaataggtaggtgatttcgaagatagccgctagttctaaggatggcaaactactgtatttaaatccttctattctaaatctcgtttttcacatcagtctagttcggagaattttataagaacagtgtatttgaaaatgaaacttgtaagagtcattttcttaatccttttttgttttagcattcaactatggtagtaaataggtgaaaagtttgttcaatatttaaccgaaatatttgaaaacttttgatacatggatcttggtgctttgtggacattgcttttaagcctcaaataattaagattgttctgatcttttaaattttatggtacttgaaggtggaggagagtttacacattcatttgtggaatatatatttcctctcagtatttagatcttaaggtttttttgtggtgtgtaacaagtattctgctgtttaaaaacgtttgtttaatgcctactacgaaacgttttgaagtctcatcagttttgtcaataatggaccaattcttgaactcctaatttcttgagttttacattatttttacatcatatcaatcataggtgactcatcttttggagttctaatctgttgtaacagacgttatatttaaataagacaattgcattaaaatagaatttgctgccattattgttatggacatttttaagctgttataaaatagccaggaattaatgactttttttccgccctgccaagctagtttgtctaaatataatgtaaagaaattagctactcattttctggtccacgaaagttcctaaaatgggaagaagtggagatctgaccttgttagttctaaatacactaaactgggagtgccatggatggctttcaggatgtcctgaatcctctataattgtatacaaaatcgtgagtttttaaaaactgggttagagctattggttcctcagagtctcaggcatcttagacccccaaaaaggttaaggactactgacttaaccaattaggtttgagtggcattggctttgaagaaaagcagaggaaagatatattttataattctgggcaacaaaaaagtggatgtgtgccagcatcttagagtagaatcctcttaaaaggatagcactgcatatgaactagtaggttttaaccagtgcatatttaggcgaagtagctcatttttctgttagaattcttttttatttgggaatgggcaagcttttacagcttttaccttgccaatgaatacctggaatttaaaaaatcttgttaggcatattgcccataaagttttttttcctagatcatatattcagtaaatatgtttgtagctttatttcaatcccccaattcattgagggttgaaacaatttgaatggtttgagtgtagaagctaagttatttctgtagaggctaagggcatttataccaagatatgttagacttgtggttcctgctaaccattgctgtagacaataggaattactgtatatccacattttaatttttaacatcattctgtctttgtttgtttgtttttgagatggagtctcattctcttgcccaggctagagtgtggtggtgcatctcggcttactgcaaactccgtctcctgggttcaagcagttctcctgcctcagcttcccaagtagctgggattacaggtgcccgcctccatgcctggctgatttttgtatttttagtagagacggggttttgccatgttggccaggctggtctggaactcctgacctcaagtgattcgcccacctcggcctcccaaagtgctgggattacaggtgtgagccaccacgctcggcccattctgtctttatagcattatttttataaagttaagataatgtgaagtgagcttttactgagttattcagaagaccctacttgggaagaaaagaaaatcacattcacttgaacttaatcctacttgcttaaaaagttttgacatcaagatactgaactgtatcacgttttaggaccataaaatcctaatagtggatgcgtttaaataataggttagcatactttataaatgttagtagaataggaaagtcttcctggtgtataaactaaacactagaaaagttgaatggaccataataatttatgtaattatcaaatagctaagtaatttcagcttttgttacttgcttttactatctcagttttctgtaattaaagtctctaaagtattcattaaaatatttgtaataacatggttgaagtaaaataacttgtaggaagtttttgataataccaaaacttgataggcagcttcaattttttttctttattttcagtaatctatgccagcaattatgacaatgttagcagaccatgcagctcgtcagctgcttgatttcagccaaaaactggatatcaacttattagataatgtggtgaattgcttataccatggagaaggagcccaggtaaagtagccaaccaaaactttataacattatgacagtgtaacagagttgttgggtttagaataaaattttaaattatcacctttaaaaaagatattccatagtttgcattaatttggaattctgtattaaccataatgaaaattggtttggagaaagaaattgcatgtttgacatggttagagtgggttgttttggaatattatacttgttttgtccttaagagccaaatgttattaaatactttgtaggtattaaaggttctctgtacttttatatatacttaatatgtttggcactaatacgattcttctacttttaaaacatttacagaagtacttcacagatatgtttgtttaaataaaaacaggaataccaagtatttttatgttagttgaattttgtgcacttttcaaagtggtactgttaatgtagggaattatcttaaacataaaccaaattttgatcagtttaagatttttggtttttttgaacccaactaaaaggtgaaacagaaatgtgtgtacaattttaaattgtatatgtcacaagaaaaaaaacttgattttttacctgtggggccaaacttttttttgagacagtctcgctctgtggtccaggcaggagtgcagtggcgctatctcagctcactgcaacccctgcctcctgggttcaagcgattgtcttgcctcagcctccctggtagctgggattacaggcacacgccaccatgcctggctaatttttgtatttttagtagagatggggtttcaccgtgttggccaggctggtcttggaactcctgacctcaggtgatccacctgactcggcctcccaaagtgctgggattacaggcatgagccaccgcgtgctggcccaaacatgtttttgaatgagtaaaaagttttgcagttgggtcagaaatcttttttttttttcagatggagtcttgctctgtcaccaggcctgagtgcagtggcacagtctcggctcactgcaacctctgcctcccaggttttcaagcaattcacctgccttagcctcccgagtagctgggactacagacgcgccaccatgcccagctaattttttgtattttagtagagatgggtttcatcatattggccaggatggtctccatctcctgacctcgtgatccgcctgccttggcctcccaaagtgtggagatgacaggcatgagccaccgcgcctggccagaaatcttttatggtagttttgttgccagaacagtagatttctggttagataaatgttcagctagtagatgggaggttacttatattgtcaagatatttatatttgcataattaagaaactgagtgccggccgggcgcggtggctcacgcctgtaatcccagcactttgagaggccgacgccggcggatgacgaggtcaggagatcgagaccatcctggctaacacggtgaaaccccgtctctactaaaaacacaaaaaattagccaggcgtggtggcgggcgcctgtagtcccagctactcgggaggctgaggcaggagaatggcgtgaacccgggaggcggagcttgcagtgagccgaggttgcgccactgcactccagcctgggcaacggcatgagacttcgtctcaaaaataaaaataaataaataaaataaaataaaaaaacctaaacctgagtgccattacactttctgaaaatatataaggtggatacagtactatcttttatagtagtccaaaaagcatcatgtataaatgtttccattcccttatgaaatgcaacagtactgcttttactatagtagaaacttgaaaaaggtccatggaaacgctaaaagtagaaaaaattactcttgcagtgattctgtaagcttgttagcccaggtttatacttttagggcgttttgatcagtatattatctcctaaagcattcttgaaaaaattaaccatccgtatttattatccctgtcatttagttgttactcatgctatacattcaacatgaagctttaagcttcatttcttctagcatggatgcatagaaagcagctgcttttggaggaagctatgaaagtaaggttgggttcaactctgaatgtaatattggaagcacaggtctgtagccattgggaaaaagggcatttaattttttccgcatagattcagctactaatactgtttaatcttcacactaaactagttcactacatctaaaggtatgataaataaaccaacatagagcagtgttcttcatggcttgtaacagaattagtggcaatttttgtaattgagaatatattacagcaatactgcttttaataatgtttcatagtattaagaaatttaatggtttgttttaaaattgacttgttaataaaaagtagattaagaaaagtgtttctaaatttttttgtttgtaaggacaataggttaactttcccaaagtaaaaggattttgtctgcagtagttaatagatcatgtgacaaaatcagttgcgtagaaataactagcaaacttattttgtattataaatgaagaaacaagatttagagcttaaagctggttaaggagtccttttggtctctaaaagtcctatgtcgttagttcagtctacttttcgtttaccacctccttgggggtcttatttcaaaggaaaaggagtagtagtagcagcgagctgctatagtggaaaacatgatttttagtgttagacgtcttaatttgattcttggaagctctctctagtcattgcttaagtcccatgtacaaatatgacctgtcctacaagagattggagggttagttatgaggtttaaaagcacctattacagtgcttgataggtagaaggcactcagcttaaagggtacatttagcagtataatgaaaatgatttagcatatgtgatactcattgcttaaaattaaaaaaattttttttttgctactcataaaatatgcactaatgacaagaaaaatttattatgctaattaagcttttaaagtcaactgggaaaaaaagctgtaggtaggtttttttttttttaaaggaatgtgtaacttgggggaggggaagaaattatttacaagggtgacttttaatctgtagacagaacttctgcatacatggttagtatagtaggatatttagcagtgtaacattaggactaccctctaccctctgttatcagcatttttctatttttagccaagtagacagctagaaaaaagatgcgggaagagttggatgttttctccaatattgtgttctgttaaagatcttgaactctattgcttagcaactaaaatgctttcaccattcagttagtagtacaagggagatgctaggttttctctctttagtttgcttttgtgtcttttttttttaaacccctgctggggttttaagtttataaagaacattatgtaagaatggtgggattagaataaatcagaatgcaaatactagaagtagcatcagagagtaaaattacaactaacaggaaagaatattatttatgtagcgattgatgtgagtggtgatagtgtgggaagtatttgattctgtgtagaatgcttatcacttcaaagcatctgacaaaatggtaacttgaccaagtaacttttactgtgtgaggatctttgatacaacttttcctctagttagataaggttatctagctagatattctcagggagaagaccaaaacactgctaaaatgtgctttggccctagataagccacatcattattctttcggccttctgtcatttctcatatgacacattatgcccatcagtcctttaatgaaatcaaatagaaatgtgtatgattgtattttaaagtatacacattaactcttgtaaccacagactcacaatggaagcaggcgtctgatcttttcaggcaaccacagtggttctggtgggtttctgggtagagaacaaccatataagttattgagtgtgtagcagtgtgttttcctgattgatgtatgggatagtcatgaatgtggtattgtatttcctacctgaggaaaaggtcatgattaaaataaagcatcaaagccaggataagcatataatttctttctttttttttttttttgtaatgagacagagtctcactctgtagcccaggctggagtgcagtggtgtgatctcaaatcactgcaacctccgccttccgggtcctggttcaagcaattctcctgcctcagcctcctgagtaactgggattacaagtacgccccaccatgcccagctaatttttgaatttttagtagagacggggtttcaccatgttggccaggctggtcttgaacttctgacctcgtgatccacccaccttggccacccaaagtgttgggattacaggcgtgagccacggtgcccacccgagcatacgattgttttaaaaaagactagaataaaagccaagctaaagattataaggtatctttgtcagaaatggttgtgagagtgcttcctaccctgtttttgatgctttattgtttataaccatagaattaaacccatgataaagtaaagtataagagaaagataactgacagattttaaagtcatcaaacttttttcttgctctgtcacacaggctggagcacaatggcttgatcacagctcactgcagccttgacttcccaggctcaatcttcccacctcagcctcctgagtagctgggaccataagtgcgtgtcccaccacacctggctcattattaatttttctttgttgcccaggctggtcttgaactcctgggattacagacatgagccaccacacctggtccaaactttttgcttacaacttttaatagaaataggtaaaagaaataggaaggatctaattgagttataaaacaacctttaaagatacaaaagtgaaaaagattaagccattgctttttgtcaatagaattaaaagctgttggtaaaaatattaatgtatgaaaaacttattgaaatgaaaaaactatatatatatatatatatatatatatatatatatatatatatatataaataaaatgtcgacatggctggatcttaaaaactgtcaaatgaaaaaaactaattgcaggaaagattttttttttttttttgagagggagtctcacgcagtcaacccaggttggagtgcactggggcaatcttcctgattcttggggaatcttggctcactgcaacctccgctcctggattcaagcgattctcctgcctcagcctcccgagtagctgggactataggcgcacgccaccattcccggctagtttttgtatttttagtagagatggggtttcgccatattggtcaggatggtcttgaactcctgaccttgtgatctgctcacctcggcctcccatagtgccaggattacaggcgtaagccaccgtgcccagcctaaaagatttttaagtatactattaacataaaatttggtagccgtacaaccctattcatgaaatttacacacatgccgtgaaaatgtggacaggaaaagacacactaagttcatgatgaaagccattactttttaaagaaggaacaaaggtgtaatcccagcactttggggaggctgaggcaggcgggtcacgaggtcaggagttcaagaccagcctggccaatacagtgaaaccctgtctctactgaaaatacaaaaattagccaggcgtggtggcaggtgcctgtagtcccagctacttgggaggctgaggcaggagaattgcttgaacccgggaggtgaaggttgcagtgagtcgagatcctgccattgcactccagcctgggtgacagagcaagactccaactttaaaaaaaaaaaagagagaaaaaaggaataaaggaaggaaatggcactagggaaaggcacaaagatgacttccataaactttagttattttatgctaaaagaaaatctgatacaagcacaagatgatgactacgtagattagtatttctgggttgcatgttaaaaatatgaaaataaaaacggaaatagtttccaaaacaaagattttatatatgaaattagtgaaatttcagaatggagaaaggatggttacaataaatgttaggagccctctttaaagagctcaaatggtatgtaagtatttgggatttgtggtttaattagacctagttttcagcagtctttccatgaaatgtatttttgtatttagagagatcttggtaactcttgtaaagcagagtgtcctgctacattacataacttacctaagtaggtgtgcttttttttgtttttctagagacagggtctctgctctttcacccaggctgaagtgtagtggcaccatcatagctcggtgcaaccttgatttccagggctcaagtgatcctcccatctcggtctcctgagtagttaggactataggtgcaagccaccatgtgcagctttcttttttttttttttttggagagtcatggcctcgttacattgcctgtcacctagactggccagctggtcttgaacccctggcctcaagtggtcctcctgcctcagtctcccaaagtattgggattacaggcatgaaacactgctactggcctagataagaatttttatattgtttttggttgatttaagtgctgagaacttatttgcttcagaatagatctttggttgaaatgcagttcagttttgagactaaaaaataaaccagatttactcccaaaaatgttactgtttcaaataagtaaaatatttgcacctttaaagattaggagttggctgggcatggtggctcactcctataatctcagcactttgggaggccaaggcaggcagatcacctgaggtcaggagttcaagaccagcctggccaacatggtgaaaccccatctctactaaaaatacaaaaattagctggctgtggtggcacctgcctataatcccagctactcaggaggctgaggcgggagaatcgcttgaacccaggaggcagaggttgcagggtgctgagatcgcaccactgcagtccagcctgggtgatagagccaagactctgtctcaaaaaaaaaaaaaaaaaattgggagtcatatttatataattttatttctatttctgtaaggtctaatttttgagtatttctgaacatcaataatagaatctctgtccaattagaatttgtgccttgctcagtagttttcattttaatgaatgattcaaaagaatacattagcttaagttttgttttttttaataatattttagcaaagaatggctcaagaagtactgacacatttaaaggagcatcctgatgcttggacaagagtcgacacaattttggaattttctcagaatatgaatacgaaagtaagcaagtggtggttttaaaatctgttatttcttttcttccagtcataaactttgaggaaggtatctcatttttagtattagcatttgttatctcaaattattttatattgttaatttgtttcaaaatttagtcttaagcatataattaattcttgcaaatagtcctaagaattatgaatgaagttttgtaatgggactagtatgcaaggtggcttttttggttgtctgattttgtttttttctttttagtatatgtatacaggtctaagtagcataaattctgaatgttattcagagattaaacataacattaaggaattattttgggcaagtaatcaatataatacagg

SEQ ID NO: 14971 - DNA, 720 bp, Homo sapiens
ccgtttttttaatttccttttttgaggtgggaaaactgaaacccaccttgattcgtcccctctcccccctccccaccttccctcgccctaatcccccaacgaggaaggaaggagcagttggttcaatctctggtaatctatgccagcaattatgacaatgttagcagaccatgcagctcgtcagctgcttgatttcagccaaaaactggatatcaacttattagataatgtggtgaattgcttataccatggagaaggagcccagcaaagaatggctcaagaagtactgacacatttaaaggagcatcctgatgcttggacaagagtcgacacaattttggaattttctcagaatatgaatacgaaagtaagcaagtggtggttttaaaatctgttatttcttttcttccagtcataaactttgaggaaggtatctcatttttagtattagcatttgttatctcaaattattttatattgttaatttgtttcaaaatttagtcttaagcatataattaattcttgcaaatagtcctaagaattatgaatgaagttttgtaatgggactagtatgcaaggtggcttttttggttgtctgattttgtttttttctttttagtatatgtatacaggtctaagtagcataaattctgaatgttattcagagattaaacataacattaaggaattattttgggcaagtaatcaatataatacagg

SEQ ID NO: 14972 - DNA, 2892 bp, Homo sapiens
gttaatttttgtatttttagtagagacagggtttcaccatgttggtcatgctggtctcgaattcctggcctcaggtgatccacccacctcagcctcccaaagaattgctgggattacaagcgtgagccaccgcaccgggccggaatttttttaaaatgccaatactggtgacaggattagagtatattaactgattttacttagtctttccattcccacattaattagttctcaaaatttatttgcatgctacaaaagagctcaacaatttttttattacgtgcaatttttttaataggaataaaaaaatacgttgttggcctcattatcaagacgtcatctgacccaacttgtgtagaggtaagagtttattttggagcttattgggagagcataaaatcatttagatattgagtctgactacaacctaattctgtcaagacacatagtcacacatatgcacagtcagtcatttacagtagagctgtaatcatttgttaggattgtctggttatattcttatttatacttacctcaggctctcatttaatcttttacttttccttagaaagaaaaggtgtatatcggaaaattaaatatgatccttgttcaggtaagctttaacttaactgttttccttagaagaattatgcttattatttgaacaaaatgttcgacctacttaggaaataaagtatactaatattttgcagaagtagtgatagtattcttataataataggtaacctactgtctagtacttgaatgttaatttgctgtggcagtaatcatcaaataacgttaaagccatcatttatgtggctgcagtgtggactggactctgttggattcttatttatcttttcttttcttttttttttttttttggagacagtctccctctgttgcccaggctggagtgcagtggcatgatctcggctcactgcagcctctgctacccgggttcaagcgattgttctgcctcagcctcctgagtggctggaattacgggtgcttaccaccacgtttggctaattttttgtatttttagtagagacagggtttcaccatgttggccaggctggtctcaaactcttgacctcaggtgatccacccacctcgacctcccaaagtgctgggattataggtgtgagccgctgcacctggccggattgttttttaattttctgatatgcctgtgcatatttcctttgcatgtatgtctctgagtcctttgatttcctcgtccttctaattgatttccatgcttagtccttaaactgtctatgtagactaaatttataatttttatgtttatctgttttctatagtaatatcataaaattttttccagagaaccctggtatgtgtgggggaaaaaacagtaatttctatttaaataagacttagaaacatccaagcttccaaaaattttagtgtattcagtaattaactccagcttttattatactttagagctttctgttagcccttctctgagtggtgagagagaggagagaatataaagaaggttaacatgtatttttataatctgaaaaatcccttgtgtgtgccataaatagtccagacttgcatacaaatataatgcagttcatgaggcttttggttaaaagtttattcaggccccgattgcagtgcgtcctctcttttaaattcatatatccaaaccctactacatttcaaggctcaaattgcatccaataataagctgtcttaaccggtcactttttatcaccaatggttaattaaatccttgagtctcctaggataatttcttcttttcttgtttgaaatggagtgtcgctctgtcgcccatgctggagtgcagtggcaccgtcttagttcactgaaacctccacctcccaggttcaagcaattctcctgccttggcctccccagtagctgagactactggcccgcgccaccacccctggctaatttttgtatttttagtagagacggggtttcaccatgttggccaggctgctcttttttttttttttttttttgagatggagtctcatcctgttgcccagccttgagtgcagtggcctggtctcggctcactgcaacctctgcctcccaggttcaagagattctcctgcctcagcctcccgagcagctgggatcacaggcacacgtcaccatgcctcgctaatttttgtatttttagtagagacagggtttcaccatgttggccaggctggtcttgaactcctgacctcgtgatcctcctacctcggcctcccaaagtgctgggattacaggcacgagctaccacgcccagcctggccaggctgttctcagactcctggcctcaagtgatctgcccaccctggctccccacaaagtgctgggattacaggcatgagcaaccgcgcaaggcctcctagaataatttctacatatctatcaggcagatactaatacacagacagacccattagacggattggacctttcattaggataattgaaaagggtcctgcggtgattaagataaaagactttgtgttttgttttctacccagtagggtgaagagggtggcacatttcttcctttaataaaggaggagaaaatgaaaagtgatttatccttactcctgcctttatccattacataatttctttgaagtttgttttatttgcctttgagaaatgaagtgcgattaacatttcatgtcttgttttagatactgaaacaagaatggcccaaacattggccaacttttatcagtgatattgttggagcaagtaggaccagcgaaagtctctgtcaaaataatatggtgattcttaaactcttgagtgaagaagtatttgatttctctagtggacagataacccaagtcaaatctaagcatttaaaag

SEQ ID NO: 14973 - DNA, 583 bp, Homo sapiens
gttaatttttgtatttttagtagagacagggtttcaccatgttggtcatgctggtctcgaattcctggcctcaggtgatccacccacctcagcctcccaaagaattgctgggattacaagcgtgagccaccgcaccgggccggaatttttttaaaatgccaatactggtgacaggattagagtatattaactgattttacttagtctttccattcccacattaattagttctcaaaatttatttgcatgctacaaaagagctcaacaatttttttattacgtgcaatttttttaataggaataaaaaaatacgttgttggcctcattatcaagacgtcatctgacccaacttgtgtagagaaagaaaaggtgtatatcggaaaattaaatatgatccttgttcagatactgaaacaagaatggcccaaacattggccaacttttatcagtgatattgttggagcaagtaggaccagcgaaagtctctgtcaaaataatatggtgattcttaaactcttgagtgaagaagtatttgatttctctagtggacagataacccaagtcaaatctaagcatttaaaag

SEQ ID NO: 14974 - DNA, 3334 bp, Homo sapiens
ctgaaaattttgttccccctctgttggatgcagttctcattgattatcagagaaatgtcccagctgctagagaaccagaagtgcttagtactatggccataattgtcaacaagttagggggacatataacagctgaaatacctcaaatatttgatgctgtttttgaatgcacattgaatatgataaataaggtgtgtaatatttcagttatgtaagggggaaattctgcaggatagccttaattcttgaaagctaaagtatgtctgtggatataacataattttaatgccatggagtttaaatatttaaacttgtatattagggaaatactttcttggttttcaagaacttacttcccaggagtttgaaaccaacctgggcaatatagtgagacttcatctctacaaaaagttcaaaaagtaaccagtcatggtggcatgtgccggtagtcccaactactcgaaaggctgaagtgggggggggggtcacttgagcctgggagttcaagatggcagtgagctgagattgcgccactgcactccaagaagaagaatttactacacagaatcttgattggtaaaaagtaaatatggaaaacagattttagcattcacatggtatgtagcatttattgaaacctcataggtcggggcatccttttatgaacgtagttgtattaattggtttgaataaatgagaaagtaagtctgcatgtttcaattataaaagtgtagtatatgcttataagaaactgaaaaatgtgttaacaagagaaaataggctggccatggtggcttacacctgtaatcccagcacttcagaaggccaaggcgggcggatgacctgaggtcgggagttcaagaccagcctgcctaacgtggcaaaaccccatctctattaaaaatacaaaaatggccaggcgtggtggctcaacacctgtaatcccaacactttgagaggccgaggccggtggatcacctgaggtcaggatttcaagaccagcctgaccaacatggtgaaaccccatctctactcaaagattaggctgggtgccgtggctcacgcttgtaatcccagcactttgggaggccgaggtgggcagatcacgaggtcaggagatggagaccatggtgaaaccctgtctctactaaaaatacaaaaaattatccgggtgtggtggtgggcgcctgtagtcccagctactcggagaggctgaggcaggagaatggcatgaacccgggaggcggagcttgcagtgagccaagatcgcgccacgcactccagcctgggtgacagagcaagactctgtctaaagaaaaaaaattagctgggcatggtgccgcatgcctgtagtcccagctactcgggaggctgaggcaggagaatctcttgaacccaggaggcggaggttgcagtcagctgagattgcgccactgcactacagcctgggtgacagagtgagactgtttaaaaagaaaaaagagataaaagatacgttaagtggacacatttacacggtaacttaaatttttttgtaatctgtagtggtgatttcaaattaaaaacaaaagtgatagtagtagtcttatggtaataatggtttagatgagttctctattaaaaaggttgtctttctccttcaatttgataactcatgtgcgtaacgggacagtttcattttccgtgagaggtggattgtattttacttgggtttacctttcaggaggcattctatcttctgtggtttattgaaaactccaaatatttatactggattaagccttgcttttcccctcctgtctagcacaacaaagacactgaaacattattttgtttccaccacttatttttaggactttgaagaatatcctgaacatagaacgaactttttcttactacttcaggctgtcaattctcattgtttcccagcattccttgctattccacctacacagtttaaacttgttttggattccatcatttgggctttcaaacatactatgaggaatgtcgcagatacgggtaaataaaagatgttcttttattcatttgcctgccaatccaaaaatacaaatatagttaattgtacataggaaggtattacttgttcagagttttgagtgtgtgaattacatatatgaacatctgagaaaatcctataagcagtttaatcaactgttccactccactccaagtgagtccataggcagaattgagttatggggagagcggcctagtaataattggtttgcgtaatacaaagttctactgggtagtgatgttgtagaagttcatatagaatcagctgagctttcagaaatggtgaaagggtggtaatagtcataacttagattgtaatttttttcccataggcttttaaaaaatattcatgaggttctttttttatttcaatagtttttggggaacaggtggtttttggttacatgaataagttcttcagtggtgatttctgagattttggtgcacctgtcatgtgagcagtatgaactctactttatgtgtagtcttatccctcatgtgtatgaactccaccttatgtgtagtcttatccctcacccactcctgcccttccccacaagtccccaaagtccattatatgatctttatgcctttacatcttcacagtttagctctcacacaacttattataatttataagtaagccagcattggatatagttgtattccattattaatttaagaaaccttatgcaagtaattattagtcatcatcccaaaaaaaagggagaacagggttagattcagaatactttgataagagctaaatactatcatgagtgctgtcagtctgtagtaactttccattggtattctatgtcttttaggcttacagatactttttacactcttacaaaatgttgcacaagaagaagctgcagctcagagtttttatcaaacttatttttgtgatattctccagcatatcttttctgttgtgacagacacttcacatactgctggtaagaatttaatacgatttaaatgttaagtgccagctgggcacagggcctcacgcctataatcccagcactttgggaggtcgaggcggggagattatgaggtcaggagttcgagaacagcctggccaccatggtgaaactgtctgtactaaaaataccataaaaaaataaaagatacaataaaaatactgggcatggtggcatgtgattgcaatcccacctattcgggaggctgaggcaggagaatggcttggaccgaggaggcagaggttgcagtgaactaagattgcgccacggcattccagcttgggtgacagagcgagactccgtct

SEQ ID NO: 14975 - DNA, 827 bp, Homo sapiens
ctgaaaattttgttccccctctgttggatgcagttctcattgattatcagagaaatgtcccagctgctagagaaccagaagtgcttagtactatggccataattgtcaacaagttagggggacatataacagctgaaatacctcaaatatttgatgctgtttttgaatgcacattgaatatgataaataaggactttgaagaatatcctgaacatagaacgaactttttcttactacttcaggctgtcaattctcattgtttcccagcattccttgctattccacctacacagtttaaacttgttttggattccatcatttgggctttcaaacatactatgaggaatgtcgcagatacgggcttacagatactttttacactcttacaaaatgttgcacaagaagaagctgcagctcagagtttttatcaaacttatttttgtgatattctccagcatatcttttctgttgtgacagacacttcacatactgctggtaagaatttaatacgatttaaatgttaagtgccagctgggcacagggcctcacgcctataatcccagcactttgggaggtcgaggcggggagattatgaggtcaggagttcgagaacagcctggccaccatggtgaaactgtctgtactaaaaataccataaaaaaataaaagatacaataaaaatactgggcatggtggcatgtgattgcaatcccacctattcgggaggctgaggcaggagaatggcttggaccgaggaggcagaggttgcagtgaactaagattgcgccacggcattccagcttgggtgacagagcgagactccgtct

SEQ ID NO: 14976 - DNA, 3080 bp, Homo sapiens
ggaagaatttatttagatatgcttaatgtatacaagtgcctcagtgaaaatatttctgcagctatccaagctaatggtaggtgattctgatttcttacacaatgcagtataaacaaaccacttctcttctactgccttaagtcaaacatttgatgttttttacagatttaaatcagacctcccatttcccaaatgaccctagacatatttaaaacagttaagtgtacctttcccttttaaaattagtcttaaagcttattttcccaataaattttgtgaacttttggctttaaactttttaatggtaaaatggaattgcatctaatgtacacctgagtaccactgtataagtttagtggtaaaattagattccatttgattctgttttgtaggtgaaatggttacaaagcaaccattgattagaagtatgcgaactgtaaaaagggaaactttaaagttaatatctggttgggtgagccgatccaatgatccacagatggtaagtgagagatgctttgcttttgatttctagtgttgatgctgtgttttatggaatatgctatactctattatgtgcattttgctaatttaaagcatatcaactttgtggttattttatggcattttatttattgtagtccttacgttaatatactaatagctgtattccatcttcaaaagaaactgctgttaatcagtagcgaagggtggtgatatgtaacaagatagctaagaaaattgggtcattttatgtttccatagataggttaggaggatttaattaatggagtaccggtgcagtttttgcattcctcttgatttttagaacaattgctagagctacaaagttgtcattactttacctctttagcaaagtgattgcttcccagattaaaggcctgaaagtcttttttacaccctttttcctaaatgatttgcagaaaaggaaatcattttcagtaataaaaaccagctgcgtatgcctcaacttgtaaaattgtgaattagttttaggttttaactgtatcgtttcattcttgttattcaattgagccttgggagagtccaaaaaattctaatactactattacttggaatagtgttggttttttgttttttggtttttttttttacaagtgtgctagttattttcatagttttgaaatttcagtattgtttcttgttaaggaaatacttttcagtaaacttgttctgaatataattcttgtggaatacttaagttggctaacctaaatatcgaaaggttctgaacatgcgtattatgtgaacagaactgtatttaaaatttgaaagcagaaagtaagatgtattgaaggaattgtgatgtttgtaatttacaagaagcttgagcacgtgtcgggagcacagtgggaataatacaaagggtatcatcttttgtaacattaatgttaaagtttgggatatttgttcacatgaaacattgtgtttattttccttgtcttggcttttcacggtggctcatgcctgtaatcccagcactttgggaggccgaggcgggtggatcacttgaagtcaggaggctgaggcaggagaatcacttgaaccccagaggtggaggtgacagtgagccaagattgcgccattgcaccccagtctgggccacaagtgggaaacttcgtctcaaaaaaaaaaaaagaacaagaagttactctttaagtataactcagtttacttagaatcatgaaaatcttactgggcattgtagcatgcacctgtaatcccaaccaccagggagggtaaggcaggcgaatcaccccagctcaagtccagtttaggcaacatggcaagattcagtttcaaaaaaataatagaaatccatagtctttcttattttctgagagtaattgattgatgttatttctgcttgtgaaaatactcaccagttagcattcattagattaaaacattagtctgagttgggtggatcacgaggtcaggaaatcaagaccatcctggctaacacggtgaaacaccccgtctctactaaaaatataaaaaattagctgggcgtggtggcaggtgcctgtactcccagctactcgataggctgaggcaggagaatggcgtgaacctggaggcggagcttgcagtgagccaagatggcaccactgcactccagcctgggcgacagagcaagactccgtctcaaaaataaaaagacagtattgagggctcgcttgctgccatcttacatatacagtatacgtagaatcctgattctgccacctaagttggagacacccactgaattttgagcctcacttttcttattgtgagagttttgtagctgggcatggtgctatacctatagtcccagctactcaggagactgaggcacaagaattgcttgaacctgggaggtggaggttgcagtgagcagagatttgccactgcactctggtctgagtgacagtgagactgtctcaaaaaaaaaaagtcttgaatgacagtgtgtccatgagacttcccaacccattgtgatttcctgctttcttttgctaaaaactgttttgacgtaggaaaccctaatacaaacacaagattttcctgttttcagtagatgatcatgctacatctcatagacaggaataaccttgttgtttaaaatagtcaccatgtacctaaattaaaacataacttttttttccctccccaacaggtcgctgaaaattttgttccccctctgttggatgcagttctcattgattatcagagaaatgtcccagctgctagagaaccagaagtgcttagtactatggccataattgtcaacaagttagggggacatataacagctgaaatacctcaaatatttgatgctgtttttgaatgcacattgaatatgataaataaggtgtgtaatatttcagttatgtaagggggaaattctgcaggatagccttaattcttgaaagctaaagtatgtctgtggatataacataattttaatgccatggagtttaaatatttaaacttgtatattagggaaatactttcttggttttcaagaacttacttcccaggagtttgaaaccaac

SEQ ID NO: 14977 - DNA, 562 bp, Homo sapiens
ggaagaatttatttagatatgcttaatgtatacaagtgcctcagtgaaaatatttctgcagctatccaagctaatggtgaaatggttacaaagcaaccattgattagaagtatgcgaactgtaaaaagggaaactttaaagttaatatctggttgggtgagccgatccaatgatccacagatggtcgctgaaaattttgttccccctctgttggatgcagttctcattgattatcagagaaatgtcccagctgctagagaaccagaagtgcttagtactatggccataattgtcaacaagttagggggacatataacagctgaaatacctcaaatatttgatgctgtttttgaatgcacattgaatatgataaataaggtgtgtaatatttcagttatgtaagggggaaattctgcaggatagccttaattcttgaaagctaaagtatgtctgtggatataacataattttaatgccatggagtttaaatatttaaacttgtatattagggaaatactttcttggttttcaagaacttacttcccaggagtttgaaaccaac

SEQ ID NO: 14978 - DNA, 7818 bp, Homo sapiens
tgtaggaagtttttgataataccaaaacttgataggcagcttcaattttttttctttattttcagtaatctatgccagcaattatgacaatgttagcagaccatgcagctcgtcagctgcttgatttcagccaaaaactggatatcaacttattagataatgtggtgaattgcttataccatggagaaggagcccaggtaaagtagccaaccaaaactttataacattatgacagtgtaacagagttgttgggtttagaataaaattttaaattatcacctttaaaaaagatattccatagtttgcattaatttggaattctgtattaaccataatgaaaattggtttggagaaagaaattgcatgtttgacatggttagagtgggttgttttggaatattatacttgttttgtccttaagagccaaatgttattaaatactttgtaggtattaaaggttctctgtacttttatatatacttaatatgtttggcactaatacgattcttctacttttaaaacatttacagaagtacttcacagatatgtttgtttaaataaaaacaggaataccaagtatttttatgttagttgaattttgtgcacttttcaaagtggtactgttaatgtagggaattatcttaaacataaaccaaattttgatcagtttaagatttttggtttttttgaacccaactaaaaggtgaaacagaaatgtgtgtacaattttaaattgtatatgtcacaagaaaaaaaacttgattttttacctgtggggccaaacttttttttgagacagtctcgctctgtggtccaggcaggagtgcagtggcgctatctcagctcactgcaacccctgcctcctgggttcaagcgattgtcttgcctcagcctccctggtagctgggattacaggcacacgccaccatgcctggctaatttttgtatttttagtagagatggggtttcaccgtgttggccaggctggtcttggaactcctgacctcaggtgatccacctgactcggcctcccaaagtgctgggattacaggcatgagccaccgcgtgctggcccaaacatgtttttgaatgagtaaaaagttttgcagttgggtcagaaatcttttttttttttcagatggagtcttgctctgtcaccaggcctgagtgcagtggcacagtctcggctcactgcaacctctgcctcccaggttttcaagcaattcacctgccttagcctcccgagtagctgggactacagacgcgccaccatgcccagctaattttttgtattttagtagagatgggtttcatcatattggccaggatggtctccatctcctgacctcgtgatccgcctgccttggcctcccaaagtgtggagatgacaggcatgagccaccgcgcctggccagaaatcttttatggtagttttgttgccagaacagtagatttctggttagataaatgttcagctagtagatgggaggttacttatattgtcaagatatttatatttgcataattaagaaactgagtgccggccgggcgcggtggctcacgcctgtaatcccagcactttgagaggccgacgccggcggatgacgaggtcaggagatcgagaccatcctggctaacacggtgaaaccccgtctctactaaaaacacaaaaaattagccaggcgtggtggcgggcgcctgtagtcccagctactcgggaggctgaggcaggagaatggcgtgaacccgggaggcggagcttgcagtgagccgaggttgcgccactgcactccagcctgggcaacggcatgagacttcgtctcaaaaataaaaataaataaataaaataaaataaaaaaacctaaacctgagtgccattacactttctgaaaatatataaggtggatacagtactatcttttatagtagtccaaaaagcatcatgtataaatgtttccattcccttatgaaatgcaacagtactgcttttactatagtagaaacttgaaaaaggtccatggaaacgctaaaagtagaaaaaattactcttgcagtgattctgtaagcttgttagcccaggtttatacttttagggcgttttgatcagtatattatctcctaaagcattcttgaaaaaattaaccatccgtatttattatccctgtcatttagttgttactcatgctatacattcaacatgaagctttaagcttcatttcttctagcatggatgcatagaaagcagctgcttttggaggaagctatgaaagtaaggttgggttcaactctgaatgtaatattggaagcacaggtctgtagccattgggaaaaagggcatttaattttttccgcatagattcagctactaatactgtttaatcttcacactaaactagttcactacatctaaaggtatgataaataaaccaacatagagcagtgttcttcatggcttgtaacagaattagtggcaatttttgtaattgagaatatattacagcaatactgcttttaataatgtttcatagtattaagaaatttaatggtttgttttaaaattgacttgttaataaaaagtagattaagaaaagtgtttctaaatttttttgtttgtaaggacaataggttaactttcccaaagtaaaaggattttgtctgcagtagttaatagatcatgtgacaaaatcagttgcgtagaaataactagcaaacttattttgtattataaatgaagaaacaagatttagagcttaaagctggttaaggagtccttttggtctctaaaagtcctatgtcgttagttcagtctacttttcgtttaccacctccttgggggtcttatttcaaaggaaaaggagtagtagtagcagcgagctgctatagtggaaaacatgatttttagtgttagacgtcttaatttgattcttggaagctctctctagtcattgcttaagtcccatgtacaaatatgacctgtcctacaagagattggagggttagttatgaggtttaaaagcacctattacagtgcttgataggtagaaggcactcagcttaaagggtacatttagcagtataatgaaaatgatttagcatatgtgatactcattgcttaaaattaaaaaaattttttttttgctactcataaaatatgcactaatgacaagaaaaatttattatgctaattaagcttttaaagtcaactgggaaaaaaagctgtaggtaggtttttttttttttaaaggaatgtgtaacttgggggaggggaagaaattatttacaagggtgacttttaatctgtagacagaacttctgcatacatggttagtatagtaggatatttagcagtgtaacattaggactaccctctaccctctgttatcagcatttttctatttttagccaagtagacagctagaaaaaagatgcgggaagagttggatgttttctccaatattgtgttctgttaaagatcttgaactctattgcttagcaactaaaatgctttcaccattcagttagtagtacaagggagatgctaggttttctctctttagtttgcttttgtgtcttttttttttaaacccctgctggggttttaagtttataaagaacattatgtaagaatggtgggattagaataaatcagaatgcaaatactagaagtagcatcagagagtaaaattacaactaacaggaaagaatattatttatgtagcgattgatgtgagtggtgatagtgtgggaagtatttgattctgtgtagaatgcttatcacttcaaagcatctgacaaaatggtaacttgaccaagtaacttttactgtgtgaggatctttgatacaacttttcctctagttagataaggttatctagctagatattctcagggagaagaccaaaacactgctaaaatgtgctttggccctagataagccacatcattattctttcggccttctgtcatttctcatatgacacattatgcccatcagtcctttaatgaaatcaaatagaaatgtgtatgattgtattttaaagtatacacattaactcttgtaaccacagactcacaatggaagcaggcgtctgatcttttcaggcaaccacagtggttctggtgggtttctgggtagagaacaaccatataagttattgagtgtgtagcagtgtgttttcctgattgatgtatgggatagtcatgaatgtggtattgtatttcctacctgaggaaaaggtcatgattaaaataaagcatcaaagccaggataagcatataatttctttctttttttttttttttgtaatgagacagagtctcactctgtagcccaggctggagtgcagtggtgtgatctcaaatcactgcaacctccgccttccgggtcctggttcaagcaattctcctgcctcagcctcctgagtaactgggattacaagtacgccccaccatgcccagctaatttttgaatttttagtagagacggggtttcaccatgttggccaggctggtcttgaacttctgacctcgtgatccacccaccttggccacccaaagtgttgggattacaggcgtgagccacggtgcccacccgagcatacgattgttttaaaaaagactagaataaaagccaagctaaagattataaggtatctttgtcagaaatggttgtgagagtgcttcctaccctgtttttgatgctttattgtttataaccatagaattaaacccatgataaagtaaagtataagagaaagataactgacagattttaaagtcatcaaacttttttcttgctctgtcacacaggctggagcacaatggcttgatcacagctcactgcagccttgacttcccaggctcaatcttcccacctcagcctcctgagtagctgggaccataagtgcgtgtcccaccacacctggctcattattaatttttctttgttgcccaggctggtcttgaactcctgggattacagacatgagccaccacacctggtccaaactttttgcttacaacttttaatagaaataggtaaaagaaataggaaggatctaattgagttataaaacaacctttaaagatacaaaagtgaaaaagattaagccattgctttttgtcaatagaattaaaagctgttggtaaaaatattaatgtatgaaaaacttattgaaatgaaaaaactatatatatatatatatatatatatatatatatatatatatatatataaataaaatgtcgacatggctggatcttaaaaactgtcaaatgaaaaaaactaattgcaggaaagattttttttttttttttgagagggagtctcacgcagtcaacccaggttggagtgcactggggcaatcttcctgattcttggggaatcttggctcactgcaacctccgctcctggattcaagcgattctcctgcctcagcctcccgagtagctgggactataggcgcacgccaccattcccggctagtttttgtatttttagtagagatggggtttcgccatattggtcaggatggtcttgaactcctgaccttgtgatctgctcacctcggcctcccatagtgccaggattacaggcgtaagccaccgtgcccagcctaaaagatttttaagtatactattaacataaaatttggtagccgtacaaccctattcatgaaatttacacacatgccgtgaaaatgtggacaggaaaagacacactaagttcatgatgaaagccattactttttaaagaaggaacaaaggtgtaatcccagcactttggggaggctgaggcaggcgggtcacgaggtcaggagttcaagaccagcctggccaatacagtgaaaccctgtctctactgaaaatacaaaaattagccaggcgtggtggcaggtgcctgtagtcccagctacttgggaggctgaggcaggagaattgcttgaacccgggaggtgaaggttgcagtgagtcgagatcctgccattgcactccagcctgggtgacagagcaagactccaactttaaaaaaaaaaaagagagaaaaaaggaataaaggaaggaaatggcactagggaaaggcacaaagatgacttccataaactttagttattttatgctaaaagaaaatctgatacaagcacaagatgatgactacgtagattagtatttctgggttgcatgttaaaaatatgaaaataaaaacggaaatagtttccaaaacaaagattttatatatgaaattagtgaaatttcagaatggagaaaggatggttacaataaatgttaggagccctctttaaagagctcaaatggtatgtaagtatttgggatttgtggtttaattagacctagttttcagcagtctttccatgaaatgtatttttgtatttagagagatcttggtaactcttgtaaagcagagtgtcctgctacattacataacttacctaagtaggtgtgcttttttttgtttttctagagacagggtctctgctctttcacccaggctgaagtgtagtggcaccatcatagctcggtgcaaccttgatttccagggctcaagtgatcctcccatctcggtctcctgagtagttaggactataggtgcaagccaccatgtgcagctttcttttttttttttttttggagagtcatggcctcgttacattgcctgtcacctagactggccagctggtcttgaacccctggcctcaagtggtcctcctgcctcagtctcccaaagtattgggattacaggcatgaaacactgctactggcctagataagaatttttatattgtttttggttgatttaagtgctgagaacttatttgcttcagaatagatctttggttgaaatgcagttcagttttgagactaaaaaataaaccagatttactcccaaaaatgttactgtttcaaataagtaaaatatttgcacctttaaagattaggagttggctgggcatggtggctcactcctataatctcagcactttgggaggccaaggcaggcagatcacctgaggtcaggagttcaagaccagcctggccaacatggtgaaaccccatctctactaaaaatacaaaaattagctggctgtggtggcacctgcctataatcccagctactcaggaggctgaggcgggagaatcgcttgaacccaggaggcagaggttgcagggtgctgagatcgcaccactgcagtccagcctgggtgatagagccaagactctgtctcaaaaaaaaaaaaaaaaaattgggagtcatatttatataattttatttctatttctgtaaggtctaatttttgagtatttctgaacatcaataatagaatctctgtccaattagaatttgtgccttgctcagtagttttcattttaatgaatgattcaaaagaatacattagcttaagttttgttttttttaataatattttagcaaagaatggctcaagaagtactgacacatttaaaggagcatcctgatgcttggacaagagtcgacacaattttggaattttctcagaatatgaatacgaaagtaagcaagtggtggttttaaaatctgttatttcttttcttccagtcataaactttgaggaaggtatctcatttttagtattagcatttgttatctcaaattattttatattgttaatttgtttcaaaatttagtcttaagcatataattaattcttgcaaatagtcctaagaattatgaatgaagttttgtaatgggactagtatgcaaggtggcttttttggttgtctgattttgtttttttctttttagtatatgtatacaggtct

SEQ ID NO: 14979 - DNA, 568 bp, Homo sapiens
tgtaggaagtttttgataataccaaaacttgataggcagcttcaattttttttctttattttcagtaatctatgccagcaattatgacaatgttagcagaccatgcagctcgtcagctgcttgatttcagccaaaaactggatatcaacttattagataatgtggtgaattgcttataccatggagaaggagcccagcaaagaatggctcaagaagtactgacacatttaaaggagcatcctgatgcttggacaagagtcgacacaattttggaattttctcagaatatgaatacgaaagtaagcaagtggtggttttaaaatctgttatttcttttcttccagtcataaactttgaggaaggtatctcatttttagtattagcatttgttatctcaaattattttatattgttaatttgtttcaaaatttagtcttaagcatataattaattcttgcaaatagtcctaagaattatgaatgaagttttgtaatgggactagtatgcaaggtggcttttttggttgtctgattttgtttttttctttttagtatatgtatacaggtct

SEQ ID NO: 14980 - DNA, 29555 bp, Homo sapiens
cctcgatcccctcgccgcggtcccatggaggaggaggcgagccgcagcgccgcggcgacgaacccagggaggtaggttgtcatgggactcggccggccaccctggcaattccagtcaaacggcaagccagactcgctttgccggtcccttcctctcctgcccctgcagccgccaggaatggaacagtcccgcggtggggactgtgggaggcgcacgcgcgaggagtgtagggtgggggtgctggcggcggctgctttggcggcggttggtggccgtgcgggcggggagggagggggaggagagaagaggaggtggagaaggcttgggctcgcgccgctgaaggtacgcgtgagggcctgcgctggagccggcttgacagggtctgagggggagtggagaactgggcgaggaggttcccgtgggtgagcgcgtacgggatggctggctcgcaggacggccgaaggtggtggttggtgggagcagccagcgacgagcccgtagacactcgtacgcgtgcgggctgacgtgcgcgctacatggccggagtcgggcgaagcgggggaccgtggggaagaacgcgaggagggaggagtgggaggttgggggtgtcgctaggcgcccttagctccctccctctggaggagctgccgcggccactctgctgccgccgctgccgccgccattttgggttcgctttgcgaggggaaacgatcccagtgtcggttgcgggatccgcctcctctcagtttgcccctttagccctccacctttcccttctcctctctcgcatttccgccagtcggcttacccgctggccgcctcctgacaagcgggagggatccgcggtggacccagggaagcggaggagcctggcggccaccccctcttcctcacttccctgtactctcatcgctctcggcctccgacacggtgagtagaacgatttgggccggcattcgggcctaagcactctctcagcgattgaatcctgggctttctgggagccactgtcatctcccggacctggacctctgggagagcagtggtgaagatgggggaggggagagcagggagggggatcctgagcctaccgggaagtccctccaggcggggtgaaggggtgtccctgacaggcagactcccggagggggctgggaagtaagcgagtggaggcggagtcggctgtgcccctgacaggttagtttgtgtttgtaggcatgatcggagcctcccccatagtccagtttgtgtgtgtttaattaagggataagagtggtcgaggacacgatcttgagaggggattttacctgtgtgacaaggtctgtggtgtccctgccgcgttgaacggtatgtgggaacgacaggatgatctcagtgttgtacgtttaataaatgtcactggttagtttgtacatggaaagagatgtttttggtctagcagacagatggtctgttggtgtgtagcggctgtgttggtgtgtgtatgtgaggatggcaagtgtttccgtaagagtttgcctttatttgtgtaagtgtaatggagttccccttataagttagcttatttcttgaataaatgttgggaggttccttgcaggttgatatgtgtgtgtattttagggattgggagcccctagttacttgttgggaaagagcggcaatggtagtgttctgtacagcatgtgtctgtgaggtcagggaggggagaaacttggcatagccagttgtggtcttaagaatagtttgtgcctttggttagagtgagttgtgtaaatgtgaagggccaaaatatctttaacagaatcattgctacaaagctgtaaagaatgggtggccttatttgttgtcgcgggtttatagtaatagtttacaatacaataagaaagctctttcagtttctttgtgatactgaatctctgtgaaaatggtaggatgctttcttccattttacaaaataggaaatttaggcataaggagagaacttctccaaggccgcatgttaaattggtgacaaagttggaactgtaactcccatattttcactactactgcagcagtatattcagcataccatggtgcctcaggaagtctttgtcggcaaatctgagtatgctggaaagataggagcacataagactggttggcttgtatttgggggagaccgattgtgtcagatatgtatgtggaacgtagctgtccttgccgagtctgacctgtatgaaatgcatatccatggctatattattttggatttatggaggaagcagagcatttctgacacttaaggttgtatgcgtgagggagaaggctttcacagcttaacttgtaccagagcagctgcatgggtgctgacagcttaacttgaaatctgtgggaggaaggatcctttttcactcattcaacaaatataaccattcaatgaatggtccatgccttgaggtgaggatcatcaaggtgtctctgtaaatagcctggatgcaatctgaggggagttgttttgacggtggtaggtattaagttgagggaggcagtgtggaattaaaaccagagaactgtttttgggtactggtaattgttaatatatgtgcctgtggatgttggaacttcttggctgggctgaaggaatcctttgaaagactgatttcggcagggcgcggtggctcacacctgtaatcccagcactttgggaggccgaggtgggcggatcacgaggtcaggagatcgaatcacgaggtcaggagatcgagactatcctggctaacaggatgaaaccccgtctctactaaaaatacaaaaaattagccgggcgtggtggcgggcgcctgtagtcccagctactcggggaggctgaggcaggagaatggcgtgaacccgggaggcagagcttgcagtgagctgagattgcgccactgcactccagcctgggccacagaggagactccatctccaaaaaaaaaaaaaaaaaaaaaaaaaagactgatttcatgtagtaaggatcccgtctatgaactctatgaatatgaggtaagaatgcatgaactaagccaacttagctgtattcttctggaaaatgggatgtttcttgataggctagattagtggttcttaaaagttttttggggtcacttatccttcagagaatcggatgaaagacactgggccctcaagttagaagatgagcataagcgcaatcacatgatttatatatatgattttaggaacttaaactgtaatgaaatagagccaatttatatttagatctcatttgaaaacctttcattttcattgttcgggtgtgtggatgttagtatgagtttaaggtgaaggagtctatgttagtatttgaacatgttgacaggatccatatttttaatttattctttttatcgtctgcaaacatttctgcagtattagtaaatgactctgtatttggtaaaaagggaagctaatgtcgcacaagtatctatggctttgttctttgtcagtatctttttgttctcaaactctgagaagcgtctttttttcagttttggattgggcctgaggtgatttgaagctcctgtcttggagtttaacttagttataacaaacactgagttaatcctatgcaggagacacaaagataattaatatatggtctctgtgcttgaagagacgctaattttctgtggttgaagagatgctgtgaattgtgtgatagtggcagctctcaaaaggacaaggaagagggaaacatattcctagaagctgaaattttattacccaattgcaaagactttttgtcactacttattcttaggaataaccataaagtgtttattttattctgtatggaactttgtactttaaaaaaatatgttttgtatcatctggtgtttttgtataaaggaactgttggtttgaaaagaaggtaaacatcatttatattccttaccttgttttgggatgtatctctacagtgagtttatgtaaaaaggtcttaatgtcatttttgggtatacatacatgtagaaagccctcctgatataaaatccagtagctatttgacagactacccattaatttattactggaacttaaaaataattactgtacttttaaaagaacaagaaattggtcaggtggggtggctcacgcctgtaatcctagcactttgggaggacgaggcggatggattgtcagagctcagaagatcgagaccagcctgggcaacacggtgaaaccccgtctctactaaaatacaaaaaattagctgcatgtgttggagtgcacctgtagtcccagctactcgggaagctgaggcacgagaattgcttgaaccaagaattgcttgaactgggagggggaagttgcagtgagctgaaatcatgccactgcactctagcctcggcatcagagcaacactctgtctcacaaaaaaaaaaaaaaaagcaagaaatgtaaaaaggtgttttaataggacagattataggattcagtgagataatggagaagttttaggaaaaattgtctgatagtcctttctttctattgacatggcccctgtataagaatgctatgtaaatttgtgaaaagtttaatattttctctaatttttaacgggtagtaggttcatggtgttatttttctcaaaacgtacatgtgatatgtgtgtgtagtgtgcatatatgtgcatgtatgtgtatacaatttctttatttttttaattgagattaggtctcgctatggttttttgtttttgtttttgtttttgagagagagtttcgctctcctcgcccaggctggagtacaatggcacaatcttgcctcactgcaacctctgcctcccaggttcaagtgattctctttcctcagcttcccaaatagctgggattacaggcgcgtgccaacacgccctgctgatttttgtatttttagttgagacagggtttccccacgttggccaggctggtcacgaactcctaacctcaagttctccagccgtctcggccttccaaagtgctgggattataggagtgagccactgcacctggcccaggtcttgctatgtagatcaatctggtcttgaactcctggcctcaagccatcctcctgtcttggcctcccagtttgctgggattacagatgtgagccagcatgcccagctctttttacctgcttaccaaatccaagattttctccaaaatgaactggaatagccttcttactgtgttaattttgccttggtggggaagcctaagtcttggaactaaattggggtggttatgacagttctctttttaaagctgatcagtatttcagtatttcacttgttgttgttttttttgttttgttttgttttttttgagatggagtcttgctctgtagcccagtttggaatgcagtggcaggattttgactcactgtagcctctgccacccggattcaagtgattctcctgcctcaatgtcctgagcagctgggtttacaggcacgcaccactacacctggctaatttttgtattgttagtagagacagggtttcaccatgttagccagtagccaagctgttctcatactcctgacctcaagtgatccacctgcctcagcctcccaaagtgctgggattacaggtgtgagccaccacgcctagccaaacccatctctttcattaaaccacctcattttggttcagaaacaagactgccatgtatgtatttaatgcttattatgtgccaagcactattccaggtactaagatacagtgatggacaaaacaagatcccttctcctctatctcaggacttattaatttgggcattttcattttccaatataggatcttttagtactggtataggattcctgaaggaattcctgaaatataattatttttctgctagagcaaatcaattttgttttttgttttttttttgagatggagtttcgctcttgtcgcccaggctggagtgcaatggcgcaatctcggctcactgcaacctccgactcccgggttcaagcgattctcctgcctcagcctcccaagtagctgggattacaggcattagccaccacgctaggctaatttttgtatttttagtagagacagggtttcaccaggttggccaggctggtctcgaactcctgacctcaggtgatcctccaggctcagcctcccaaagtgctaggattacaggcaggagccaccacgcccagaagagcaaaattcttctgttgacaaaaatttctttcctctgaggaagagacactgtgtgcctgtgttttatccaggaattccattggatagtttgtcctttgggatgtcagtggattaaatcctccattaagaatcaaagtacttggctgggtgcagtggctcatgcctgtaatccctgcactttgggaggctgaggcaggtggatcacctgaggtcaggagttggagaccaacctggccaacatgatgaaaccccatctctactaaaaatacaaaaaattatccaggtgttgtggcaggtgcctgtaatcccagctactctcgaaaaaacagaaacaaaaactctgacatgtagagtatgtagatgtagagaaaaaagtaaaatgattgttgaaaaaaatgtctattttttatcttctaaatagctttgtgtgtcagagatcagaacgctcattttacatgatatcaagaaccagaatgctagatagctagaatggttgttaacttcctagataaccattgtagaggaacacataaggtaaaacaaatgaataaaaattaaaaaaaaatgagatagccaaagatttgaagctctttacccattaacatgataatcatttcgactttgaatatttgtagaacaagagtcagaactcagaacaaagatctctgaggaaataaaaaaaaatcaagctgcctcctaatttctcatttagtctgtcattgggcattgtcaaactgtcaaactatatttagagattctggttttcatctggagacttagtgagttgtgtaatatcttgaatacacatataagatcttgccaggtggggtggctcatgtctgtaatcccagcactttgggaggatgaggtgggaggatcgctggagcccaggagttcaagaccagcctgggcaacatagcaagtccctggctctatttaaaaaaaaaaaaaaaaaaaaatcctcaatgtagaactttaaatttatccttacgtgttacatccagttgatttgagaaaatatgattctgaattttccatcaattggattggcagtccctttcagctttacagctttacatcatctacagatttgttaagtatgttctcttggtcttctaattcactgatggagtttttgaataggtcgggtccaaagatagagtcctatgaaacactgttggaaacttgtctctgtctgtctcttttttttttggagacagtgtcttgctctgtcgttcaggctggaatgcagtgggacggtctcagctcactacagcctctgcttcttggactcaaagagattctctcacctcagcctctcaagtatatgggactatatgcatgtgcgaccaagcccagataaatttttttttagagatatgttgacattttgcccaggttgggagacttgtctcttgattccattcagtattgtgtgggtttggataggccatctaattataaaatcattgggctggtcatggtggctcatgcctgtaatcccagcactttgggaggctgaggtgggcggatcacctgaggtcaggagtttgagaccagcctgaccaatatggagaaaccccatctctactaaaaacacaaaattagctgggcgtggtggtgcatgcctgtaatcccagctacttgggaggctgaggcaggagaatagcttgaacctgggaggcggaggttgcagtgagccaaaatcgtgtcatcgcactccagcctgggcaacaagagcgaaactccgtctcaaaaaaaaaaaaaaatcatctagctcacattttctccttgtcttcttcctattagaatttaagttcaatgagattagaactctctctctctctcattctctcatatatcccaagcatctaaaacagggattgaaacatagtaagtactcaataaatgtttttgaataaatgaatgaaggatagctgggcgtggtggctcatgcctgtaaccccagcactttgggaagccaaggtgggtggatcactggagctcaggagttcaagaccagcttgggcaacatggggaaaacccatctctacaaaatatggaagaattagccgggcatgacagcacactcctgttgccccagctacttggagggctgaagtgggaggatcgcttgagcctgggaagcagagattgcagtgagccgagatcaagccactgccctccagcccgggtgacagagtgagaccctgtctcaggaataaggatagatatgaagaattcgtcagatgccttgttgaaaacatcatacattgtctacatggaattcctccatattgtaaaatgaatctaatttataccaacaacgtttggcttttttgcagaaaaggaagcaaatgagctgatggaagatctgtttgaaactgtgagtaatgatcctcaagtgagaacatgggattgtaagttggttctccaacaaaatgtgtcctttgatctctgtgatgctccttctagaagagggactgaaccaattctccttttagtctacctgggaaagaatataatgacaaaagaaatttgctaactgctagactcttgattatccacatgtaggttattcttactaaaattttccttgaagctttttttttttttttttgaggcaaagtcttgctctgtcacccaggctctggagaatacagtggtgaaatctcagctcacagcagcctcgacctccagggctcaaaacaattctctcatctaagcctcctgagtagctgggactacaggcacacacctacaggcccggctaattattttatttttttgtagagacagggtcttgccatgttctggaactcataggctcaagtaatcttcctgcctcaacctcccaaagtgctggaattacaggtgtgagccagcacatcttgccccttgaaaacttttgatggcttcccctactgtcatttggtgtgtccttaaagattgccaactagttttaaagtattttgcacacaaataattaccttttccataaatttgtctaaaaagatatttctgtttaagaaattgatcattttgagttatcctagctctgtgcttactgatacaagttgactggttgagcaacttctttcctggcataatagtcattccatatgtgggtttgtaggagtcctgaagtgagaaaggttctgatgtaggctctttctgggtgccagcattattaaagtattgtttatagttttcacttttccttcccaacactggagcaacattcaaaagcccattccccaggaaaaccctccctttcctttgcccacagttccaagatgagatgggattctccaacatggaagatgatggcccagaagaggaggagcgtgtggctgagcctcaagctaactttaacacccctcaagctctacggtaggctagttgaagaccttgagatttggaatagaggaagagtttatttctgaaaaggttttcagaagttgcagttaacaatttttcatccccagccagcttctgttactgatgtaaggatgcagagtcctgtcaggagttaggtgtcaagtgaagtctccttgttatggggcagtgcagctgtaggccaagctgtatctgtttgggaagggagaaaaaacagtagctggcatccatatccacttctccgggtgagtggtgctggagaggtatgtaggactcaatgtggccagccacacaaactaccctatattgtaatatccagtctgtcccttttgttctttttatgtgccattaatatctgctaaatgtgactgaaaatttgttagtcacctaggcattagtggagcaaaccctgaagcacctgcagtaaggagtctgaaacatacgtgctgacctttttgcctaaagttggcacttgtgttacagcatccagaaagtagaggctttaattttttcctcattttgtggtggatttgcatctgcactttattctgttgtagcagcatataatcattaggtcgatggcgagaggtcaggatgcagtttgtgccataagtggaacaaagcaaagagaatagtccctgtaattagtcctgtgtttgaacttaacagcactactaagcagagagcttgggttccatctgaaagctagacctttagggattttccaatttagtgaaaaaagataagataggccaaccaatgtcttaaaaactagaactactagtcattctccattacaacaaatatcacaatacaactacatcaaaaatctcaagattgctaagtcagtatttgacccattattttaatttatagttcatagaacaaaattctggtatagcagaatggaaccattcatcctgggaacgtataataggatctgattaataaatattttggttttgctgatcaactctttataacttcttaaaatttggaaaatatagaactaatttaaaattcctgttagaatccagttaccttctggtattcaatggaatatagtcatatatcatctcatggtcataccctctgtgaaatctatcattaaacgattcatcattgtgtaaacatcgtagaatgtacttacataaacctaaatggtttagcctactgcatacctattgctcccaggctacaaaacctgtacagtgtgttactgtactgtactgaatactgtaggcagttgtaacacaatggtaagtacatatgtatgtaaacatagaaaaggtacagtaatcttatggagccacctctgactatgtggttcgttattgactgaaacattctgtggcgcatgactgtacttgggcagcttctgcttctctttcgattgcaaatacaaacctgtttttgttttaatctttgactaaataaaaatccctctgtaagtccatagagagtaagcacatcttaaaacacaataaggaagagagaggagaaaaagacagtcaaaacaaaaactctggggcttcccttatcaattacctaaataatccttgttaaaactaagtgcaggctatgtttccattttctacttttttatgcttcttctcttctgttccttcagtggtggtagcgcggatgttcaaattttcagttctcagtaaagattgtatagacagtcccacggtcttcaggtttttactctgtgctacccaaacctacagtaaatactataaaagaaaacttattcaaacgtaatctttatctgcaaaaactattgaaaaacgttaccatttaactattgctgtaatatagggggttccttgaaatatgataacctgcttgttatagctacttcagcagatcttatcctgttgcatagggtatcagcatatgcttaatcatttaggtatattattctccctttatttctttctatgtaaacatagaaaaggtatagtaatcatacatagaactgacatgctaggtattggaatttttgcttcagccctgcaaacaatctttcaggagggtatggatgggaagttagggttaggaaccttggaagaggaatttaaagggctaaaagaagatagccttcatggataatattttaactaacttctccgttctgttcatttgaactaccatgtacttcagttattttggtatatccttttcctgcttcatgctagaaagtctttgacttgttaagaaagcagggcagtgcagcctgagtagataggataatgggacaagctggacctgggatgggagtaacatcccagggagtaacaagtaatgagagaagaaatgagaatgatgagttcccaccagctccttggctgctttcttacccatatatttctctgtccctagttttttgtttaattttttcttcatttgtatattatttggaagaggaattgtagaggaatgggatggggtgtaatacagaatcatttgatgcatgctaactactttgggaaaagatttgtgtaaggctgggagtttgactgttggctaaagtgaaaaggggggattagtagggaatgaaaattgttcaggctctttgctcatcattgcaaagaattggatgtgttgtggacctaggaaaacactcaaattcagtcatccccgtttgggataggtttgaggaactactggccaacctactaaatgaacaacatcagatagcgaaggaactatttgaacagctgaagatgaagaaaccttcagccaaacagcagaaggaggtagagaaggttaaaccccagtgtaaggaagttcatcagaccctgattctggacccagcacaaaggaagagactccagcagcagatgcagcaggtaacactttccttggtcatattaatattgaattataccaaggcctaactctgaggctttggtataatctaaaattagcagctttgtaaatgtcagagatagttaccttactacgtattaaaaccgtagtatcttcacatcagttaggagcttgagaagtcatcatgttcatgtcctgtggctcagggaagacagcacataaggaccctaatggtattcggaattacagatttcaaagagtcctcagtaatctattctgaaatttaaccttcactgtgacaagtagttttttttcccttttcccttttcttttttcttttttttttgagacgtagtctcgctctgtcacccaggctggagtgcagtggctcaatctcagctcactgcaagctctgcctcccgggttcacgccattctcctgcctcagcctcccgagtagctgtgactacagggactcgccaccacacccagctaattttttgtatttttagtagagacagggttcactgtgttagccaggatggtctcgatctcctaacctcgtgatccacccgcctcggcctcccagagtgctgggattacacgcgtgagtcactgcgcccggccttttccttttctaatctcagttcctcctctgtttagaggttaaacttcctctggttctgtcattttgttcaagggaacatgtctgagaaatttatgccaagatcctacgttgttctcacactctttgcagaaagcaaaatttgtgtcataaagttgcaaacatcttagttaatgactctctggtggctgggtgcagtggctcacacatgtaatcccagcactttgggaggctgaggtgggaggattgcttgagcaggggagttcaaaagcagcctggacaacatagtgagactctgtctctacaaaaaataaaaataaggctgggcacagtggctcacacctgtaatcccagcactttgggaggccaaggcgggtgaatcatgaggtcaggagtttgaggcaagcctggccaacatggtgaaaccccgtctctacgaaaacaaaaaattagctgggtgtggcggcgggcacctgtaatcccagctactcgggaggttgaggcaagagaatcacttgaacctgggaggcagaggttacagtgagccgagatcacgccattgcactccagcccaaaagtcagtgcgagactctgtctaaaaataataataataataataataaaataaattagccaggcattgtggtcacagctacttgggaggctgaggtgggaagattgcttgagcacaggtggttgagagggcattgagtcatggttgcaccactgcactccaagctgtgtgacagagcaagaccctgtctccagggggaaaaaaaaatatctctgggctcctgaaatggcagtgtcataacatatcactgcattattttctttctctccccagcatgttcagctcttgacacaaatccaccttcttgccacctgcaaccccaatctcaatccggaggccagtagcaccaggatatgtcttgtaagtttccaaattgccgtaattctatagactagaatataaaattagcttggcaggttatttctcacagttattctctcaggtatttttgattgctgtggcttcctatgtttgctgagtgaacataagccactgattcacatgaaaggacaaagagtgtattcaattttttcttttcttttttgagacagggtcttgctctttcacccaggatggagtgcggtggaacaatttcagttcactgcaacccctgcctcccgggttcaagtgattctcctgcctcagcctcccaagtagctgggactacaggcgggcaccaccacgggtaattttttttgtatttttagtagagacagggttttgccatgttggccaggctggtctcgaattcctgacttcaagtgatctgcccacctctacctcccaaagtactgggattacagccatgagccactgcgcctggcctgtccttctgatatttttattgggtcctcctcctcatctttagattcaccctgacttcttaggtttttggtaccgctattcatttcatagatgttgaggctgggcatagtggctcacacctgtaattccagcactttgggaggctgaggtgataggatcacttgagcccagtggtcaagaacagcctgggcaacatagtaagacccggtctgtgttttttttgttttgttttgttttaatttaaataatgaagtaaatatacatgtagatgttgaattcattatccattcatgaagctcaatattagtgttttatgtgtagagctagttttgctcatgacgttttgaggtattttgagctttttttttttttttttttttttttgagacggagtctcgctctgtcgcccaggctggagtgcagtggcgggatctcggctcactgcaagctccgcctcccgggttcacgccattctcttgcctcagcctcccaagtagctgggactacaggcacccgccactatgcccggctaattttttgtatttttagtagagacggggtttcaccgttttagccgggatggtctcgatctcctgacctcgtgatccgcccacctcggcctcccaaagtgctgggattacaggcgtgagccaccgcgcccggcctattttgagattttaaatttgaaatttggccaggtatggtggctcatgcctgtagtcccagcactttggtaggtcaaggtgggaggattgcttgagcccaggagtttgagaccagcctgggcaacatagtaagaccccatccctaccaaaaaaataaaaaataaaaaaattagctggggatggtgccgagtgcctgtagtcccagcaacttgggagactgaggtaggaggatcacttgagcctgggacgttgagactgtagggagccgtgcttatatatcactccagcctgggtgacagagtgagaacctgtctcacaaaaacaaaaccatactttacctcataaaaattgcctcaaacttttggacaggtaatgataatactctcagcttcttcagtaagtcttctttggattttgaagagtacatttgctagtattctaaaacttccttggtgatcaacaggatgtcttcatctcttactgtattcagaggaggatgaggagtacttggttgtaggcattattctgagaccaaaagacaaaacaattttaaaagtaatggtcctggtcgggtgaggtgactcatccctgtaatcccagcactatgagaggccgaggcaggcggattgtgagcccaggagttcgagatcagcctggccaagatgggaaaacgctgtctctgcaaaaaatacaaaaatcagctaggtttggaggtgtatgcctatagtcccagcttctcaggaggcagtgggaggatggcttgagcctgggagggggagtttgcagtgagctgagatcatgccactgcagtccagcctgagcggcagagtgagaccatgtctcaaaataaattaattaattaaattaaagtaatagtccccattcttgagactcttaattctagctcgggagctagaccatgtattccttagtgagaaacagtttaaaaataaaacaagaatataatccctgaatatctgagaactcaggcataatcttaacagtagtttattgtgaaagactttatgattatttttacctgtttttatcctgtagtaggaaggtcagcttctcatttagattctgaaggctattggtattaattgtctggaattgtcttagatcttccttgtgtcgtgttttcccagaaagagctgggaacctttgctcaaagctccatcgcccttcaccatcagtacaaccccaagtttcagaccctgttccaaccctgtaacttgatgggagctatgcagctgattgaagacttcagcacacatgtcagcattgactgcagccctcataaaactgtcaagaagactggtaggagacagatgtgtcagctttaagtttttacttgcggtgagaggtggtgggaatcttatcccatagataacttcctaggatacttgcctaggaatggaggacacaggacatttgtaatttcttccttctctcttttatcctccctttgtactcattatccaagttctagaattacatgataatctccgggcctgggtaaggcatggaggcagtggacagtataggaatatgggaggtagagatctgaggctcagtgctaagaattggactacagcaatatgaggggtaagtattaggaatcagatcaagataaactggggcctggtaaagatgaaagtcaggtggtaaagttcggtcatgtttagctttttattctcttcattaagatcaactaactttatttaccataatgattgtagcataggtgatatctccattctgaatgaaatgttgacttgcaagttaggcgtaaattagagattgtacatttgccgtgttcagtattttaaagaaatttgccggtttagattctaccttgcattggtttagtattttttgagaaaatatttgctatttacttaagccaaatatttacttctgatttgtttgctgacttagcaaattagttgtggtttgttctggatttgggtttgtctttggattctattttaaatccctaagtcttatcattacattgaatgtagttgaatttaagtgtactatatcatagacacagatcccaaactactttaatagctatattatatgaaatggtaatgaaaacgtgatttaataccaaattatagtattatcttacacatctagtgtcctgtgtttttcttctggagatataaaaatgacacttatggaaggagaaatatggatatagtagttttgtctctagaaatgcagaggtgcctaaaattgagaggctgagagagggagacagaaatgaatgagactgaattgtctcattccttttatggttcttttgttcccaacctcaggaggaatctgggagaacttaatgaaagttaagaaagaatgaaataaaagtaaaatttggaataccaggtttgtgagggagattaaagaagttggaatcttttttcttttttttttttttaagatggagtctcgctctgtcacctaggctggagtgcagtggggtgatctcggctcactgcaacctccgcctcccaggttcaaacaattctcctgcctcagcctcccaagtagctggaattacaggtgcgtgccaccatgcctggctaatttttacatttttggtagagatggggtttcactatgttggccaggctggtcttgaactcctgacctcaggtgatccacctgcctcggcctcccaaagtgctgggattacaggcgtgagccagcacgcctggcctggaatcttatcctggaagaaaaaagcattgttgaaggtctgttatccttcagagatttaaaggggaaaggaggtaaaacatttttgagcatacactatgtgacaggtattactaggtactttttaagtgtttgttttactttgtgaataaagtgttacacgtaagaaagagtaagagaggccgggcgccgtggcttacgcctgtaatccaacactttaggaggccgaggctgtcggatgacaaggtcaggagatcaagaccatcctgtctacagtgaaaccccgtctctactaaaaatacaaaaaatcagccaggcgtggtggcaggcgcctgtagtcccagctactcaggaggctgaggcaggagaatggcctgaacccgggaggcggagcttgcagtgagccaagattgcgccacgcactccagtctgggcgacagagccagactccgtctaaaaaaaaaaaaaaaaaaagtcaacttttattgccagtgaatgggactccctttagacctaatgttagttgaggaaagactgtggaaactctttggggagtggtaggcagatgggagggaatcaagttagataaggacagctctacctaaatgcaaaaatgcattcacaggctttttgaagccctcttttttcctagaagttgatttatcagagatttattttcttatagccaatgaatttccctgtttgccaaagcaagtggcttggatcctggccacaagcaaggttttcatgtatccagagttacttccagtgtgttccctgaaggcaaagaatccccaggataagatcctcttcaccaaggctgaggacaagtaagtgtttactctgggggatcaaatatcccaaggagaagatgtagttcctttgaggagtttaggggaagtaagacttgtataataagacatggacacaaaaggaaaagcagtatagatgagcagagtcctctagaacgtgcttgttctagcagtgccaaatactgctttttggggggatgttacacacatttttaaaatgttttagactggacatggcggctcccacctgtaatcccagcactttgaaaggccaaggcaggaggttggcttttctaatgttattatttatttagagacaggatcttactctgtcacccaggctggagtacagtgttgcaatcacagctcactgcagccttgaactcctgggatcaagtgatcctcctgcctcagcctccatggagtagctgggaccacaagcgtgtgccaccatacatggctgattttttttgtacaggtgagggtatctctgtgttgcccaggctgctcttgaattcctgacctcaaatgatcctcccactcctggcctcccaaagtgctgggactataggcataagccaccacacccagctagattatgaacatttttatggccctttgtgtgtattgccacactgttaacagcaaatatgtatatatgtaaccatgattatatatgttatgttagagggtagtattggtgccagtttaatttgtctgacggggtacctattattcattttatatttgttttattagaatcattctccttcccatgtattctctttgaacttcctttgtgttgttaatatacagctcatcatgatctgacatttattgatgatttatgactagtttctcttgctcctacttaattgtgaactatttgattcttattcatagtacttaatcactactcactaaatacctgaaattttctactgagtagtcaccaacttgtagtagtcactacaagaattagttgtagaaaaagtagattggccagccatggtggctcacacctgtaatgacgacactttgggaggccgaggcaggaggatcacttgaggccagaagttcaagatcagcctaggcaacaaagtgagaactggtctctacaaataatgaaataaaacattagttaggcatggtagcaaacgtttatagccacagatactcaggaggctgaagtgcgggaatcgattgaacccaggcattcaagactgcagtgcactgtaatcatgccactgctctccagcctggacaacagagcaaaaccctgtctgaaaaaaatgaaaaagtagattgggccacacgccatgggctcatgcctgtaatctcagcactttgggaggctgagactggagaatcgcttcagcttaggaagtagcagctgcagtgggctgcgatcacgccactgcactccagcccaggtgacagagtgagaccttgttttaagaacaagtaagaaaaagtagattgtaaaatgtgttagtctggggaggccctttagaaggaaggactgtgaagtgagatttagtgttattgctcctttctcagtttgttagctttaggactgaagcattttgaagggactgagtttcttaaccctctaatcagcaagtaccttctaacctgcaagactgcccgccaactgacagtgagaatcaagaacctcaacatgaacagagctcctgacaacatcattaaagtgagtgtttcctgcatgcactatccaggcacctcaccaacacatatctgttcttttctcttgttattctcaaagaaaagaagaaccttcttttatctaaagctaatttctcctacttatatactagattaattcccctgttgccttttcagggacattgattcattcattacgttcctctggagtatcttcatcctcttaaaagattccacaaatccatgtttccctgtaataattctctttcttgaactttctagaaatgatatgcagtattccacttacatgctttgggtttttgttttgttttgtttttttggtcagacataatcttgcactgtcacccaggctggagtgcaggagtatagtggcatgatcttggctcactgcagcttccgcctcccgggttcaagtgattctcctgcctcagcctcccaaatagctgagattacaggcgtgcccaccacgctcagctaattttttgtatttttagtagatacgggtttcaccatgttggccaggctggtcttgaacttctgacctcaagtgatccaccagttttggcttcccagaggctaggattgcaggcataagccaccgtgcccagcctatatactttttctcaattttgtgtttgtatgtatgcatgtatgtgtgtgtgtgtgtgtgtgtgtgtttgtgtgtgtctgtgtctgtatgtatgtatgtatgtatgtatgtatgtattgagatggagtttcgctcttgtcgcccaggcccagcctatatactttttctcaactctttttacttattgattgattgattgagatggagtctcgctcttgacccccaggctggagtgcaatggtgcgatcttggctgactgcaacctctgcctcctgggttcaagtgattctcctgcctcagcctcccttgtagctgggattacaggcccctgccaccatgcccagctgatttttgtatttagtagagtcggggtttcaccatgttggccaggctggtctcgaactcctgacctcaggtgatccatctgcctcggcctccctaagtgctgggattacaaatgtgagccattgcccccagccttcttttttatttagatatttatttatgtttttttttttttttagagacaggttctcactctgtcatcctggctggagtgcatgggcacaatcataggtcactgcaacctcaaattcctgggtgatccttccacttcagccttccaagtagcttggactacaggtgcatgccaccaaggctagccgattattttattttgtgtgaagacagggtgtcattttgtttcccaggctggtcttgaagtcctgacctcaagcagtcctcttgcctcagctcggcctcccagagtgttgggattacaggcgtgagccatgatgcccagcctttggtttcattgtgtttttgtatttttcttgagacaaggtcttactctcctgcctaggctggagtacagtggtatagtcatagctcactgcagccttgaactcctaggctcaagcattcttccaacgtcagcctcccaaggagctgggattatatgcattagccactgtgcttggccattaaatttatttatttatttattttattttatttttttgagacagaatctgtctctgtcacccaggctggagtgcagtggcacaattttagctcactgcaacctccacctaccgggttcaagcaattttcatgccttagcctcctaagtagctgggactacaggcatgcgccaccacacctggctaatttttatatttttagtagaaacataatttcaccatgttggtcagtctgatcttgaactcctgatctcaggtgatctgcccacctcggcctcccaaagtgctggaattataggcgtgagcctctgtgcctggcaaaaaactttttttttttagggatggggtgtccctatattgcccaggctggtcttcaatttttggccttaggcaattctcctgtctcagcctctaattggtactgcctggtgtattggatttaggccttacttattaaccataaaccacggaagccgaagatttacctctctcctcactcccttactcccaccacaaacatgcacattttctgctctccaaactcctcactagtagttatggtagaattttggttagattgtattcagggtttacattgtaagattttaaggactgttggctgggcgcggtggctcacgcctgtaatcccagcactttgggaggccaaggcaggtggataacgaggtcaggaaatcgagaccatcctggctaacatggtgaaaccccagctctactaaaaatacaaaaaactggctgggcgtggtggcgggcgcctgtagtcccagctactcgggaggctgaggcaggagaatggtgtgaacccgggaggtggagcttgcagtgagccgagatcgcgccactgcactccagtcttgccagagcaagactccgtctcaaaaaaaaaaaatagattttaaggactgtataaatgctcttcacagctcagctatgttactgtgttaccttgcctttcctgctgaacattttgtttcccagatcatcttctttcagtgtgttcaggtattctagatattctgtcactttcatcttgaagaaattgctccctgagccctctgacattattccactttaagcgtgttgctctccatgttgctgcactgatgtcttcttgggctttttcttcaccatcatcccaggaattccttttgcctcatactgtgttagatcctcttatttcctgaattccacatctttgcttttgcattactttttttttttttttttttttttttgagacacagagtcttgctctgtcccccaggctggatctcggctcactgcaacctgcaaccttggtcttggtcttgaactcctgacctcaggggatccacccacctcagcctcccagagtgcggggattacaggcgtgagacaccacgcctggccttgttttttgttttgttttgcttttttttgagaccgagtctcgctttgttgcccaggctggagtccaaaggcgcgatgatcttggctcactgcaacgtccgcctcccgggttcaagcaattctcctgcctcagcctcccgagtagctgggattataggcacatgccactacgcctggctaattttttgtatttttagtagagacagggtttcaccatgttagccaggatggttttgatctcctgacctcttgatccacccgtttcggtctcccaaagtgctgggattacaggcgtgagtattacttctttactttagtggaacacattctagtagcttttttttaaaaaaaatttttttctgaattttaaaaaattgaggtgggggggtctcagttttttgcccaggctggtctcagactcctgggttcaagtgatcctcctgcttcagcatcccaaagtgctgagattataggcatgagccaccctgcatggccccattccagtagcatcctgagggagagtgcttgggaagggaattttcacatttaaaccatctccggggccgggcgcagtggctcacgcctgtaatcccagcactttgggaggctgaggcgggtggatcacgaggtcgggaaatcgagaccatcctggctaatgtggtgaaaccccgtctctactaaaagtacaaaaaaattagccgggtgtggtggcgggcgtctgtagtcccaggtactctggaggctgaggcaggagaatggcgtgaacctgggaggtggagcttgcagtgagccgagatctcgccactacactccagcctgggtgacagagcgagactccgtattaaaaaaaaaaaaaaaaaaatctccattcatggtcttttgattgtatcgatgtcagtttcctcgtttttgtttttgttttattttttttctttttttgagacagagtctcactgttgctcactgcagcctctgcctcctgggttcaagcgattctcctgcctcagcctcctgagtagctgggattagccaccacacccagctaatttttgtatttttagtagagatggggttttgccatgttggccaggtgatctcgaacccctgacctcaagtgatctgcccaccttggcctcccatagtgctgggattacaggcatgagccaccacatcctccatgtctggccagtttcctggtagtaatattgtactgtgtaccttgtttatatgtatagctcttgtttctatgtaacataaaaacattatattgggagaaactggttgaagggtacatgggacctcttggtactattttttgcaatttcctatgaatataattatttcaaaataaaaggaaaaaataatactctcctctgtcactgtatctagaattctagataggaaataatttttttaagaagcttttaagggcctcacttcattttcttctaactcctagtgtggtgttaagaaatttcatgccatttaactttttttttttttttccgagacagggtcccaccctgttgcccagtttggagcgtggctaaatcatggctcactggtgtctccaacccggtgtgcaccactatgcccagctaattttttttttttttttttttaagacatggtctcgttatgttggccaggctggtctcaaactcctggcctcaagtgctcgtcctgtcttggcctcccaaagtaatgggattataggcatgagccatggccccatttaactcttgagtctttgtgtaacacctgtttttctcaacctctgacagcatgcaggatttttcctttggcttcaatattttgaaaatgcatgataatatgccttagtatttgtctatttttatccatggttttttaaaaagtactttctttttgtttttgtttgtttgtttgttttgagacagagtctcgctccattgcccaggctggagtgcaatggcgtgatcttggctcactggaacctctgcctcccaggttcaagcaattgtcctgtttcagcgtcccgaggagctgggactacaggcgctcaccaccacaccctgctaatttttgtatttttagtagagacggggtttcaccttgttggtcaggctggtctcaaactcctgacctcgtgacccacccacctcagcctcccagagtgctgggattacaggtgtgggccaccatgcctggcgtatccatggttttaaggcacacgtgataaaccttattcttctgcagaaataatttttttttttttttttgagatggagtctcactctgttgccaggctggagtgcagtggcgtgatgtcggcccactgcactctccacctcctgggttcaagtgattctcgtgcctcagcctcccgagtagctgagattacaggcacgcgccaccacacttagctaatttttgtatttttagtagagatggggtttcaccatgttggccaggatggtcttgatctcctgaccttgtgatctgcctgcctcggcctcccaaagtgctgggattacaggcataagccaccacgcctggccagaagtaatttgtgtttaagttttagttttgtgtcatttttcgtgcacacctttgtacttttgttgggggatggggcggggtgtcggggttggagtcttgctctgttgcccaggctggagtgcagtggtgcagtcttggctcactgcaacctcttaattcctcagttcaagtgattctcctgcctcagcctgccaagtagctaggatcacaggcgtgcaccaccacacccagctaatttttttttgtactttattagagacagggtttcgccatgttggccaggctggtcatgaactcctgacctccagtgatccatcctcctcgttctcccaaagtgctggcattacaggcatgagccaccatgcccagccctttgtacattttttaatgtaggatgccatttgtccacttgactctcccactagtctgtaagctccatgagagcaggaattgcttcccttatgtgtgtgcttagcttttagcacagtgcctaggatatagaaaacatcttatgttcatcatgttggatgaacagatgcttattgtcatggtttaagttcagttcttatcttctttttttttttttgagatggagtctcaccctgttaccaacgctggagtgcagtggcatgatcttggctcactgcaatctccaccctaccacccccactgccaggttcaagcgattcttttgccccagcctcccaagtaactgggattacaggcacccaccaccacacccagctaatttttgtatttttagtagagatggagtttcaccatgttggccaggctggtctcaaactctcaatctcaagtgatctgcccgcctcagcctcacaaagtgctgggtttacagatgtgagccaccaaggccagcctatttactcttaaaactgaactgcctcggtctttttttttttccttcccttctgatgcccttcacaccatcatttgcttaaagtctttgatgtgtccattttatagattacgatgctgtctttgcagctgttgagcaggaacaaatcttacataagattgctcttagcatctgcttccttttctctctgtgacctaaactctccccttcctggcaaccagaatggagatcatcagttagaaaatattgaatagggctgggcgcggtggctgacgcctgtaatcctagcactttgggaggccgaggcgggtggatcacgaggtcaggagatcgagaccatcctggctaacacagtgaaaccctgtctctactaaaaatacaaaaaaatcagccgggtgtggtggcgggcacctgtagtcccagctactccggaggctgaggcaggagaatggcgtgaacctgggaggtggagcttgcagtgagcggagatcgcgccattgcactccatcctgggcgacagagcaagactccgtctcaaaaagaaaatactgaataactataaaatctttaaatagagattagtttaatttgaaatgtacaagtattcagcatatgctattcgtatatgtgtgttcatggatgtttgtgtatgtggtcttgtgtgtgtgtgtgtgtgtgtgtgtgtgtgtgtgtttctcttgatccaccaccaccccattcaccagcctgacagaagacagtgtttccagaaggaatgtaattcatgcgcatttttttcatgttaagttttataagaagaccaaacagctgccagtcctaggaaaatgctgtgaagagatccagccacatcagtggaagccacctatagagagagaagaacaccggctcccattctggttaaaggtacagccctcttcctcgaagtctgtaggaggcagaaggtcactgaaagttctgagagaatatcaaggacttccttaatcgtctaatgctttagttgtagaactaggacttcaggaatcttcctgattcacctttcttcccttacttttctgcccttctccgggtgattctacaacattttcaaaataatgggtaaaatggtaatttgctaaaggaaattcagagaagagtttctaaagtgtataattggactgtggtctttgtagaaatttcatatgcagagtcccttggaaagatgccttgagcttgtctcaggtccctaaacttagaaagtcctattctttttcccaaattctgacatgtgctggatcagagtgttctcatttccaataggccagtctgccatccatccaggaagaactgcggcacatggctgatggtgctagagaggtaggaaatatgactggaaccactgagatcaactcagatcaaggcctagaaaaagacaactcagagttggggagtgaaactcggtacccactgctattgcctaagggtgtagtcctgaaactgaagccagttgccgaccgtttccccaagaaggcttggagacagaagcgttcatcagtcctgaaacccctccttatccaacccagcccctctctccagcccagcttcaaccctgggaaaacaccagcccaatcaactcattcagaagcccctccgagcaaaatggtgctccggattcctcacccaatacagccagccactgttttacagacagttccaggtgtccctccactgggggtcagtggaggtgagagttttgagtctcctgcagcactgcctgctatgccccctgaggccaggacaagcttccctctgtctgagtcccagactttgctctcttctgcccctgtgcccaaggtaatgatgccctcccctgcctcttccatgtttcgaaagccatatgtgagacggagaccctcaaaaagaaggggagccagggcctttcgctgtatcaaacctgcccctgttatccaccctgcatctgttatcttcactgttcctgctaccactgtgaagattgtgagccttggcggtggctgtaacatgatccagcctgtcaatgcggctgtggcccagagtccccagactattcccatcgccaccctcttggttaaccctacttccttcccctgtccattgaaccagccccttgtggcctcctctgtctcacccttaattgtttctggcaattctgtgaatcttcctataccatccacccctgaagataaggcccacatgaatgtggacattgcttgtgctgtggctgatggggaaaatgcctttcagggcctagaacccaaattagagccccaggaactatctcctctctctgctactgttttccccaaagtggaacatagcccagggcctccaccagtcgataaacagtgccaagaaggattgtcagagaacagtgcctatcgctggaccgttgtgaaaacagaggagggaaggcaagctctggagccgctccctcagggcatccaggagtctctaaacaactcttcccctggggatttagaggaagttgtcaagatggaacctgaagatgctacagaggaaatcagtggatttctttgagctaggagaataagagtctggagactgggagccttcacttcggcctccgattggtggcgcatagggtgtaaccaataggaaacccctaaagggtacttaaaccccagattttgcaactggggctcttgagcagcttgctttagcctgctcccactctgtggaatatacttttgcttcaataaatctgtgcttttattgcttcattgtttca

SEQ ID NO: 14981 - DNA, 2626 bp, Homo sapiens
cctcgatcccctcgccgcggtcccatggaggaggaggcgagccgcagcgccgcggcgacgaacccagggagtcggcttacccgctggccgcctcctgacaagcgggagggatccgcggtggacccagggaagcggaggagcctggcggccaccccctcttcctcacttccctgtactctcatcgctctcggcctccgacacgaaaaggaagcaaatgagctgatggaagatctgtttgaaactttccaagatgagatgggattctccaacatggaagatgatggcccagaagaggaggagcgtgtggctgagcctcaagctaactttaacacccctcaagctctacggtttgaggaactactggccaacctactaaatgaacaacatcagatagcgaaggaactatttgaacagctgaagatgaagaaaccttcagccaaacagcagaaggaggtagagaaggttaaaccccagtgtaaggaagttcatcagaccctgattctggacccagcacaaaggaagagactccagcagcagatgcagcagcatgttcagctcttgacacaaatccaccttcttgccacctgcaaccccaatctcaatccggaggccagtagcaccaggatatgtcttaaagagctgggaacctttgctcaaagctccatcgcccttcaccatcagtacaaccccaagtttcagaccctgttccaaccctgtaacttgatgggagctatgcagctgattgaagacttcagcacacatgtcagcattgactgcagccctcataaaactgtcaagaagactgccaatgaatttccctgtttgccaaagcaagtggcttggatcctggccacaagcaaggttttcatgtatccagagttacttccagtgtgttccctgaaggcaaagaatccccaggataagatcctcttcaccaaggctgaggacaacaagtaccttctaacctgcaagactgcccgccaactgacagtgagaatcaagaacctcaacatgaacagagctcctgacaacatcattaaattttataagaagaccaaacagctgccagtcctaggaaaatgctgtgaagagatccagccacatcagtggaagccacctatagagagagaagaacaccggctcccattctggttaaaggccagtctgccatccatccaggaagaactgcggcacatggctgatggtgctagagaggtaggaaatatgactggaaccactgagatcaactcagatcaaggcctagaaaaagacaactcagagttggggagtgaaactcggtacccactgctattgcctaagggtgtagtcctgaaactgaagccagttgccgaccgtttccccaagaaggcttggagacagaagcgttcatcagtcctgaaacccctccttatccaacccagcccctctctccagcccagcttcaaccctgggaaaacaccagcccaatcaactcattcagaagcccctccgagcaaaatggtgctccggattcctcacccaatacagccagccactgttttacagacagttccaggtgtccctccactgggggtcagtggaggtgagagttttgagtctcctgcagcactgcctgctatgccccctgaggccaggacaagcttccctctgtctgagtcccagactttgctctcttctgcccctgtgcccaaggtaatgatgccctcccctgcctcttccatgtttcgaaagccatatgtgagacggagaccctcaaaaagaaggggagccagggcctttcgctgtatcaaacctgcccctgttatccaccctgcatctgttatcttcactgttcctgctaccactgtgaagattgtgagccttggcggtggctgtaacatgatccagcctgtcaatgcggctgtggcccagagtccccagactattcccatcgccaccctcttggttaaccctacttccttcccctgtccattgaaccagccccttgtggcctcctctgtctcacccttaattgtttctggcaattctgtgaatcttcctataccatccacccctgaagataaggcccacatgaatgtggacattgcttgtgctgtggctgatggggaaaatgcctttcagggcctagaacccaaattagagccccaggaactatctcctctctctgctactgttttccccaaagtggaacatagcccagggcctccaccagtcgataaacagtgccaagaaggattgtcagagaacagtgcctatcgctggaccgttgtgaaaacagaggagggaaggcaagctctggagccgctccctcagggcatccaggagtctctaaacaactcttcccctggggatttagaggaagttgtcaagatggaacctgaagatgctacagaggaaatcagtggatttctttgagctaggagaataagagtctggagactgggagccttcacttcggcctccgattggtggcgcatagggtgtaaccaataggaaacccctaaagggtacttaaaccccagattttgcaactggggctcttgagcagcttgctttagcctgctcccactctgtggaatatacttttgcttcaataaatctgtgcttttattgcttcattgtttca

SEQ ID NO: 14982 - DNA, 28849 bp, Homo sapiens
aacgatcccagtgtcggttgcgggatccgcctcctctcagtttgcccctttagccctccacctttcccttctcctctctcgcatttccgccagtcggcttacccgctggccgcctcctgacaagcgggagggatccgcggtggacccagggaagcggaggagcctggcggccaccccctcttcctcacttccctgtactctcatcgctctcggcctccgacacggtgagtagaacgatttgggccggcattcgggcctaagcactctctcagcgattgaatcctgggctttctgggagccactgtcatctcccggacctggacctctgggagagcagtggtgaagatgggggaggggagagcagggagggggatcctgagcctaccgggaagtccctccaggcggggtgaaggggtgtccctgacaggcagactcccggagggggctgggaagtaagcgagtggaggcggagtcggctgtgcccctgacaggttagtttgtgtttgtaggcatgatcggagcctcccccatagtccagtttgtgtgtgtttaattaagggataagagtggtcgaggacacgatcttgagaggggattttacctgtgtgacaaggtctgtggtgtccctgccgcgttgaacggtatgtgggaacgacaggatgatctcagtgttgtacgtttaataaatgtcactggttagtttgtacatggaaagagatgtttttggtctagcagacagatggtctgttggtgtgtagcggctgtgttggtgtgtgtatgtgaggatggcaagtgtttccgtaagagtttgcctttatttgtgtaagtgtaatggagttccccttataagttagcttatttcttgaataaatgttgggaggttccttgcaggttgatatgtgtgtgtattttagggattgggagcccctagttacttgttgggaaagagcggcaatggtagtgttctgtacagcatgtgtctgtgaggtcagggaggggagaaacttggcatagccagttgtggtcttaagaatagtttgtgcctttggttagagtgagttgtgtaaatgtgaagggccaaaatatctttaacagaatcattgctacaaagctgtaaagaatgggtggccttatttgttgtcgcgggtttatagtaatagtttacaatacaataagaaagctctttcagtttctttgtgatactgaatctctgtgaaaatggtaggatgctttcttccattttacaaaataggaaatttaggcataaggagagaacttctccaaggccgcatgttaaattggtgacaaagttggaactgtaactcccatattttcactactactgcagcagtatattcagcataccatggtgcctcaggaagtctttgtcggcaaatctgagtatgctggaaagataggagcacataagactggttggcttgtatttgggggagaccgattgtgtcagatatgtatgtggaacgtagctgtccttgccgagtctgacctgtatgaaatgcatatccatggctatattattttggatttatggaggaagcagagcatttctgacacttaaggttgtatgcgtgagggagaaggctttcacagcttaacttgtaccagagcagctgcatgggtgctgacagcttaacttgaaatctgtgggaggaaggatcctttttcactcattcaacaaatataaccattcaatgaatggtccatgccttgaggtgaggatcatcaaggtgtctctgtaaatagcctggatgcaatctgaggggagttgttttgacggtggtaggtattaagttgagggaggcagtgtggaattaaaaccagagaactgtttttgggtactggtaattgttaatatatgtgcctgtggatgttggaacttcttggctgggctgaaggaatcctttgaaagactgatttcggcagggcgcggtggctcacacctgtaatcccagcactttgggaggccgaggtgggcggatcacgaggtcaggagatcgaatcacgaggtcaggagatcgagactatcctggctaacaggatgaaaccccgtctctactaaaaatacaaaaaattagccgggcgtggtggcgggcgcctgtagtcccagctactcggggaggctgaggcaggagaatggcgtgaacccgggaggcagagcttgcagtgagctgagattgcgccactgcactccagcctgggccacagaggagactccatctccaaaaaaaaaaaaaaaaaaaaaaaaaagactgatttcatgtagtaaggatcccgtctatgaactctatgaatatgaggtaagaatgcatgaactaagccaacttagctgtattcttctggaaaatgggatgtttcttgataggctagattagtggttcttaaaagttttttggggtcacttatccttcagagaatcggatgaaagacactgggccctcaagttagaagatgagcataagcgcaatcacatgatttatatatatgattttaggaacttaaactgtaatgaaatagagccaatttatatttagatctcatttgaaaacctttcattttcattgttcgggtgtgtggatgttagtatgagtttaaggtgaaggagtctatgttagtatttgaacatgttgacaggatccatatttttaatttattctttttatcgtctgcaaacatttctgcagtattagtaaatgactctgtatttggtaaaaagggaagctaatgtcgcacaagtatctatggctttgttctttgtcagtatctttttgttctcaaactctgagaagcgtctttttttcagttttggattgggcctgaggtgatttgaagctcctgtcttggagtttaacttagttataacaaacactgagttaatcctatgcaggagacacaaagataattaatatatggtctctgtgcttgaagagacgctaattttctgtggttgaagagatgctgtgaattgtgtgatagtggcagctctcaaaaggacaaggaagagggaaacatattcctagaagctgaaattttattacccaattgcaaagactttttgtcactacttattcttaggaataaccataaagtgtttattttattctgtatggaactttgtactttaaaaaaatatgttttgtatcatctggtgtttttgtataaaggaactgttggtttgaaaagaaggtaaacatcatttatattccttaccttgttttgggatgtatctctacagtgagtttatgtaaaaaggtcttaatgtcatttttgggtatacatacatgtagaaagccctcctgatataaaatccagtagctatttgacagactacccattaatttattactggaacttaaaaataattactgtacttttaaaagaacaagaaattggtcaggtggggtggctcacgcctgtaatcctagcactttgggaggacgaggcggatggattgtcagagctcagaagatcgagaccagcctgggcaacacggtgaaaccccgtctctactaaaatacaaaaaattagctgcatgtgttggagtgcacctgtagtcccagctactcgggaagctgaggcacgagaattgcttgaaccaagaattgcttgaactgggagggggaagttgcagtgagctgaaatcatgccactgcactctagcctcggcatcagagcaacactctgtctcacaaaaaaaaaaaaaaaagcaagaaatgtaaaaaggtgttttaataggacagattataggattcagtgagataatggagaagttttaggaaaaattgtctgatagtcctttctttctattgacatggcccctgtataagaatgctatgtaaatttgtgaaaagtttaatattttctctaatttttaacgggtagtaggttcatggtgttatttttctcaaaacgtacatgtgatatgtgtgtgtagtgtgcatatatgtgcatgtatgtgtatacaatttctttatttttttaattgagattaggtctcgctatggttttttgtttttgtttttgtttttgagagagagtttcgctctcctcgcccaggctggagtacaatggcacaatcttgcctcactgcaacctctgcctcccaggttcaagtgattctctttcctcagcttcccaaatagctgggattacaggcgcgtgccaacacgccctgctgatttttgtatttttagttgagacagggtttccccacgttggccaggctggtcacgaactcctaacctcaagttctccagccgtctcggccttccaaagtgctgggattataggagtgagccactgcacctggcccaggtcttgctatgtagatcaatctggtcttgaactcctggcctcaagccatcctcctgtcttggcctcccagtttgctgggattacagatgtgagccagcatgcccagctctttttacctgcttaccaaatccaagattttctccaaaatgaactggaatagccttcttactgtgttaattttgccttggtggggaagcctaagtcttggaactaaattggggtggttatgacagttctctttttaaagctgatcagtatttcagtatttcacttgttgttgttttttttgttttgttttgttttttttgagatggagtcttgctctgtagcccagtttggaatgcagtggcaggattttgactcactgtagcctctgccacccggattcaagtgattctcctgcctcaatgtcctgagcagctgggtttacaggcacgcaccactacacctggctaatttttgtattgttagtagagacagggtttcaccatgttagccagtagccaagctgttctcatactcctgacctcaagtgatccacctgcctcagcctcccaaagtgctgggattacaggtgtgagccaccacgcctagccaaacccatctctttcattaaaccacctcattttggttcagaaacaagactgccatgtatgtatttaatgcttattatgtgccaagcactattccaggtactaagatacagtgatggacaaaacaagatcccttctcctctatctcaggacttattaatttgggcattttcattttccaatataggatcttttagtactggtataggattcctgaaggaattcctgaaatataattatttttctgctagagcaaatcaattttgttttttgttttttttttgagatggagtttcgctcttgtcgcccaggctggagtgcaatggcgcaatctcggctcactgcaacctccgactcccgggttcaagcgattctcctgcctcagcctcccaagtagctgggattacaggcattagccaccacgctaggctaatttttgtatttttagtagagacagggtttcaccaggttggccaggctggtctcgaactcctgacctcaggtgatcctccaggctcagcctcccaaagtgctaggattacaggcaggagccaccacgcccagaagagcaaaattcttctgttgacaaaaatttctttcctctgaggaagagacactgtgtgcctgtgttttatccaggaattccattggatagtttgtcctttgggatgtcagtggattaaatcctccattaagaatcaaagtacttggctgggtgcagtggctcatgcctgtaatccctgcactttgggaggctgaggcaggtggatcacctgaggtcaggagttggagaccaacctggccaacatgatgaaaccccatctctactaaaaatacaaaaaattatccaggtgttgtggcaggtgcctgtaatcccagctactctcgaaaaaacagaaacaaaaactctgacatgtagagtatgtagatgtagagaaaaaagtaaaatgattgttgaaaaaaatgtctattttttatcttctaaatagctttgtgtgtcagagatcagaacgctcattttacatgatatcaagaaccagaatgctagatagctagaatggttgttaacttcctagataaccattgtagaggaacacataaggtaaaacaaatgaataaaaattaaaaaaaaatgagatagccaaagatttgaagctctttacccattaacatgataatcatttcgactttgaatatttgtagaacaagagtcagaactcagaacaaagatctctgaggaaataaaaaaaaatcaagctgcctcctaatttctcatttagtctgtcattgggcattgtcaaactgtcaaactatatttagagattctggttttcatctggagacttagtgagttgtgtaatatcttgaatacacatataagatcttgccaggtggggtggctcatgtctgtaatcccagcactttgggaggatgaggtgggaggatcgctggagcccaggagttcaagaccagcctgggcaacatagcaagtccctggctctatttaaaaaaaaaaaaaaaaaaaaatcctcaatgtagaactttaaatttatccttacgtgttacatccagttgatttgagaaaatatgattctgaattttccatcaattggattggcagtccctttcagctttacagctttacatcatctacagatttgttaagtatgttctcttggtcttctaattcactgatggagtttttgaataggtcgggtccaaagatagagtcctatgaaacactgttggaaacttgtctctgtctgtctcttttttttttggagacagtgtcttgctctgtcgttcaggctggaatgcagtgggacggtctcagctcactacagcctctgcttcttggactcaaagagattctctcacctcagcctctcaagtatatgggactatatgcatgtgcgaccaagcccagataaatttttttttagagatatgttgacattttgcccaggttgggagacttgtctcttgattccattcagtattgtgtgggtttggataggccatctaattataaaatcattgggctggtcatggtggctcatgcctgtaatcccagcactttgggaggctgaggtgggcggatcacctgaggtcaggagtttgagaccagcctgaccaatatggagaaaccccatctctactaaaaacacaaaattagctgggcgtggtggtgcatgcctgtaatcccagctacttgggaggctgaggcaggagaatagcttgaacctgggaggcggaggttgcagtgagccaaaatcgtgtcatcgcactccagcctgggcaacaagagcgaaactccgtctcaaaaaaaaaaaaaaatcatctagctcacattttctccttgtcttcttcctattagaatttaagttcaatgagattagaactctctctctctctcattctctcatatatcccaagcatctaaaacagggattgaaacatagtaagtactcaataaatgtttttgaataaatgaatgaaggatagctgggcgtggtggctcatgcctgtaaccccagcactttgggaagccaaggtgggtggatcactggagctcaggagttcaagaccagcttgggcaacatggggaaaacccatctctacaaaatatggaagaattagccgggcatgacagcacactcctgttgccccagctacttggagggctgaagtgggaggatcgcttgagcctgggaagcagagattgcagtgagccgagatcaagccactgccctccagcccgggtgacagagtgagaccctgtctcaggaataaggatagatatgaagaattcgtcagatgccttgttgaaaacatcatacattgtctacatggaattcctccatattgtaaaatgaatctaatttataccaacaacgtttggcttttttgcagaaaaggaagcaaatgagctgatggaagatctgtttgaaactgtgagtaatgatcctcaagtgagaacatgggattgtaagttggttctccaacaaaatgtgtcctttgatctctgtgatgctccttctagaagagggactgaaccaattctccttttagtctacctgggaaagaatataatgacaaaagaaatttgctaactgctagactcttgattatccacatgtaggttattcttactaaaattttccttgaagctttttttttttttttttgaggcaaagtcttgctctgtcacccaggctctggagaatacagtggtgaaatctcagctcacagcagcctcgacctccagggctcaaaacaattctctcatctaagcctcctgagtagctgggactacaggcacacacctacaggcccggctaattattttatttttttgtagagacagggtcttgccatgttctggaactcataggctcaagtaatcttcctgcctcaacctcccaaagtgctggaattacaggtgtgagccagcacatcttgccccttgaaaacttttgatggcttcccctactgtcatttggtgtgtccttaaagattgccaactagttttaaagtattttgcacacaaataattaccttttccataaatttgtctaaaaagatatttctgtttaagaaattgatcattttgagttatcctagctctgtgcttactgatacaagttgactggttgagcaacttctttcctggcataatagtcattccatatgtgggtttgtaggagtcctgaagtgagaaaggttctgatgtaggctctttctgggtgccagcattattaaagtattgtttatagttttcacttttccttcccaacactggagcaacattcaaaagcccattccccaggaaaaccctccctttcctttgcccacagttccaagatgagatgggattctccaacatggaagatgatggcccagaagaggaggagcgtgtggctgagcctcaagctaactttaacacccctcaagctctacggtaggctagttgaagaccttgagatttggaatagaggaagagtttatttctgaaaaggttttcagaagttgcagttaacaatttttcatccccagccagcttctgttactgatgtaaggatgcagagtcctgtcaggagttaggtgtcaagtgaagtctccttgttatggggcagtgcagctgtaggccaagctgtatctgtttgggaagggagaaaaaacagtagctggcatccatatccacttctccgggtgagtggtgctggagaggtatgtaggactcaatgtggccagccacacaaactaccctatattgtaatatccagtctgtcccttttgttctttttatgtgccattaatatctgctaaatgtgactgaaaatttgttagtcacctaggcattagtggagcaaaccctgaagcacctgcagtaaggagtctgaaacatacgtgctgacctttttgcctaaagttggcacttgtgttacagcatccagaaagtagaggctttaattttttcctcattttgtggtggatttgcatctgcactttattctgttgtagcagcatataatcattaggtcgatggcgagaggtcaggatgcagtttgtgccataagtggaacaaagcaaagagaatagtccctgtaattagtcctgtgtttgaacttaacagcactactaagcagagagcttgggttccatctgaaagctagacctttagggattttccaatttagtgaaaaaagataagataggccaaccaatgtcttaaaaactagaactactagtcattctccattacaacaaatatcacaatacaactacatcaaaaatctcaagattgctaagtcagtatttgacccattattttaatttatagttcatagaacaaaattctggtatagcagaatggaaccattcatcctgggaacgtataataggatctgattaataaatattttggttttgctgatcaactctttataacttcttaaaatttggaaaatatagaactaatttaaaattcctgttagaatccagttaccttctggtattcaatggaatatagtcatatatcatctcatggtcataccctctgtgaaatctatcattaaacgattcatcattgtgtaaacatcgtagaatgtacttacataaacctaaatggtttagcctactgcatacctattgctcccaggctacaaaacctgtacagtgtgttactgtactgtactgaatactgtaggcagttgtaacacaatggtaagtacatatgtatgtaaacatagaaaaggtacagtaatcttatggagccacctctgactatgtggttcgttattgactgaaacattctgtggcgcatgactgtacttgggcagcttctgcttctctttcgattgcaaatacaaacctgtttttgttttaatctttgactaaataaaaatccctctgtaagtccatagagagtaagcacatcttaaaacacaataaggaagagagaggagaaaaagacagtcaaaacaaaaactctggggcttcccttatcaattacctaaataatccttgttaaaactaagtgcaggctatgtttccattttctacttttttatgcttcttctcttctgttccttcagtggtggtagcgcggatgttcaaattttcagttctcagtaaagattgtatagacagtcccacggtcttcaggtttttactctgtgctacccaaacctacagtaaatactataaaagaaaacttattcaaacgtaatctttatctgcaaaaactattgaaaaacgttaccatttaactattgctgtaatatagggggttccttgaaatatgataacctgcttgttatagctacttcagcagatcttatcctgttgcatagggtatcagcatatgcttaatcatttaggtatattattctccctttatttctttctatgtaaacatagaaaaggtatagtaatcatacatagaactgacatgctaggtattggaatttttgcttcagccctgcaaacaatctttcaggagggtatggatgggaagttagggttaggaaccttggaagaggaatttaaagggctaaaagaagatagccttcatggataatattttaactaacttctccgttctgttcatttgaactaccatgtacttcagttattttggtatatccttttcctgcttcatgctagaaagtctttgacttgttaagaaagcagggcagtgcagcctgagtagataggataatgggacaagctggacctgggatgggagtaacatcccagggagtaacaagtaatgagagaagaaatgagaatgatgagttcccaccagctccttggctgctttcttacccatatatttctctgtccctagttttttgtttaattttttcttcatttgtatattatttggaagaggaattgtagaggaatgggatggggtgtaatacagaatcatttgatgcatgctaactactttgggaaaagatttgtgtaaggctgggagtttgactgttggctaaagtgaaaaggggggattagtagggaatgaaaattgttcaggctctttgctcatcattgcaaagaattggatgtgttgtggacctaggaaaacactcaaattcagtcatccccgtttgggataggtttgaggaactactggccaacctactaaatgaacaacatcagatagcgaaggaactatttgaacagctgaagatgaagaaaccttcagccaaacagcagaaggaggtagagaaggttaaaccccagtgtaaggaagttcatcagaccctgattctggacccagcacaaaggaagagactccagcagcagatgcagcaggtaacactttccttggtcatattaatattgaattataccaaggcctaactctgaggctttggtataatctaaaattagcagctttgtaaatgtcagagatagttaccttactacgtattaaaaccgtagtatcttcacatcagttaggagcttgagaagtcatcatgttcatgtcctgtggctcagggaagacagcacataaggaccctaatggtattcggaattacagatttcaaagagtcctcagtaatctattctgaaatttaaccttcactgtgacaagtagttttttttcccttttcccttttcttttttcttttttttttgagacgtagtctcgctctgtcacccaggctggagtgcagtggctcaatctcagctcactgcaagctctgcctcccgggttcacgccattctcctgcctcagcctcccgagtagctgtgactacagggactcgccaccacacccagctaattttttgtatttttagtagagacagggttcactgtgttagccaggatggtctcgatctcctaacctcgtgatccacccgcctcggcctcccagagtgctgggattacacgcgtgagtcactgcgcccggccttttccttttctaatctcagttcctcctctgtttagaggttaaacttcctctggttctgtcattttgttcaagggaacatgtctgagaaatttatgccaagatcctacgttgttctcacactctttgcagaaagcaaaatttgtgtcataaagttgcaaacatcttagttaatgactctctggtggctgggtgcagtggctcacacatgtaatcccagcactttgggaggctgaggtgggaggattgcttgagcaggggagttcaaaagcagcctggacaacatagtgagactctgtctctacaaaaaataaaaataaggctgggcacagtggctcacacctgtaatcccagcactttgggaggccaaggcgggtgaatcatgaggtcaggagtttgaggcaagcctggccaacatggtgaaaccccgtctctacgaaaacaaaaaattagctgggtgtggcggcgggcacctgtaatcccagctactcgggaggttgaggcaagagaatcacttgaacctgggaggcagaggttacagtgagccgagatcacgccattgcactccagcccaaaagtcagtgcgagactctgtctaaaaataataataataataataataaaataaattagccaggcattgtggtcacagctacttgggaggctgaggtgggaagattgcttgagcacaggtggttgagagggcattgagtcatggttgcaccactgcactccaagctgtgtgacagagcaagaccctgtctccagggggaaaaaaaaatatctctgggctcctgaaatggcagtgtcataacatatcactgcattattttctttctctccccagcatgttcagctcttgacacaaatccaccttcttgccacctgcaaccccaatctcaatccggaggccagtagcaccaggatatgtcttgtaagtttccaaattgccgtaattctatagactagaatataaaattagcttggcaggttatttctcacagttattctctcaggtatttttgattgctgtggcttcctatgtttgctgagtgaacataagccactgattcacatgaaaggacaaagagtgtattcaattttttcttttcttttttgagacagggtcttgctctttcacccaggatggagtgcggtggaacaatttcagttcactgcaacccctgcctcccgggttcaagtgattctcctgcctcagcctcccaagtagctgggactacaggcgggcaccaccacgggtaattttttttgtatttttagtagagacagggttttgccatgttggccaggctggtctcgaattcctgacttcaagtgatctgcccacctctacctcccaaagtactgggattacagccatgagccactgcgcctggcctgtccttctgatatttttattgggtcctcctcctcatctttagattcaccctgacttcttaggtttttggtaccgctattcatttcatagatgttgaggctgggcatagtggctcacacctgtaattccagcactttgggaggctgaggtgataggatcacttgagcccagtggtcaagaacagcctgggcaacatagtaagacccggtctgtgttttttttgttttgttttgttttaatttaaataatgaagtaaatatacatgtagatgttgaattcattatccattcatgaagctcaatattagtgttttatgtgtagagctagttttgctcatgacgttttgaggtattttgagctttttttttttttttttttttttttgagacggagtctcgctctgtcgcccaggctggagtgcagtggcgggatctcggctcactgcaagctccgcctcccgggttcacgccattctcttgcctcagcctcccaagtagctgggactacaggcacccgccactatgcccggctaattttttgtatttttagtagagacggggtttcaccgttttagccgggatggtctcgatctcctgacctcgtgatccgcccacctcggcctcccaaagtgctgggattacaggcgtgagccaccgcgcccggcctattttgagattttaaatttgaaatttggccaggtatggtggctcatgcctgtagtcccagcactttggtaggtcaaggtgggaggattgcttgagcccaggagtttgagaccagcctgggcaacatagtaagaccccatccctaccaaaaaaataaaaaataaaaaaattagctggggatggtgccgagtgcctgtagtcccagcaacttgggagactgaggtaggaggatcacttgagcctgggacgttgagactgtagggagccgtgcttatatatcactccagcctgggtgacagagtgagaacctgtctcacaaaaacaaaaccatactttacctcataaaaattgcctcaaacttttggacaggtaatgataatactctcagcttcttcagtaagtcttctttggattttgaagagtacatttgctagtattctaaaacttccttggtgatcaacaggatgtcttcatctcttactgtattcagaggaggatgaggagtacttggttgtaggcattattctgagaccaaaagacaaaacaattttaaaagtaatggtcctggtcgggtgaggtgactcatccctgtaatcccagcactatgagaggccgaggcaggcggattgtgagcccaggagttcgagatcagcctggccaagatgggaaaacgctgtctctgcaaaaaatacaaaaatcagctaggtttggaggtgtatgcctatagtcccagcttctcaggaggcagtgggaggatggcttgagcctgggagggggagtttgcagtgagctgagatcatgccactgcagtccagcctgagcggcagagtgagaccatgtctcaaaataaattaattaattaaattaaagtaatagtccccattcttgagactcttaattctagctcgggagctagaccatgtattccttagtgagaaacagtttaaaaataaaacaagaatataatccctgaatatctgagaactcaggcataatcttaacagtagtttattgtgaaagactttatgattatttttacctgtttttatcctgtagtaggaaggtcagcttctcatttagattctgaaggctattggtattaattgtctggaattgtcttagatcttccttgtgtcgtgttttcccagaaagagctgggaacctttgctcaaagctccatcgcccttcaccatcagtacaaccccaagtttcagaccctgttccaaccctgtaacttgatgggagctatgcagctgattgaagacttcagcacacatgtcagcattgactgcagccctcataaaactgtcaagaagactggtaggagacagatgtgtcagctttaagtttttacttgcggtgagaggtggtgggaatcttatcccatagataacttcctaggatacttgcctaggaatggaggacacaggacatttgtaatttcttccttctctcttttatcctccctttgtactcattatccaagttctagaattacatgataatctccgggcctgggtaaggcatggaggcagtggacagtataggaatatgggaggtagagatctgaggctcagtgctaagaattggactacagcaatatgaggggtaagtattaggaatcagatcaagataaactggggcctggtaaagatgaaagtcaggtggtaaagttcggtcatgtttagctttttattctcttcattaagatcaactaactttatttaccataatgattgtagcataggtgatatctccattctgaatgaaatgttgacttgcaagttaggcgtaaattagagattgtacatttgccgtgttcagtattttaaagaaatttgccggtttagattctaccttgcattggtttagtattttttgagaaaatatttgctatttacttaagccaaatatttacttctgatttgtttgctgacttagcaaattagttgtggtttgttctggatttgggtttgtctttggattctattttaaatccctaagtcttatcattacattgaatgtagttgaatttaagtgtactatatcatagacacagatcccaaactactttaatagctatattatatgaaatggtaatgaaaacgtgatttaataccaaattatagtattatcttacacatctagtgtcctgtgtttttcttctggagatataaaaatgacacttatggaaggagaaatatggatatagtagttttgtctctagaaatgcagaggtgcctaaaattgagaggctgagagagggagacagaaatgaatgagactgaattgtctcattccttttatggttcttttgttcccaacctcaggaggaatctgggagaacttaatgaaagttaagaaagaatgaaataaaagtaaaatttggaataccaggtttgtgagggagattaaagaagttggaatcttttttcttttttttttttttaagatggagtctcgctctgtcacctaggctggagtgcagtggggtgatctcggctcactgcaacctccgcctcccaggttcaaacaattctcctgcctcagcctcccaagtagctggaattacaggtgcgtgccaccatgcctggctaatttttacatttttggtagagatggggtttcactatgttggccaggctggtcttgaactcctgacctcaggtgatccacctgcctcggcctcccaaagtgctgggattacaggcgtgagccagcacgcctggcctggaatcttatcctggaagaaaaaagcattgttgaaggtctgttatccttcagagatttaaaggggaaaggaggtaaaacatttttgagcatacactatgtgacaggtattactaggtactttttaagtgtttgttttactttgtgaataaagtgttacacgtaagaaagagtaagagaggccgggcgccgtggcttacgcctgtaatccaacactttaggaggccgaggctgtcggatgacaaggtcaggagatcaagaccatcctgtctacagtgaaaccccgtctctactaaaaatacaaaaaatcagccaggcgtggtggcaggcgcctgtagtcccagctactcaggaggctgaggcaggagaatggcctgaacccgggaggcggagcttgcagtgagccaagattgcgccacgcactccagtctgggcgacagagccagactccgtctaaaaaaaaaaaaaaaaaaagtcaacttttattgccagtgaatgggactccctttagacctaatgttagttgaggaaagactgtggaaactctttggggagtggtaggcagatgggagggaatcaagttagataaggacagctctacctaaatgcaaaaatgcattcacaggctttttgaagccctcttttttcctagaagttgatttatcagagatttattttcttatagccaatgaatttccctgtttgccaaagcaagtggcttggatcctggccacaagcaaggttttcatgtatccagagttacttccagtgtgttccctgaaggcaaagaatccccaggataagatcctcttcaccaaggctgaggacaagtaagtgtttactctgggggatcaaatatcccaaggagaagatgtagttcctttgaggagtttaggggaagtaagacttgtataataagacatggacacaaaaggaaaagcagtatagatgagcagagtcctctagaacgtgcttgttctagcagtgccaaatactgctttttggggggatgttacacacatttttaaaatgttttagactggacatggcggctcccacctgtaatcccagcactttgaaaggccaaggcaggaggttggcttttctaatgttattatttatttagagacaggatcttactctgtcacccaggctggagtacagtgttgcaatcacagctcactgcagccttgaactcctgggatcaagtgatcctcctgcctcagcctccatggagtagctgggaccacaagcgtgtgccaccatacatggctgattttttttgtacaggtgagggtatctctgtgttgcccaggctgctcttgaattcctgacctcaaatgatcctcccactcctggcctcccaaagtgctgggactataggcataagccaccacacccagctagattatgaacatttttatggccctttgtgtgtattgccacactgttaacagcaaatatgtatatatgtaaccatgattatatatgttatgttagagggtagtattggtgccagtttaatttgtctgacggggtacctattattcattttatatttgttttattagaatcattctccttcccatgtattctctttgaacttcctttgtgttgttaatatacagctcatcatgatctgacatttattgatgatttatgactagtttctcttgctcctacttaattgtgaactatttgattcttattcatagtacttaatcactactcactaaatacctgaaattttctactgagtagtcaccaacttgtagtagtcactacaagaattagttgtagaaaaagtagattggccagccatggtggctcacacctgtaatgacgacactttgggaggccgaggcaggaggatcacttgaggccagaagttcaagatcagcctaggcaacaaagtgagaactggtctctacaaataatgaaataaaacattagttaggcatggtagcaaacgtttatagccacagatactcaggaggctgaagtgcgggaatcgattgaacccaggcattcaagactgcagtgcactgtaatcatgccactgctctccagcctggacaacagagcaaaaccctgtctgaaaaaaatgaaaaagtagattgggccacacgccatgggctcatgcctgtaatctcagcactttgggaggctgagactggagaatcgcttcagcttaggaagtagcagctgcagtgggctgcgatcacgccactgcactccagcccaggtgacagagtgagaccttgttttaagaacaagtaagaaaaagtagattgtaaaatgtgttagtctggggaggccctttagaaggaaggactgtgaagtgagatttagtgttattgctcctttctcagtttgttagctttaggactgaagcattttgaagggactgagtttcttaaccctctaatcagcaagtaccttctaacctgcaagactgcccgccaactgacagtgagaatcaagaacctcaacatgaacagagctcctgacaacatcattaaagtgagtgtttcctgcatgcactatccaggcacctcaccaacacatatctgttcttttctcttgttattctcaaagaaaagaagaaccttcttttatctaaagctaatttctcctacttatatactagattaattcccctgttgccttttcagggacattgattcattcattacgttcctctggagtatcttcatcctcttaaaagattccacaaatccatgtttccctgtaataattctctttcttgaactttctagaaatgatatgcagtattccacttacatgctttgggtttttgttttgttttgtttttttggtcagacataatcttgcactgtcacccaggctggagtgcaggagtatagtggcatgatcttggctcactgcagcttccgcctcccgggttcaagtgattctcctgcctcagcctcccaaatagctgagattacaggcgtgcccaccacgctcagctaattttttgtatttttagtagatacgggtttcaccatgttggccaggctggtcttgaacttctgacctcaagtgatccaccagttttggcttcccagaggctaggattgcaggcataagccaccgtgcccagcctatatactttttctcaattttgtgtttgtatgtatgcatgtatgtgtgtgtgtgtgtgtgtgtgtgtttgtgtgtgtctgtgtctgtatgtatgtatgtatgtatgtatgtatgtattgagatggagtttcgctcttgtcgcccaggcccagcctatatactttttctcaactctttttacttattgattgattgattgagatggagtctcgctcttgacccccaggctggagtgcaatggtgcgatcttggctgactgcaacctctgcctcctgggttcaagtgattctcctgcctcagcctcccttgtagctgggattacaggcccctgccaccatgcccagctgatttttgtatttagtagagtcggggtttcaccatgttggccaggctggtctcgaactcctgacctcaggtgatccatctgcctcggcctccctaagtgctgggattacaaatgtgagccattgcccccagccttcttttttatttagatatttatttatgtttttttttttttttagagacaggttctcactctgtcatcctggctggagtgcatgggcacaatcataggtcactgcaacctcaaattcctgggtgatccttccacttcagccttccaagtagcttggactacaggtgcatgccaccaaggctagccgattattttattttgtgtgaagacagggtgtcattttgtttcccaggctggtcttgaagtcctgacctcaagcagtcctcttgcctcagctcggcctcccagagtgttgggattacaggcgtgagccatgatgcccagcctttggtttcattgtgtttttgtatttttcttgagacaaggtcttactctcctgcctaggctggagtacagtggtatagtcatagctcactgcagccttgaactcctaggctcaagcattcttccaacgtcagcctcccaaggagctgggattatatgcattagccactgtgcttggccattaaatttatttatttatttattttattttatttttttgagacagaatctgtctctgtcacccaggctggagtgcagtggcacaattttagctcactgcaacctccacctaccgggttcaagcaattttcatgccttagcctcctaagtagctgggactacaggcatgcgccaccacacctggctaatttttatatttttagtagaaacataatttcaccatgttggtcagtctgatcttgaactcctgatctcaggtgatctgcccacctcggcctcccaaagtgctggaattataggcgtgagcctctgtgcctggcaaaaaactttttttttttagggatggggtgtccctatattgcccaggctggtcttcaatttttggccttaggcaattctcctgtctcagcctctaattggtactgcctggtgtattggatttaggccttacttattaaccataaaccacggaagccgaagatttacctctctcctcactcccttactcccaccacaaacatgcacattttctgctctccaaactcctcactagtagttatggtagaattttggttagattgtattcagggtttacattgtaagattttaaggactgttggctgggcgcggtggctcacgcctgtaatcccagcactttgggaggccaaggcaggtggataacgaggtcaggaaatcgagaccatcctggctaacatggtgaaaccccagctctactaaaaatacaaaaaactggctgggcgtggtggcgggcgcctgtagtcccagctactcgggaggctgaggcaggagaatggtgtgaacccgggaggtggagcttgcagtgagccgagatcgcgccactgcactccagtcttgccagagcaagactccgtctcaaaaaaaaaaaatagattttaaggactgtataaatgctcttcacagctcagctatgttactgtgttaccttgcctttcctgctgaacattttgtttcccagatcatcttctttcagtgtgttcaggtattctagatattctgtcactttcatcttgaagaaattgctccctgagccctctgacattattccactttaagcgtgttgctctccatgttgctgcactgatgtcttcttgggctttttcttcaccatcatcccaggaattccttttgcctcatactgtgttagatcctcttatttcctgaattccacatctttgcttttgcattactttttttttttttttttttttttttgagacacagagtcttgctctgtcccccaggctggatctcggctcactgcaacctgcaaccttggtcttggtcttgaactcctgacctcaggggatccacccacctcagcctcccagagtgcggggattacaggcgtgagacaccacgcctggccttgttttttgttttgttttgcttttttttgagaccgagtctcgctttgttgcccaggctggagtccaaaggcgcgatgatcttggctcactgcaacgtccgcctcccgggttcaagcaattctcctgcctcagcctcccgagtagctgggattataggcacatgccactacgcctggctaattttttgtatttttagtagagacagggtttcaccatgttagccaggatggttttgatctcctgacctcttgatccacccgtttcggtctcccaaagtgctgggattacaggcgtgagtattacttctttactttagtggaacacattctagtagcttttttttaaaaaaaatttttttctgaattttaaaaaattgaggtgggggggtctcagttttttgcccaggctggtctcagactcctgggttcaagtgatcctcctgcttcagcatcccaaagtgctgagattataggcatgagccaccctgcatggccccattccagtagcatcctgagggagagtgcttgggaagggaattttcacatttaaaccatctccggggccgggcgcagtggctcacgcctgtaatcccagcactttgggaggctgaggcgggtggatcacgaggtcgggaaatcgagaccatcctggctaatgtggtgaaaccccgtctctactaaaagtacaaaaaaattagccgggtgtggtggcgggcgtctgtagtcccaggtactctggaggctgaggcaggagaatggcgtgaacctgggaggtggagcttgcagtgagccgagatctcgccactacactccagcctgggtgacagagcgagactccgtattaaaaaaaaaaaaaaaaaaatctccattcatggtcttttgattgtatcgatgtcagtttcctcgtttttgtttttgttttattttttttctttttttgagacagagtctcactgttgctcactgcagcctctgcctcctgggttcaagcgattctcctgcctcagcctcctgagtagctgggattagccaccacacccagctaatttttgtatttttagtagagatggggttttgccatgttggccaggtgatctcgaacccctgacctcaagtgatctgcccaccttggcctcccatagtgctgggattacaggcatgagccaccacatcctccatgtctggccagtttcctggtagtaatattgtactgtgtaccttgtttatatgtatagctcttgtttctatgtaacataaaaacattatattgggagaaactggttgaagggtacatgggacctcttggtactattttttgcaatttcctatgaatataattatttcaaaataaaaggaaaaaataatactctcctctgtcactgtatctagaattctagataggaaataatttttttaagaagcttttaagggcctcacttcattttcttctaactcctagtgtggtgttaagaaatttcatgccatttaactttttttttttttttccgagacagggtcccaccctgttgcccagtttggagcgtggctaaatcatggctcactggtgtctccaacccggtgtgcaccactatgcccagctaattttttttttttttttttttaagacatggtctcgttatgttggccaggctggtctcaaactcctggcctcaagtgctcgtcctgtcttggcctcccaaagtaatgggattataggcatgagccatggccccatttaactcttgagtctttgtgtaacacctgtttttctcaacctctgacagcatgcaggatttttcctttggcttcaatattttgaaaatgcatgataatatgccttagtatttgtctatttttatccatggttttttaaaaagtactttctttttgtttttgtttgtttgtttgttttgagacagagtctcgctccattgcccaggctggagtgcaatggcgtgatcttggctcactggaacctctgcctcccaggttcaagcaattgtcctgtttcagcgtcccgaggagctgggactacaggcgctcaccaccacaccctgctaatttttgtatttttagtagagacggggtttcaccttgttggtcaggctggtctcaaactcctgacctcgtgacccacccacctcagcctcccagagtgctgggattacaggtgtgggccaccatgcctggcgtatccatggttttaaggcacacgtgataaaccttattcttctgcagaaataatttttttttttttttttgagatggagtctcactctgttgccaggctggagtgcagtggcgtgatgtcggcccactgcactctccacctcctgggttcaagtgattctcgtgcctcagcctcccgagtagctgagattacaggcacgcgccaccacacttagctaatttttgtatttttagtagagatggggtttcaccatgttggccaggatggtcttgatctcctgaccttgtgatctgcctgcctcggcctcccaaagtgctgggattacaggcataagccaccacgcctggccagaagtaatttgtgtttaagttttagttttgtgtcatttttcgtgcacacctttgtacttttgttgggggatggggcggggtgtcggggttggagtcttgctctgttgcccaggctggagtgcagtggtgcagtcttggctcactgcaacctcttaattcctcagttcaagtgattctcctgcctcagcctgccaagtagctaggatcacaggcgtgcaccaccacacccagctaatttttttttgtactttattagagacagggtttcgccatgttggccaggctggtcatgaactcctgacctccagtgatccatcctcctcgttctcccaaagtgctggcattacaggcatgagccaccatgcccagccctttgtacattttttaatgtaggatgccatttgtccacttgactctcccactagtctgtaagctccatgagagcaggaattgcttcccttatgtgtgtgcttagcttttagcacagtgcctaggatatagaaaacatcttatgttcatcatgttggatgaacagatgcttattgtcatggtttaagttcagttcttatcttctttttttttttttgagatggagtctcaccctgttaccaacgctggagtgcagtggcatgatcttggctcactgcaatctccaccctaccacccccactgccaggttcaagcgattcttttgccccagcctcccaagtaactgggattacaggcacccaccaccacacccagctaatttttgtatttttagtagagatggagtttcaccatgttggccaggctggtctcaaactctcaatctcaagtgatctgcccgcctcagcctcacaaagtgctgggtttacagatgtgagccaccaaggccagcctatttactcttaaaactgaactgcctcggtctttttttttttccttcccttctgatgcccttcacaccatcatttgcttaaagtctttgatgtgtccattttatagattacgatgctgtctttgcagctgttgagcaggaacaaatcttacataagattgctcttagcatctgcttccttttctctctgtgacctaaactctccccttcctggcaaccagaatggagatcatcagttagaaaatattgaatagggctgggcgcggtggctgacgcctgtaatcctagcactttgggaggccgaggcgggtggatcacgaggtcaggagatcgagaccatcctggctaacacagtgaaaccctgtctctactaaaaatacaaaaaaatcagccgggtgtggtggcgggcacctgtagtcccagctactccggaggctgaggcaggagaatggcgtgaacctgggaggtggagcttgcagtgagcggagatcgcgccattgcactccatcctgggcgacagagcaagactccgtctcaaaaagaaaatactgaataactataaaatctttaaatagagattagtttaatttgaaatgtacaagtattcagcatatgctattcgtatatgtgtgttcatggatgtttgtgtatgtggtcttgtgtgtgtgtgtgtgtgtgtgtgtgtgtgtgtgtttctcttgatccaccaccaccccattcaccagcctgacagaagacagtgtttccagaaggaatgtaattcatgcgcatttttttcatgttaagttttataagaagaccaaacagctgccagtcctaggaaaatgctgtgaagagatccagccacatcagtggaagccacctatagagagagaagaacaccggctcccattctggttaaaggtacagccctcttcctcgaagtctgtaggaggcagaaggtcactgaaagttctgagagaatatcaaggacttccttaatcgtctaatgctttagttgtagaactaggacttcaggaatcttcctgattcacctttcttcccttacttttctgcccttctccgggtgattctacaacattttcaaaataatgggtaaaatggtaatttgctaaaggaaattcagagaagagtttctaaagtgtataattggactgtggtctttgtagaaatttcatatgcagagtcccttggaaagatgccttgagcttgtctcaggtccctaaacttagaaagtcctattctttttcccaaattctgacatgtgctggatcagagtgttctcatttccaataggccagtctgccatccatccaggaagaactgcggcacatggctgatggtgctagagaggtaggaaatatgactggaaccactgagatcaactcagatcaaggcctagaaaaagacaactcagagttggggagtgaaactcggtacccactgctattgcctaagggtgtagtcctgaaactgaagccagttgccgaccgtttccccaagaaggcttggagacagaagcgttcatcagtcctgaaacccctccttatccaacccagcccctctctccagcccagcttcaaccctgggaaaacaccagcccaatcaactcattcagaagcccctccgagcaaaatggtgctccggattcctcacccaatacagccagccactgttttacagacagttccaggtgtccctccactgggggtcagtggaggtgagagttttgagtctcctgcagcactgcctgctatgccccctgaggccaggacaagcttccctctgtctgagtcccagactttgctctcttctgcccctgtgcccaaggtaatgatgccctcccctgcctcttccatgtttcgaaagccatatgtgagacggagaccctcaaaaagaaggggagccagggcctttcgctgtatcaaacctgcccctgttatccaccctgcatctgttatcttcactgttcctgctaccactgtgaagattgtgagccttggcggtggctgtaacatgatccagcctgtcaatgcggctgtggcccagagtccccagactattcccatcgccaccctcttggttaaccctacttccttcccctgtccattgaaccagccccttgtggcctcctctgtctcacccttaattgtttctggcaattctgtgaatcttcctataccatccacccctgaagataaggcccacatgaatgtggacattgcttgtgctgtggctgatggggaaaatgcctttcagggcctagaacccaaattagagccccaggaactatctcctctctctgctactgttttccccaaagtggaacatagcccagggcctccaccagtcgataaacagtgccaagaaggattgtcagagaacagtgcctatcgctggaccgttgtgaaaacagaggagggaaggcaagctctggagccgctccctcagggcatccaggagtctctaaacaactcttcccctggggatttagaggaagttgtcaagatggaacctgaagatgctacagaggaaatcagtggatttctttgagctaggagaataagagtctggagactgggagccttcacttcggcctccgattggtggcgcatagggtgtaaccaataggaaacccctaaagggtacttaaaccccagattttgcaactggggctcttgagcagcttgctttagcctgctcccactctgtggaatatacttttgcttcaataaatctgtgcttttattgcttcattgtttca

SEQ ID NO: 14983 - DNA, 2682 bp, Homo sapiens
aacgatcccagtgtcggttgcgggatccgcctcctctcagtttgcccctttagccctccacctttcccttctcctctctcgcatttccgccagtcggcttacccgctggccgcctcctgacaagcgggagggatccgcggtggacccagggaagcggaggagcctggcggccaccccctcttcctcacttccctgtactctcatcgctctcggcctccgacacgaaaaggaagcaaatgagctgatggaagatctgtttgaaactgtgagtaatgatcctcaagtgagaacatgggattttccaagatgagatgggattctccaacatggaagatgatggcccagaagaggaggagcgtgtggctgagcctcaagctaactttaacacccctcaagctctacggtttgaggaactactggccaacctactaaatgaacaacatcagatagcgaaggaactatttgaacagctgaagatgaagaaaccttcagccaaacagcagaaggaggtagagaaggttaaaccccagtgtaaggaagttcatcagaccctgattctggacccagcacaaaggaagagactccagcagcagatgcagcagcatgttcagctcttgacacaaatccaccttcttgccacctgcaaccccaatctcaatccggaggccagtagcaccaggatatgtcttaaagagctgggaacctttgctcaaagctccatcgcccttcaccatcagtacaaccccaagtttcagaccctgttccaaccctgtaacttgatgggagctatgcagctgattgaagacttcagcacacatgtcagcattgactgcagccctcataaaactgtcaagaagactgccaatgaatttccctgtttgccaaagcaagtggcttggatcctggccacaagcaaggttttcatgtatccagagttacttccagtgtgttccctgaaggcaaagaatccccaggataagatcctcttcaccaaggctgaggacaacaagtaccttctaacctgcaagactgcccgccaactgacagtgagaatcaagaacctcaacatgaacagagctcctgacaacatcattaaattttataagaagaccaaacagctgccagtcctaggaaaatgctgtgaagagatccagccacatcagtggaagccacctatagagagagaagaacaccggctcccattctggttaaaggccagtctgccatccatccaggaagaactgcggcacatggctgatggtgctagagaggtaggaaatatgactggaaccactgagatcaactcagatcaaggcctagaaaaagacaactcagagttggggagtgaaactcggtacccactgctattgcctaagggtgtagtcctgaaactgaagccagttgccgaccgtttccccaagaaggcttggagacagaagcgttcatcagtcctgaaacccctccttatccaacccagcccctctctccagcccagcttcaaccctgggaaaacaccagcccaatcaactcattcagaagcccctccgagcaaaatggtgctccggattcctcacccaatacagccagccactgttttacagacagttccaggtgtccctccactgggggtcagtggaggtgagagttttgagtctcctgcagcactgcctgctatgccccctgaggccaggacaagcttccctctgtctgagtcccagactttgctctcttctgcccctgtgcccaaggtaatgatgccctcccctgcctcttccatgtttcgaaagccatatgtgagacggagaccctcaaaaagaaggggagccagggcctttcgctgtatcaaacctgcccctgttatccaccctgcatctgttatcttcactgttcctgctaccactgtgaagattgtgagccttggcggtggctgtaacatgatccagcctgtcaatgcggctgtggcccagagtccccagactattcccatcgccaccctcttggttaaccctacttccttcccctgtccattgaaccagccccttgtggcctcctctgtctcacccttaattgtttctggcaattctgtgaatcttcctataccatccacccctgaagataaggcccacatgaatgtggacattgcttgtgctgtggctgatggggaaaatgcctttcagggcctagaacccaaattagagccccaggaactatctcctctctctgctactgttttccccaaagtggaacatagcccagggcctccaccagtcgataaacagtgccaagaaggattgtcagagaacagtgcctatcgctggaccgttgtgaaaacagaggagggaaggcaagctctggagccgctccctcagggcatccaggagtctctaaacaactcttcccctggggatttagaggaagttgtcaagatggaacctgaagatgctacagaggaaatcagtggatttctttgagctaggagaataagagtctggagactgggagccttcacttcggcctccgattggtggcgcatagggtgtaaccaataggaaacccctaaagggtacttaaaccccagattttgcaactggggctcttgagcagcttgctttagcctgctcccactctgtggaatatacttttgcttcaataaatctgtgcttttattgcttcattgtttca

SEQ ID NO: 14984 - DNA, 29253 bp, Homo sapiens
gaagaggaggtggagaaggcttgggctcgcgccgctgaaggtacgcgtgagggcctgcgctggagccggcttgacagggtctgagggggagtggagaactgggcgaggaggttcccgtgggtgagcgcgtacgggatggctggctcgcaggacggccgaaggtggtggttggtgggagcagccagcgacgagcccgtagacactcgtacgcgtgcgggctgacgtgcgcgctacatggccggagtcgggcgaagcgggggaccgtggggaagaacgcgaggagggaggagtgggaggttgggggtgtcgctaggcgcccttagctccctccctctggaggagctgccgcggccactctgctgccgccgctgccgccgccattttgggttcgctttgcgaggggaaacgatcccagtgtcggttgcgggatccgcctcctctcagtttgcccctttagccctccacctttcccttctcctctctcgcatttccgccagtcggcttacccgctggccgcctcctgacaagcgggagggatccgcggtggacccagggaagcggaggagcctggcggccaccccctcttcctcacttccctgtactctcatcgctctcggcctccgacacggtgagtagaacgatttgggccggcattcgggcctaagcactctctcagcgattgaatcctgggctttctgggagccactgtcatctcccggacctggacctctgggagagcagtggtgaagatgggggaggggagagcagggagggggatcctgagcctaccgggaagtccctccaggcggggtgaaggggtgtccctgacaggcagactcccggagggggctgggaagtaagcgagtggaggcggagtcggctgtgcccctgacaggttagtttgtgtttgtaggcatgatcggagcctcccccatagtccagtttgtgtgtgtttaattaagggataagagtggtcgaggacacgatcttgagaggggattttacctgtgtgacaaggtctgtggtgtccctgccgcgttgaacggtatgtgggaacgacaggatgatctcagtgttgtacgtttaataaatgtcactggttagtttgtacatggaaagagatgtttttggtctagcagacagatggtctgttggtgtgtagcggctgtgttggtgtgtgtatgtgaggatggcaagtgtttccgtaagagtttgcctttatttgtgtaagtgtaatggagttccccttataagttagcttatttcttgaataaatgttgggaggttccttgcaggttgatatgtgtgtgtattttagggattgggagcccctagttacttgttgggaaagagcggcaatggtagtgttctgtacagcatgtgtctgtgaggtcagggaggggagaaacttggcatagccagttgtggtcttaagaatagtttgtgcctttggttagagtgagttgtgtaaatgtgaagggccaaaatatctttaacagaatcattgctacaaagctgtaaagaatgggtggccttatttgttgtcgcgggtttatagtaatagtttacaatacaataagaaagctctttcagtttctttgtgatactgaatctctgtgaaaatggtaggatgctttcttccattttacaaaataggaaatttaggcataaggagagaacttctccaaggccgcatgttaaattggtgacaaagttggaactgtaactcccatattttcactactactgcagcagtatattcagcataccatggtgcctcaggaagtctttgtcggcaaatctgagtatgctggaaagataggagcacataagactggttggcttgtatttgggggagaccgattgtgtcagatatgtatgtggaacgtagctgtccttgccgagtctgacctgtatgaaatgcatatccatggctatattattttggatttatggaggaagcagagcatttctgacacttaaggttgtatgcgtgagggagaaggctttcacagcttaacttgtaccagagcagctgcatgggtgctgacagcttaacttgaaatctgtgggaggaaggatcctttttcactcattcaacaaatataaccattcaatgaatggtccatgccttgaggtgaggatcatcaaggtgtctctgtaaatagcctggatgcaatctgaggggagttgttttgacggtggtaggtattaagttgagggaggcagtgtggaattaaaaccagagaactgtttttgggtactggtaattgttaatatatgtgcctgtggatgttggaacttcttggctgggctgaaggaatcctttgaaagactgatttcggcagggcgcggtggctcacacctgtaatcccagcactttgggaggccgaggtgggcggatcacgaggtcaggagatcgaatcacgaggtcaggagatcgagactatcctggctaacaggatgaaaccccgtctctactaaaaatacaaaaaattagccgggcgtggtggcgggcgcctgtagtcccagctactcggggaggctgaggcaggagaatggcgtgaacccgggaggcagagcttgcagtgagctgagattgcgccactgcactccagcctgggccacagaggagactccatctccaaaaaaaaaaaaaaaaaaaaaaaaaagactgatttcatgtagtaaggatcccgtctatgaactctatgaatatgaggtaagaatgcatgaactaagccaacttagctgtattcttctggaaaatgggatgtttcttgataggctagattagtggttcttaaaagttttttggggtcacttatccttcagagaatcggatgaaagacactgggccctcaagttagaagatgagcataagcgcaatcacatgatttatatatatgattttaggaacttaaactgtaatgaaatagagccaatttatatttagatctcatttgaaaacctttcattttcattgttcgggtgtgtggatgttagtatgagtttaaggtgaaggagtctatgttagtatttgaacatgttgacaggatccatatttttaatttattctttttatcgtctgcaaacatttctgcagtattagtaaatgactctgtatttggtaaaaagggaagctaatgtcgcacaagtatctatggctttgttctttgtcagtatctttttgttctcaaactctgagaagcgtctttttttcagttttggattgggcctgaggtgatttgaagctcctgtcttggagtttaacttagttataacaaacactgagttaatcctatgcaggagacacaaagataattaatatatggtctctgtgcttgaagagacgctaattttctgtggttgaagagatgctgtgaattgtgtgatagtggcagctctcaaaaggacaaggaagagggaaacatattcctagaagctgaaattttattacccaattgcaaagactttttgtcactacttattcttaggaataaccataaagtgtttattttattctgtatggaactttgtactttaaaaaaatatgttttgtatcatctggtgtttttgtataaaggaactgttggtttgaaaagaaggtaaacatcatttatattccttaccttgttttgggatgtatctctacagtgagtttatgtaaaaaggtcttaatgtcatttttgggtatacatacatgtagaaagccctcctgatataaaatccagtagctatttgacagactacccattaatttattactggaacttaaaaataattactgtacttttaaaagaacaagaaattggtcaggtggggtggctcacgcctgtaatcctagcactttgggaggacgaggcggatggattgtcagagctcagaagatcgagaccagcctgggcaacacggtgaaaccccgtctctactaaaatacaaaaaattagctgcatgtgttggagtgcacctgtagtcccagctactcgggaagctgaggcacgagaattgcttgaaccaagaattgcttgaactgggagggggaagttgcagtgagctgaaatcatgccactgcactctagcctcggcatcagagcaacactctgtctcacaaaaaaaaaaaaaaaagcaagaaatgtaaaaaggtgttttaataggacagattataggattcagtgagataatggagaagttttaggaaaaattgtctgatagtcctttctttctattgacatggcccctgtataagaatgctatgtaaatttgtgaaaagtttaatattttctctaatttttaacgggtagtaggttcatggtgttatttttctcaaaacgtacatgtgatatgtgtgtgtagtgtgcatatatgtgcatgtatgtgtatacaatttctttatttttttaattgagattaggtctcgctatggttttttgtttttgtttttgtttttgagagagagtttcgctctcctcgcccaggctggagtacaatggcacaatcttgcctcactgcaacctctgcctcccaggttcaagtgattctctttcctcagcttcccaaatagctgggattacaggcgcgtgccaacacgccctgctgatttttgtatttttagttgagacagggtttccccacgttggccaggctggtcacgaactcctaacctcaagttctccagccgtctcggccttccaaagtgctgggattataggagtgagccactgcacctggcccaggtcttgctatgtagatcaatctggtcttgaactcctggcctcaagccatcctcctgtcttggcctcccagtttgctgggattacagatgtgagccagcatgcccagctctttttacctgcttaccaaatccaagattttctccaaaatgaactggaatagccttcttactgtgttaattttgccttggtggggaagcctaagtcttggaactaaattggggtggttatgacagttctctttttaaagctgatcagtatttcagtatttcacttgttgttgttttttttgttttgttttgttttttttgagatggagtcttgctctgtagcccagtttggaatgcagtggcaggattttgactcactgtagcctctgccacccggattcaagtgattctcctgcctcaatgtcctgagcagctgggtttacaggcacgcaccactacacctggctaatttttgtattgttagtagagacagggtttcaccatgttagccagtagccaagctgttctcatactcctgacctcaagtgatccacctgcctcagcctcccaaagtgctgggattacaggtgtgagccaccacgcctagccaaacccatctctttcattaaaccacctcattttggttcagaaacaagactgccatgtatgtatttaatgcttattatgtgccaagcactattccaggtactaagatacagtgatggacaaaacaagatcccttctcctctatctcaggacttattaatttgggcattttcattttccaatataggatcttttagtactggtataggattcctgaaggaattcctgaaatataattatttttctgctagagcaaatcaattttgttttttgttttttttttgagatggagtttcgctcttgtcgcccaggctggagtgcaatggcgcaatctcggctcactgcaacctccgactcccgggttcaagcgattctcctgcctcagcctcccaagtagctgggattacaggcattagccaccacgctaggctaatttttgtatttttagtagagacagggtttcaccaggttggccaggctggtctcgaactcctgacctcaggtgatcctccaggctcagcctcccaaagtgctaggattacaggcaggagccaccacgcccagaagagcaaaattcttctgttgacaaaaatttctttcctctgaggaagagacactgtgtgcctgtgttttatccaggaattccattggatagtttgtcctttgggatgtcagtggattaaatcctccattaagaatcaaagtacttggctgggtgcagtggctcatgcctgtaatccctgcactttgggaggctgaggcaggtggatcacctgaggtcaggagttggagaccaacctggccaacatgatgaaaccccatctctactaaaaatacaaaaaattatccaggtgttgtggcaggtgcctgtaatcccagctactctcgaaaaaacagaaacaaaaactctgacatgtagagtatgtagatgtagagaaaaaagtaaaatgattgttgaaaaaaatgtctattttttatcttctaaatagctttgtgtgtcagagatcagaacgctcattttacatgatatcaagaaccagaatgctagatagctagaatggttgttaacttcctagataaccattgtagaggaacacataaggtaaaacaaatgaataaaaattaaaaaaaaatgagatagccaaagatttgaagctctttacccattaacatgataatcatttcgactttgaatatttgtagaacaagagtcagaactcagaacaaagatctctgaggaaataaaaaaaaatcaagctgcctcctaatttctcatttagtctgtcattgggcattgtcaaactgtcaaactatatttagagattctggttttcatctggagacttagtgagttgtgtaatatcttgaatacacatataagatcttgccaggtggggtggctcatgtctgtaatcccagcactttgggaggatgaggtgggaggatcgctggagcccaggagttcaagaccagcctgggcaacatagcaagtccctggctctatttaaaaaaaaaaaaaaaaaaaaatcctcaatgtagaactttaaatttatccttacgtgttacatccagttgatttgagaaaatatgattctgaattttccatcaattggattggcagtccctttcagctttacagctttacatcatctacagatttgttaagtatgttctcttggtcttctaattcactgatggagtttttgaataggtcgggtccaaagatagagtcctatgaaacactgttggaaacttgtctctgtctgtctcttttttttttggagacagtgtcttgctctgtcgttcaggctggaatgcagtgggacggtctcagctcactacagcctctgcttcttggactcaaagagattctctcacctcagcctctcaagtatatgggactatatgcatgtgcgaccaagcccagataaatttttttttagagatatgttgacattttgcccaggttgggagacttgtctcttgattccattcagtattgtgtgggtttggataggccatctaattataaaatcattgggctggtcatggtggctcatgcctgtaatcccagcactttgggaggctgaggtgggcggatcacctgaggtcaggagtttgagaccagcctgaccaatatggagaaaccccatctctactaaaaacacaaaattagctgggcgtggtggtgcatgcctgtaatcccagctacttgggaggctgaggcaggagaatagcttgaacctgggaggcggaggttgcagtgagccaaaatcgtgtcatcgcactccagcctgggcaacaagagcgaaactccgtctcaaaaaaaaaaaaaaatcatctagctcacattttctccttgtcttcttcctattagaatttaagttcaatgagattagaactctctctctctctcattctctcatatatcccaagcatctaaaacagggattgaaacatagtaagtactcaataaatgtttttgaataaatgaatgaaggatagctgggcgtggtggctcatgcctgtaaccccagcactttgggaagccaaggtgggtggatcactggagctcaggagttcaagaccagcttgggcaacatggggaaaacccatctctacaaaatatggaagaattagccgggcatgacagcacactcctgttgccccagctacttggagggctgaagtgggaggatcgcttgagcctgggaagcagagattgcagtgagccgagatcaagccactgccctccagcccgggtgacagagtgagaccctgtctcaggaataaggatagatatgaagaattcgtcagatgccttgttgaaaacatcatacattgtctacatggaattcctccatattgtaaaatgaatctaatttataccaacaacgtttggcttttttgcagaaaaggaagcaaatgagctgatggaagatctgtttgaaactgtgagtaatgatcctcaagtgagaacatgggattgtaagttggttctccaacaaaatgtgtcctttgatctctgtgatgctccttctagaagagggactgaaccaattctccttttagtctacctgggaaagaatataatgacaaaagaaatttgctaactgctagactcttgattatccacatgtaggttattcttactaaaattttccttgaagctttttttttttttttttgaggcaaagtcttgctctgtcacccaggctctggagaatacagtggtgaaatctcagctcacagcagcctcgacctccagggctcaaaacaattctctcatctaagcctcctgagtagctgggactacaggcacacacctacaggcccggctaattattttatttttttgtagagacagggtcttgccatgttctggaactcataggctcaagtaatcttcctgcctcaacctcccaaagtgctggaattacaggtgtgagccagcacatcttgccccttgaaaacttttgatggcttcccctactgtcatttggtgtgtccttaaagattgccaactagttttaaagtattttgcacacaaataattaccttttccataaatttgtctaaaaagatatttctgtttaagaaattgatcattttgagttatcctagctctgtgcttactgatacaagttgactggttgagcaacttctttcctggcataatagtcattccatatgtgggtttgtaggagtcctgaagtgagaaaggttctgatgtaggctctttctgggtgccagcattattaaagtattgtttatagttttcacttttccttcccaacactggagcaacattcaaaagcccattccccaggaaaaccctccctttcctttgcccacagttccaagatgagatgggattctccaacatggaagatgatggcccagaagaggaggagcgtgtggctgagcctcaagctaactttaacacccctcaagctctacggtaggctagttgaagaccttgagatttggaatagaggaagagtttatttctgaaaaggttttcagaagttgcagttaacaatttttcatccccagccagcttctgttactgatgtaaggatgcagagtcctgtcaggagttaggtgtcaagtgaagtctccttgttatggggcagtgcagctgtaggccaagctgtatctgtttgggaagggagaaaaaacagtagctggcatccatatccacttctccgggtgagtggtgctggagaggtatgtaggactcaatgtggccagccacacaaactaccctatattgtaatatccagtctgtcccttttgttctttttatgtgccattaatatctgctaaatgtgactgaaaatttgttagtcacctaggcattagtggagcaaaccctgaagcacctgcagtaaggagtctgaaacatacgtgctgacctttttgcctaaagttggcacttgtgttacagcatccagaaagtagaggctttaattttttcctcattttgtggtggatttgcatctgcactttattctgttgtagcagcatataatcattaggtcgatggcgagaggtcaggatgcagtttgtgccataagtggaacaaagcaaagagaatagtccctgtaattagtcctgtgtttgaacttaacagcactactaagcagagagcttgggttccatctgaaagctagacctttagggattttccaatttagtgaaaaaagataagataggccaaccaatgtcttaaaaactagaactactagtcattctccattacaacaaatatcacaatacaactacatcaaaaatctcaagattgctaagtcagtatttgacccattattttaatttatagttcatagaacaaaattctggtatagcagaatggaaccattcatcctgggaacgtataataggatctgattaataaatattttggttttgctgatcaactctttataacttcttaaaatttggaaaatatagaactaatttaaaattcctgttagaatccagttaccttctggtattcaatggaatatagtcatatatcatctcatggtcataccctctgtgaaatctatcattaaacgattcatcattgtgtaaacatcgtagaatgtacttacataaacctaaatggtttagcctactgcatacctattgctcccaggctacaaaacctgtacagtgtgttactgtactgtactgaatactgtaggcagttgtaacacaatggtaagtacatatgtatgtaaacatagaaaaggtacagtaatcttatggagccacctctgactatgtggttcgttattgactgaaacattctgtggcgcatgactgtacttgggcagcttctgcttctctttcgattgcaaatacaaacctgtttttgttttaatctttgactaaataaaaatccctctgtaagtccatagagagtaagcacatcttaaaacacaataaggaagagagaggagaaaaagacagtcaaaacaaaaactctggggcttcccttatcaattacctaaataatccttgttaaaactaagtgcaggctatgtttccattttctacttttttatgcttcttctcttctgttccttcagtggtggtagcgcggatgttcaaattttcagttctcagtaaagattgtatagacagtcccacggtcttcaggtttttactctgtgctacccaaacctacagtaaatactataaaagaaaacttattcaaacgtaatctttatctgcaaaaactattgaaaaacgttaccatttaactattgctgtaatatagggggttccttgaaatatgataacctgcttgttatagctacttcagcagatcttatcctgttgcatagggtatcagcatatgcttaatcatttaggtatattattctccctttatttctttctatgtaaacatagaaaaggtatagtaatcatacatagaactgacatgctaggtattggaatttttgcttcagccctgcaaacaatctttcaggagggtatggatgggaagttagggttaggaaccttggaagaggaatttaaagggctaaaagaagatagccttcatggataatattttaactaacttctccgttctgttcatttgaactaccatgtacttcagttattttggtatatccttttcctgcttcatgctagaaagtctttgacttgttaagaaagcagggcagtgcagcctgagtagataggataatgggacaagctggacctgggatgggagtaacatcccagggagtaacaagtaatgagagaagaaatgagaatgatgagttcccaccagctccttggctgctttcttacccatatatttctctgtccctagttttttgtttaattttttcttcatttgtatattatttggaagaggaattgtagaggaatgggatggggtgtaatacagaatcatttgatgcatgctaactactttgggaaaagatttgtgtaaggctgggagtttgactgttggctaaagtgaaaaggggggattagtagggaatgaaaattgttcaggctctttgctcatcattgcaaagaattggatgtgttgtggacctaggaaaacactcaaattcagtcatccccgtttgggataggtttgaggaactactggccaacctactaaatgaacaacatcagatagcgaaggaactatttgaacagctgaagatgaagaaaccttcagccaaacagcagaaggaggtagagaaggttaaaccccagtgtaaggaagttcatcagaccctgattctggacccagcacaaaggaagagactccagcagcagatgcagcaggtaacactttccttggtcatattaatattgaattataccaaggcctaactctgaggctttggtataatctaaaattagcagctttgtaaatgtcagagatagttaccttactacgtattaaaaccgtagtatcttcacatcagttaggagcttgagaagtcatcatgttcatgtcctgtggctcagggaagacagcacataaggaccctaatggtattcggaattacagatttcaaagagtcctcagtaatctattctgaaatttaaccttcactgtgacaagtagttttttttcccttttcccttttcttttttcttttttttttgagacgtagtctcgctctgtcacccaggctggagtgcagtggctcaatctcagctcactgcaagctctgcctcccgggttcacgccattctcctgcctcagcctcccgagtagctgtgactacagggactcgccaccacacccagctaattttttgtatttttagtagagacagggttcactgtgttagccaggatggtctcgatctcctaacctcgtgatccacccgcctcggcctcccagagtgctgggattacacgcgtgagtcactgcgcccggccttttccttttctaatctcagttcctcctctgtttagaggttaaacttcctctggttctgtcattttgttcaagggaacatgtctgagaaatttatgccaagatcctacgttgttctcacactctttgcagaaagcaaaatttgtgtcataaagttgcaaacatcttagttaatgactctctggtggctgggtgcagtggctcacacatgtaatcccagcactttgggaggctgaggtgggaggattgcttgagcaggggagttcaaaagcagcctggacaacatagtgagactctgtctctacaaaaaataaaaataaggctgggcacagtggctcacacctgtaatcccagcactttgggaggccaaggcgggtgaatcatgaggtcaggagtttgaggcaagcctggccaacatggtgaaaccccgtctctacgaaaacaaaaaattagctgggtgtggcggcgggcacctgtaatcccagctactcgggaggttgaggcaagagaatcacttgaacctgggaggcagaggttacagtgagccgagatcacgccattgcactccagcccaaaagtcagtgcgagactctgtctaaaaataataataataataataataaaataaattagccaggcattgtggtcacagctacttgggaggctgaggtgggaagattgcttgagcacaggtggttgagagggcattgagtcatggttgcaccactgcactccaagctgtgtgacagagcaagaccctgtctccagggggaaaaaaaaatatctctgggctcctgaaatggcagtgtcataacatatcactgcattattttctttctctccccagcatgttcagctcttgacacaaatccaccttcttgccacctgcaaccccaatctcaatccggaggccagtagcaccaggatatgtcttgtaagtttccaaattgccgtaattctatagactagaatataaaattagcttggcaggttatttctcacagttattctctcaggtatttttgattgctgtggcttcctatgtttgctgagtgaacataagccactgattcacatgaaaggacaaagagtgtattcaattttttcttttcttttttgagacagggtcttgctctttcacccaggatggagtgcggtggaacaatttcagttcactgcaacccctgcctcccgggttcaagtgattctcctgcctcagcctcccaagtagctgggactacaggcgggcaccaccacgggtaattttttttgtatttttagtagagacagggttttgccatgttggccaggctggtctcgaattcctgacttcaagtgatctgcccacctctacctcccaaagtactgggattacagccatgagccactgcgcctggcctgtccttctgatatttttattgggtcctcctcctcatctttagattcaccctgacttcttaggtttttggtaccgctattcatttcatagatgttgaggctgggcatagtggctcacacctgtaattccagcactttgggaggctgaggtgataggatcacttgagcccagtggtcaagaacagcctgggcaacatagtaagacccggtctgtgttttttttgttttgttttgttttaatttaaataatgaagtaaatatacatgtagatgttgaattcattatccattcatgaagctcaatattagtgttttatgtgtagagctagttttgctcatgacgttttgaggtattttgagctttttttttttttttttttttttttgagacggagtctcgctctgtcgcccaggctggagtgcagtggcgggatctcggctcactgcaagctccgcctcccgggttcacgccattctcttgcctcagcctcccaagtagctgggactacaggcacccgccactatgcccggctaattttttgtatttttagtagagacggggtttcaccgttttagccgggatggtctcgatctcctgacctcgtgatccgcccacctcggcctcccaaagtgctgggattacaggcgtgagccaccgcgcccggcctattttgagattttaaatttgaaatttggccaggtatggtggctcatgcctgtagtcccagcactttggtaggtcaaggtgggaggattgcttgagcccaggagtttgagaccagcctgggcaacatagtaagaccccatccctaccaaaaaaataaaaaataaaaaaattagctggggatggtgccgagtgcctgtagtcccagcaacttgggagactgaggtaggaggatcacttgagcctgggacgttgagactgtagggagccgtgcttatatatcactccagcctgggtgacagagtgagaacctgtctcacaaaaacaaaaccatactttacctcataaaaattgcctcaaacttttggacaggtaatgataatactctcagcttcttcagtaagtcttctttggattttgaagagtacatttgctagtattctaaaacttccttggtgatcaacaggatgtcttcatctcttactgtattcagaggaggatgaggagtacttggttgtaggcattattctgagaccaaaagacaaaacaattttaaaagtaatggtcctggtcgggtgaggtgactcatccctgtaatcccagcactatgagaggccgaggcaggcggattgtgagcccaggagttcgagatcagcctggccaagatgggaaaacgctgtctctgcaaaaaatacaaaaatcagctaggtttggaggtgtatgcctatagtcccagcttctcaggaggcagtgggaggatggcttgagcctgggagggggagtttgcagtgagctgagatcatgccactgcagtccagcctgagcggcagagtgagaccatgtctcaaaataaattaattaattaaattaaagtaatagtccccattcttgagactcttaattctagctcgggagctagaccatgtattccttagtgagaaacagtttaaaaataaaacaagaatataatccctgaatatctgagaactcaggcataatcttaacagtagtttattgtgaaagactttatgattatttttacctgtttttatcctgtagtaggaaggtcagcttctcatttagattctgaaggctattggtattaattgtctggaattgtcttagatcttccttgtgtcgtgttttcccagaaagagctgggaacctttgctcaaagctccatcgcccttcaccatcagtacaaccccaagtttcagaccctgttccaaccctgtaacttgatgggagctatgcagctgattgaagacttcagcacacatgtcagcattgactgcagccctcataaaactgtcaagaagactggtaggagacagatgtgtcagctttaagtttttacttgcggtgagaggtggtgggaatcttatcccatagataacttcctaggatacttgcctaggaatggaggacacaggacatttgtaatttcttccttctctcttttatcctccctttgtactcattatccaagttctagaattacatgataatctccgggcctgggtaaggcatggaggcagtggacagtataggaatatgggaggtagagatctgaggctcagtgctaagaattggactacagcaatatgaggggtaagtattaggaatcagatcaagataaactggggcctggtaaagatgaaagtcaggtggtaaagttcggtcatgtttagctttttattctcttcattaagatcaactaactttatttaccataatgattgtagcataggtgatatctccattctgaatgaaatgttgacttgcaagttaggcgtaaattagagattgtacatttgccgtgttcagtattttaaagaaatttgccggtttagattctaccttgcattggtttagtattttttgagaaaatatttgctatttacttaagccaaatatttacttctgatttgtttgctgacttagcaaattagttgtggtttgttctggatttgggtttgtctttggattctattttaaatccctaagtcttatcattacattgaatgtagttgaatttaagtgtactatatcatagacacagatcccaaactactttaatagctatattatatgaaatggtaatgaaaacgtgatttaataccaaattatagtattatcttacacatctagtgtcctgtgtttttcttctggagatataaaaatgacacttatggaaggagaaatatggatatagtagttttgtctctagaaatgcagaggtgcctaaaattgagaggctgagagagggagacagaaatgaatgagactgaattgtctcattccttttatggttcttttgttcccaacctcaggaggaatctgggagaacttaatgaaagttaagaaagaatgaaataaaagtaaaatttggaataccaggtttgtgagggagattaaagaagttggaatcttttttcttttttttttttttaagatggagtctcgctctgtcacctaggctggagtgcagtggggtgatctcggctcactgcaacctccgcctcccaggttcaaacaattctcctgcctcagcctcccaagtagctggaattacaggtgcgtgccaccatgcctggctaatttttacatttttggtagagatggggtttcactatgttggccaggctggtcttgaactcctgacctcaggtgatccacctgcctcggcctcccaaagtgctgggattacaggcgtgagccagcacgcctggcctggaatcttatcctggaagaaaaaagcattgttgaaggtctgttatccttcagagatttaaaggggaaaggaggtaaaacatttttgagcatacactatgtgacaggtattactaggtactttttaagtgtttgttttactttgtgaataaagtgttacacgtaagaaagagtaagagaggccgggcgccgtggcttacgcctgtaatccaacactttaggaggccgaggctgtcggatgacaaggtcaggagatcaagaccatcctgtctacagtgaaaccccgtctctactaaaaatacaaaaaatcagccaggcgtggtggcaggcgcctgtagtcccagctactcaggaggctgaggcaggagaatggcctgaacccgggaggcggagcttgcagtgagccaagattgcgccacgcactccagtctgggcgacagagccagactccgtctaaaaaaaaaaaaaaaaaaagtcaacttttattgccagtgaatgggactccctttagacctaatgttagttgaggaaagactgtggaaactctttggggagtggtaggcagatgggagggaatcaagttagataaggacagctctacctaaatgcaaaaatgcattcacaggctttttgaagccctcttttttcctagaagttgatttatcagagatttattttcttatagccaatgaatttccctgtttgccaaagcaagtggcttggatcctggccacaagcaaggttttcatgtatccagagttacttccagtgtgttccctgaaggcaaagaatccccaggataagatcctcttcaccaaggctgaggacaagtaagtgtttactctgggggatcaaatatcccaaggagaagatgtagttcctttgaggagtttaggggaagtaagacttgtataataagacatggacacaaaaggaaaagcagtatagatgagcagagtcctctagaacgtgcttgttctagcagtgccaaatactgctttttggggggatgttacacacatttttaaaatgttttagactggacatggcggctcccacctgtaatcccagcactttgaaaggccaaggcaggaggttggcttttctaatgttattatttatttagagacaggatcttactctgtcacccaggctggagtacagtgttgcaatcacagctcactgcagccttgaactcctgggatcaagtgatcctcctgcctcagcctccatggagtagctgggaccacaagcgtgtgccaccatacatggctgattttttttgtacaggtgagggtatctctgtgttgcccaggctgctcttgaattcctgacctcaaatgatcctcccactcctggcctcccaaagtgctgggactataggcataagccaccacacccagctagattatgaacatttttatggccctttgtgtgtattgccacactgttaacagcaaatatgtatatatgtaaccatgattatatatgttatgttagagggtagtattggtgccagtttaatttgtctgacggggtacctattattcattttatatttgttttattagaatcattctccttcccatgtattctctttgaacttcctttgtgttgttaatatacagctcatcatgatctgacatttattgatgatttatgactagtttctcttgctcctacttaattgtgaactatttgattcttattcatagtacttaatcactactcactaaatacctgaaattttctactgagtagtcaccaacttgtagtagtcactacaagaattagttgtagaaaaagtagattggccagccatggtggctcacacctgtaatgacgacactttgggaggccgaggcaggaggatcacttgaggccagaagttcaagatcagcctaggcaacaaagtgagaactggtctctacaaataatgaaataaaacattagttaggcatggtagcaaacgtttatagccacagatactcaggaggctgaagtgcgggaatcgattgaacccaggcattcaagactgcagtgcactgtaatcatgccactgctctccagcctggacaacagagcaaaaccctgtctgaaaaaaatgaaaaagtagattgggccacacgccatgggctcatgcctgtaatctcagcactttgggaggctgagactggagaatcgcttcagcttaggaagtagcagctgcagtgggctgcgatcacgccactgcactccagcccaggtgacagagtgagaccttgttttaagaacaagtaagaaaaagtagattgtaaaatgtgttagtctggggaggccctttagaaggaaggactgtgaagtgagatttagtgttattgctcctttctcagtttgttagctttaggactgaagcattttgaagggactgagtttcttaaccctctaatcagcaagtaccttctaacctgcaagactgcccgccaactgacagtgagaatcaagaacctcaacatgaacagagctcctgacaacatcattaaagtgagtgtttcctgcatgcactatccaggcacctcaccaacacatatctgttcttttctcttgttattctcaaagaaaagaagaaccttcttttatctaaagctaatttctcctacttatatactagattaattcccctgttgccttttcagggacattgattcattcattacgttcctctggagtatcttcatcctcttaaaagattccacaaatccatgtttccctgtaataattctctttcttgaactttctagaaatgatatgcagtattccacttacatgctttgggtttttgttttgttttgtttttttggtcagacataatcttgcactgtcacccaggctggagtgcaggagtatagtggcatgatcttggctcactgcagcttccgcctcccgggttcaagtgattctcctgcctcagcctcccaaatagctgagattacaggcgtgcccaccacgctcagctaattttttgtatttttagtagatacgggtttcaccatgttggccaggctggtcttgaacttctgacctcaagtgatccaccagttttggcttcccagaggctaggattgcaggcataagccaccgtgcccagcctatatactttttctcaattttgtgtttgtatgtatgcatgtatgtgtgtgtgtgtgtgtgtgtgtgtttgtgtgtgtctgtgtctgtatgtatgtatgtatgtatgtatgtatgtattgagatggagtttcgctcttgtcgcccaggcccagcctatatactttttctcaactctttttacttattgattgattgattgagatggagtctcgctcttgacccccaggctggagtgcaatggtgcgatcttggctgactgcaacctctgcctcctgggttcaagtgattctcctgcctcagcctcccttgtagctgggattacaggcccctgccaccatgcccagctgatttttgtatttagtagagtcggggtttcaccatgttggccaggctggtctcgaactcctgacctcaggtgatccatctgcctcggcctccctaagtgctgggattacaaatgtgagccattgcccccagccttcttttttatttagatatttatttatgtttttttttttttttagagacaggttctcactctgtcatcctggctggagtgcatgggcacaatcataggtcactgcaacctcaaattcctgggtgatccttccacttcagccttccaagtagcttggactacaggtgcatgccaccaaggctagccgattattttattttgtgtgaagacagggtgtcattttgtttcccaggctggtcttgaagtcctgacctcaagcagtcctcttgcctcagctcggcctcccagagtgttgggattacaggcgtgagccatgatgcccagcctttggtttcattgtgtttttgtatttttcttgagacaaggtcttactctcctgcctaggctggagtacagtggtatagtcatagctcactgcagccttgaactcctaggctcaagcattcttccaacgtcagcctcccaaggagctgggattatatgcattagccactgtgcttggccattaaatttatttatttatttattttattttatttttttgagacagaatctgtctctgtcacccaggctggagtgcagtggcacaattttagctcactgcaacctccacctaccgggttcaagcaattttcatgccttagcctcctaagtagctgggactacaggcatgcgccaccacacctggctaatttttatatttttagtagaaacataatttcaccatgttggtcagtctgatcttgaactcctgatctcaggtgatctgcccacctcggcctcccaaagtgctggaattataggcgtgagcctctgtgcctggcaaaaaactttttttttttagggatggggtgtccctatattgcccaggctggtcttcaatttttggccttaggcaattctcctgtctcagcctctaattggtactgcctggtgtattggatttaggccttacttattaaccataaaccacggaagccgaagatttacctctctcctcactcccttactcccaccacaaacatgcacattttctgctctccaaactcctcactagtagttatggtagaattttggttagattgtattcagggtttacattgtaagattttaaggactgttggctgggcgcggtggctcacgcctgtaatcccagcactttgggaggccaaggcaggtggataacgaggtcaggaaatcgagaccatcctggctaacatggtgaaaccccagctctactaaaaatacaaaaaactggctgggcgtggtggcgggcgcctgtagtcccagctactcgggaggctgaggcaggagaatggtgtgaacccgggaggtggagcttgcagtgagccgagatcgcgccactgcactccagtcttgccagagcaagactccgtctcaaaaaaaaaaaatagattttaaggactgtataaatgctcttcacagctcagctatgttactgtgttaccttgcctttcctgctgaacattttgtttcccagatcatcttctttcagtgtgttcaggtattctagatattctgtcactttcatcttgaagaaattgctccctgagccctctgacattattccactttaagcgtgttgctctccatgttgctgcactgatgtcttcttgggctttttcttcaccatcatcccaggaattccttttgcctcatactgtgttagatcctcttatttcctgaattccacatctttgcttttgcattactttttttttttttttttttttttttgagacacagagtcttgctctgtcccccaggctggatctcggctcactgcaacctgcaaccttggtcttggtcttgaactcctgacctcaggggatccacccacctcagcctcccagagtgcggggattacaggcgtgagacaccacgcctggccttgttttttgttttgttttgcttttttttgagaccgagtctcgctttgttgcccaggctggagtccaaaggcgcgatgatcttggctcactgcaacgtccgcctcccgggttcaagcaattctcctgcctcagcctcccgagtagctgggattataggcacatgccactacgcctggctaattttttgtatttttagtagagacagggtttcaccatgttagccaggatggttttgatctcctgacctcttgatccacccgtttcggtctcccaaagtgctgggattacaggcgtgagtattacttctttactttagtggaacacattctagtagcttttttttaaaaaaaatttttttctgaattttaaaaaattgaggtgggggggtctcagttttttgcccaggctggtctcagactcctgggttcaagtgatcctcctgcttcagcatcccaaagtgctgagattataggcatgagccaccctgcatggccccattccagtagcatcctgagggagagtgcttgggaagggaattttcacatttaaaccatctccggggccgggcgcagtggctcacgcctgtaatcccagcactttgggaggctgaggcgggtggatcacgaggtcgggaaatcgagaccatcctggctaatgtggtgaaaccccgtctctactaaaagtacaaaaaaattagccgggtgtggtggcgggcgtctgtagtcccaggtactctggaggctgaggcaggagaatggcgtgaacctgggaggtggagcttgcagtgagccgagatctcgccactacactccagcctgggtgacagagcgagactccgtattaaaaaaaaaaaaaaaaaaatctccattcatggtcttttgattgtatcgatgtcagtttcctcgtttttgtttttgttttattttttttctttttttgagacagagtctcactgttgctcactgcagcctctgcctcctgggttcaagcgattctcctgcctcagcctcctgagtagctgggattagccaccacacccagctaatttttgtatttttagtagagatggggttttgccatgttggccaggtgatctcgaacccctgacctcaagtgatctgcccaccttggcctcccatagtgctgggattacaggcatgagccaccacatcctccatgtctggccagtttcctggtagtaatattgtactgtgtaccttgtttatatgtatagctcttgtttctatgtaacataaaaacattatattgggagaaactggttgaagggtacatgggacctcttggtactattttttgcaatttcctatgaatataattatttcaaaataaaaggaaaaaataatactctcctctgtcactgtatctagaattctagataggaaataatttttttaagaagcttttaagggcctcacttcattttcttctaactcctagtgtggtgttaagaaatttcatgccatttaactttttttttttttttccgagacagggtcccaccctgttgcccagtttggagcgtggctaaatcatggctcactggtgtctccaacccggtgtgcaccactatgcccagctaattttttttttttttttttttaagacatggtctcgttatgttggccaggctggtctcaaactcctggcctcaagtgctcgtcctgtcttggcctcccaaagtaatgggattataggcatgagccatggccccatttaactcttgagtctttgtgtaacacctgtttttctcaacctctgacagcatgcaggatttttcctttggcttcaatattttgaaaatgcatgataatatgccttagtatttgtctatttttatccatggttttttaaaaagtactttctttttgtttttgtttgtttgtttgttttgagacagagtctcgctccattgcccaggctggagtgcaatggcgtgatcttggctcactggaacctctgcctcccaggttcaagcaattgtcctgtttcagcgtcccgaggagctgggactacaggcgctcaccaccacaccctgctaatttttgtatttttagtagagacggggtttcaccttgttggtcaggctggtctcaaactcctgacctcgtgacccacccacctcagcctcccagagtgctgggattacaggtgtgggccaccatgcctggcgtatccatggttttaaggcacacgtgataaaccttattcttctgcagaaataatttttttttttttttttgagatggagtctcactctgttgccaggctggagtgcagtggcgtgatgtcggcccactgcactctccacctcctgggttcaagtgattctcgtgcctcagcctcccgagtagctgagattacaggcacgcgccaccacacttagctaatttttgtatttttagtagagatggggtttcaccatgttggccaggatggtcttgatctcctgaccttgtgatctgcctgcctcggcctcccaaagtgctgggattacaggcataagccaccacgcctggccagaagtaatttgtgtttaagttttagttttgtgtcatttttcgtgcacacctttgtacttttgttgggggatggggcggggtgtcggggttggagtcttgctctgttgcccaggctggagtgcagtggtgcagtcttggctcactgcaacctcttaattcctcagttcaagtgattctcctgcctcagcctgccaagtagctaggatcacaggcgtgcaccaccacacccagctaatttttttttgtactttattagagacagggtttcgccatgttggccaggctggtcatgaactcctgacctccagtgatccatcctcctcgttctcccaaagtgctggcattacaggcatgagccaccatgcccagccctttgtacattttttaatgtaggatgccatttgtccacttgactctcccactagtctgtaagctccatgagagcaggaattgcttcccttatgtgtgtgcttagcttttagcacagtgcctaggatatagaaaacatcttatgttcatcatgttggatgaacagatgcttattgtcatggtttaagttcagttcttatcttctttttttttttttgagatggagtctcaccctgttaccaacgctggagtgcagtggcatgatcttggctcactgcaatctccaccctaccacccccactgccaggttcaagcgattcttttgccccagcctcccaagtaactgggattacaggcacccaccaccacacccagctaatttttgtatttttagtagagatggagtttcaccatgttggccaggctggtctcaaactctcaatctcaagtgatctgcccgcctcagcctcacaaagtgctgggtttacagatgtgagccaccaaggccagcctatttactcttaaaactgaactgcctcggtctttttttttttccttcccttctgatgcccttcacaccatcatttgcttaaagtctttgatgtgtccattttatagattacgatgctgtctttgcagctgttgagcaggaacaaatcttacataagattgctcttagcatctgcttccttttctctctgtgacctaaactctccccttcctggcaaccagaatggagatcatcagttagaaaatattgaatagggctgggcgcggtggctgacgcctgtaatcctagcactttgggaggccgaggcgggtggatcacgaggtcaggagatcgagaccatcctggctaacacagtgaaaccctgtctctactaaaaatacaaaaaaatcagccgggtgtggtggcgggcacctgtagtcccagctactccggaggctgaggcaggagaatggcgtgaacctgggaggtggagcttgcagtgagcggagatcgcgccattgcactccatcctgggcgacagagcaagactccgtctcaaaaagaaaatactgaataactataaaatctttaaatagagattagtttaatttgaaatgtacaagtattcagcatatgctattcgtatatgtgtgttcatggatgtttgtgtatgtggtcttgtgtgtgtgtgtgtgtgtgtgtgtgtgtgtgtgtttctcttgatccaccaccaccccattcaccagcctgacagaagacagtgtttccagaaggaatgtaattcatgcgcatttttttcatgttaagttttataagaagaccaaacagctgccagtcctaggaaaatgctgtgaagagatccagccacatcagtggaagccacctatagagagagaagaacaccggctcccattctggttaaaggtacagccctcttcctcgaagtctgtaggaggcagaaggtcactgaaagttctgagagaatatcaaggacttccttaatcgtctaatgctttagttgtagaactaggacttcaggaatcttcctgattcacctttcttcccttacttttctgcccttctccgggtgattctacaacattttcaaaataatgggtaaaatggtaatttgctaaaggaaattcagagaagagtttctaaagtgtataattggactgtggtctttgtagaaatttcatatgcagagtcccttggaaagatgccttgagcttgtctcaggtccctaaacttagaaagtcctattctttttcccaaattctgacatgtgctggatcagagtgttctcatttccaataggccagtctgccatccatccaggaagaactgcggcacatggctgatggtgctagagaggtaggaaatatgactggaaccactgagatcaactcagatcaaggcctagaaaaagacaactcagagttggggagtgaaactcggtacccactgctattgcctaagggtgtagtcctgaaactgaagccagttgccgaccgtttccccaagaaggcttggagacagaagcgttcatcagtcctgaaacccctccttatccaacccagcccctctctccagcccagcttcaaccctgggaaaacaccagcccaatcaactcattcagaagcccctccgagcaaaatggtgctccggattcctcacccaatacagccagccactgttttacagacagttccaggtgtccctccactgggggtcagtggaggtgagagttttgagtctcctgcagcactgcctgctatgccccctgaggccaggacaagcttccctctgtctgagtcccagactttgctctcttctgcccctgtgcccaaggtaatgatgccctcccctgcctcttccatgtttcgaaagccatatgtgagacggagaccctcaaaaagaaggggagccagggcctttcgctgtatcaaacctgcccctgttatccaccctgcatctgttatcttcactgttcctgctaccactgtgaagattgtgagccttggcggtggctgtaacatgatccagcctgtcaatgcggctgtggcccagagtccccagactattcccatcgccaccctcttggttaaccctacttccttcccctgtccattgaaccagccccttgtggcctcctctgtctcacccttaattgtttctggcaattctgtgaatcttcctataccatccacccctgaagataaggcccacatgaatgtggacattgcttgtgctgtggctgatggggaaaatgcctttcagggcctagaacccaaattagagccccaggaactatctcctctctctgctactgttttccccaaagtggaacatagcccagggcctccaccagtcgataaacagtgccaagaaggattgtcagagaacagtgcctatcgctggaccgttgtgaaaacagaggagggaaggcaagctctggagccgctccctcagggcatccaggagtctctaaacaactcttcccctggggatttagaggaagttgtcaagatggaacctgaagatgctacagaggaaatcagtggatttctttgagctaggagaataagagtctggagactgggagccttcacttcggcctccgattggtggcgcatagggtgtaaccaataggaaacccctaaagggtacttaaaccccagattttgcaactggggctcttgagcagcttgctttagcctgctcccactctgtggaatatacttttgcttcaataaatctgtgcttttattgcttcattgtttca

SEQ ID NO: 14985 - DNA, 2524 bp, Homo sapiens
gaagaggaggtggagaaggcttgggctcgcgccgctgaagaaaaggaagcaaatgagctgatggaagatctgtttgaaactttccaagatgagatgggattctccaacatggaagatgatggcccagaagaggaggagcgtgtggctgagcctcaagctaactttaacacccctcaagctctacggtttgaggaactactggccaacctactaaatgaacaacatcagatagcgaaggaactatttgaacagctgaagatgaagaaaccttcagccaaacagcagaaggaggtagagaaggttaaaccccagtgtaaggaagttcatcagaccctgattctggacccagcacaaaggaagagactccagcagcagatgcagcagcatgttcagctcttgacacaaatccaccttcttgccacctgcaaccccaatctcaatccggaggccagtagcaccaggatatgtcttaaagagctgggaacctttgctcaaagctccatcgcccttcaccatcagtacaaccccaagtttcagaccctgttccaaccctgtaacttgatgggagctatgcagctgattgaagacttcagcacacatgtcagcattgactgcagccctcataaaactgtcaagaagactgccaatgaatttccctgtttgccaaagcaagtggcttggatcctggccacaagcaaggttttcatgtatccagagttacttccagtgtgttccctgaaggcaaagaatccccaggataagatcctcttcaccaaggctgaggacaatttgttagctttaggactgaagcattttgaagggactgagtttcttaaccctctaatcagcaagtaccttctaacctgcaagactgcccgccaactgacagtgagaatcaagaacctcaacatgaacagagctcctgacaacatcattaaattttataagaagaccaaacagctgccagtcctaggaaaatgctgtgaagagatccagccacatcagtggaagccacctatagagagagaagaacaccggctcccattctggttaaaggccagtctgccatccatccaggaagaactgcggcacatggctgatggtgctagagaggtaggaaatatgactggaaccactgagatcaactcagatcaaggcctagaaaaagacaactcagagttggggagtgaaactcggtacccactgctattgcctaagggtgtagtcctgaaactgaagccagttgccgaccgtttccccaagaaggcttggagacagaagcgttcatcagtcctgaaacccctccttatccaacccagcccctctctccagcccagcttcaaccctgggaaaacaccagcccaatcaactcattcagaagcccctccgagcaaaatggtgctccggattcctcacccaatacagccagccactgttttacagacagttccaggtgtccctccactgggggtcagtggaggtgagagttttgagtctcctgcagcactgcctgctatgccccctgaggccaggacaagcttccctctgtctgagtcccagactttgctctcttctgcccctgtgcccaaggtaatgatgccctcccctgcctcttccatgtttcgaaagccatatgtgagacggagaccctcaaaaagaaggggagccagggcctttcgctgtatcaaacctgcccctgttatccaccctgcatctgttatcttcactgttcctgctaccactgtgaagattgtgagccttggcggtggctgtaacatgatccagcctgtcaatgcggctgtggcccagagtccccagactattcccatcgccaccctcttggttaaccctacttccttcccctgtccattgaaccagccccttgtggcctcctctgtctcacccttaattgtttctggcaattctgtgaatcttcctataccatccacccctgaagataaggcccacatgaatgtggacattgcttgtgctgtggctgatggggaaaatgcctttcagggcctagaacccaaattagagccccaggaactatctcctctctctgctactgttttccccaaagtggaacatagcccagggcctccaccagtcgataaacagtgccaagaaggattgtcagagaacagtgcctatcgctggaccgttgtgaaaacagaggagggaaggcaagctctggagccgctccctcagggcatccaggagtctctaaacaactcttcccctggggatttagaggaagttgtcaagatggaacctgaagatgctacagaggaaatcagtggatttctttgagctaggagaataagagtctggagactgggagccttcacttcggcctccgattggtggcgcatagggtgtaaccaataggaaacccctaaagggtacttaaaccccagattttgcaactggggctcttgagcagcttgctttagcctgctcccactctgtggaatatacttttgcttcaataaatctgtgcttttattgcttcattgtttca

SEQ ID NO: 14986 - DNA, 29241 bp, Homo sapiens
gagaaggcttgggctcgcgccgctgaaggtacgcgtgagggcctgcgctggagccggcttgacagggtctgagggggagtggagaactgggcgaggaggttcccgtgggtgagcgcgtacgggatggctggctcgcaggacggccgaaggtggtggttggtgggagcagccagcgacgagcccgtagacactcgtacgcgtgcgggctgacgtgcgcgctacatggccggagtcgggcgaagcgggggaccgtggggaagaacgcgaggagggaggagtgggaggttgggggtgtcgctaggcgcccttagctccctccctctggaggagctgccgcggccactctgctgccgccgctgccgccgccattttgggttcgctttgcgaggggaaacgatcccagtgtcggttgcgggatccgcctcctctcagtttgcccctttagccctccacctttcccttctcctctctcgcatttccgccagtcggcttacccgctggccgcctcctgacaagcgggagggatccgcggtggacccagggaagcggaggagcctggcggccaccccctcttcctcacttccctgtactctcatcgctctcggcctccgacacggtgagtagaacgatttgggccggcattcgggcctaagcactctctcagcgattgaatcctgggctttctgggagccactgtcatctcccggacctggacctctgggagagcagtggtgaagatgggggaggggagagcagggagggggatcctgagcctaccgggaagtccctccaggcggggtgaaggggtgtccctgacaggcagactcccggagggggctgggaagtaagcgagtggaggcggagtcggctgtgcccctgacaggttagtttgtgtttgtaggcatgatcggagcctcccccatagtccagtttgtgtgtgtttaattaagggataagagtggtcgaggacacgatcttgagaggggattttacctgtgtgacaaggtctgtggtgtccctgccgcgttgaacggtatgtgggaacgacaggatgatctcagtgttgtacgtttaataaatgtcactggttagtttgtacatggaaagagatgtttttggtctagcagacagatggtctgttggtgtgtagcggctgtgttggtgtgtgtatgtgaggatggcaagtgtttccgtaagagtttgcctttatttgtgtaagtgtaatggagttccccttataagttagcttatttcttgaataaatgttgggaggttccttgcaggttgatatgtgtgtgtattttagggattgggagcccctagttacttgttgggaaagagcggcaatggtagtgttctgtacagcatgtgtctgtgaggtcagggaggggagaaacttggcatagccagttgtggtcttaagaatagtttgtgcctttggttagagtgagttgtgtaaatgtgaagggccaaaatatctttaacagaatcattgctacaaagctgtaaagaatgggtggccttatttgttgtcgcgggtttatagtaatagtttacaatacaataagaaagctctttcagtttctttgtgatactgaatctctgtgaaaatggtaggatgctttcttccattttacaaaataggaaatttaggcataaggagagaacttctccaaggccgcatgttaaattggtgacaaagttggaactgtaactcccatattttcactactactgcagcagtatattcagcataccatggtgcctcaggaagtctttgtcggcaaatctgagtatgctggaaagataggagcacataagactggttggcttgtatttgggggagaccgattgtgtcagatatgtatgtggaacgtagctgtccttgccgagtctgacctgtatgaaatgcatatccatggctatattattttggatttatggaggaagcagagcatttctgacacttaaggttgtatgcgtgagggagaaggctttcacagcttaacttgtaccagagcagctgcatgggtgctgacagcttaacttgaaatctgtgggaggaaggatcctttttcactcattcaacaaatataaccattcaatgaatggtccatgccttgaggtgaggatcatcaaggtgtctctgtaaatagcctggatgcaatctgaggggagttgttttgacggtggtaggtattaagttgagggaggcagtgtggaattaaaaccagagaactgtttttgggtactggtaattgttaatatatgtgcctgtggatgttggaacttcttggctgggctgaaggaatcctttgaaagactgatttcggcagggcgcggtggctcacacctgtaatcccagcactttgggaggccgaggtgggcggatcacgaggtcaggagatcgaatcacgaggtcaggagatcgagactatcctggctaacaggatgaaaccccgtctctactaaaaatacaaaaaattagccgggcgtggtggcgggcgcctgtagtcccagctactcggggaggctgaggcaggagaatggcgtgaacccgggaggcagagcttgcagtgagctgagattgcgccactgcactccagcctgggccacagaggagactccatctccaaaaaaaaaaaaaaaaaaaaaaaaaagactgatttcatgtagtaaggatcccgtctatgaactctatgaatatgaggtaagaatgcatgaactaagccaacttagctgtattcttctggaaaatgggatgtttcttgataggctagattagtggttcttaaaagttttttggggtcacttatccttcagagaatcggatgaaagacactgggccctcaagttagaagatgagcataagcgcaatcacatgatttatatatatgattttaggaacttaaactgtaatgaaatagagccaatttatatttagatctcatttgaaaacctttcattttcattgttcgggtgtgtggatgttagtatgagtttaaggtgaaggagtctatgttagtatttgaacatgttgacaggatccatatttttaatttattctttttatcgtctgcaaacatttctgcagtattagtaaatgactctgtatttggtaaaaagggaagctaatgtcgcacaagtatctatggctttgttctttgtcagtatctttttgttctcaaactctgagaagcgtctttttttcagttttggattgggcctgaggtgatttgaagctcctgtcttggagtttaacttagttataacaaacactgagttaatcctatgcaggagacacaaagataattaatatatggtctctgtgcttgaagagacgctaattttctgtggttgaagagatgctgtgaattgtgtgatagtggcagctctcaaaaggacaaggaagagggaaacatattcctagaagctgaaattttattacccaattgcaaagactttttgtcactacttattcttaggaataaccataaagtgtttattttattctgtatggaactttgtactttaaaaaaatatgttttgtatcatctggtgtttttgtataaaggaactgttggtttgaaaagaaggtaaacatcatttatattccttaccttgttttgggatgtatctctacagtgagtttatgtaaaaaggtcttaatgtcatttttgggtatacatacatgtagaaagccctcctgatataaaatccagtagctatttgacagactacccattaatttattactggaacttaaaaataattactgtacttttaaaagaacaagaaattggtcaggtggggtggctcacgcctgtaatcctagcactttgggaggacgaggcggatggattgtcagagctcagaagatcgagaccagcctgggcaacacggtgaaaccccgtctctactaaaatacaaaaaattagctgcatgtgttggagtgcacctgtagtcccagctactcgggaagctgaggcacgagaattgcttgaaccaagaattgcttgaactgggagggggaagttgcagtgagctgaaatcatgccactgcactctagcctcggcatcagagcaacactctgtctcacaaaaaaaaaaaaaaaagcaagaaatgtaaaaaggtgttttaataggacagattataggattcagtgagataatggagaagttttaggaaaaattgtctgatagtcctttctttctattgacatggcccctgtataagaatgctatgtaaatttgtgaaaagtttaatattttctctaatttttaacgggtagtaggttcatggtgttatttttctcaaaacgtacatgtgatatgtgtgtgtagtgtgcatatatgtgcatgtatgtgtatacaatttctttatttttttaattgagattaggtctcgctatggttttttgtttttgtttttgtttttgagagagagtttcgctctcctcgcccaggctggagtacaatggcacaatcttgcctcactgcaacctctgcctcccaggttcaagtgattctctttcctcagcttcccaaatagctgggattacaggcgcgtgccaacacgccctgctgatttttgtatttttagttgagacagggtttccccacgttggccaggctggtcacgaactcctaacctcaagttctccagccgtctcggccttccaaagtgctgggattataggagtgagccactgcacctggcccaggtcttgctatgtagatcaatctggtcttgaactcctggcctcaagccatcctcctgtcttggcctcccagtttgctgggattacagatgtgagccagcatgcccagctctttttacctgcttaccaaatccaagattttctccaaaatgaactggaatagccttcttactgtgttaattttgccttggtggggaagcctaagtcttggaactaaattggggtggttatgacagttctctttttaaagctgatcagtatttcagtatttcacttgttgttgttttttttgttttgttttgttttttttgagatggagtcttgctctgtagcccagtttggaatgcagtggcaggattttgactcactgtagcctctgccacccggattcaagtgattctcctgcctcaatgtcctgagcagctgggtttacaggcacgcaccactacacctggctaatttttgtattgttagtagagacagggtttcaccatgttagccagtagccaagctgttctcatactcctgacctcaagtgatccacctgcctcagcctcccaaagtgctgggattacaggtgtgagccaccacgcctagccaaacccatctctttcattaaaccacctcattttggttcagaaacaagactgccatgtatgtatttaatgcttattatgtgccaagcactattccaggtactaagatacagtgatggacaaaacaagatcccttctcctctatctcaggacttattaatttgggcattttcattttccaatataggatcttttagtactggtataggattcctgaaggaattcctgaaatataattatttttctgctagagcaaatcaattttgttttttgttttttttttgagatggagtttcgctcttgtcgcccaggctggagtgcaatggcgcaatctcggctcactgcaacctccgactcccgggttcaagcgattctcctgcctcagcctcccaagtagctgggattacaggcattagccaccacgctaggctaatttttgtatttttagtagagacagggtttcaccaggttggccaggctggtctcgaactcctgacctcaggtgatcctccaggctcagcctcccaaagtgctaggattacaggcaggagccaccacgcccagaagagcaaaattcttctgttgacaaaaatttctttcctctgaggaagagacactgtgtgcctgtgttttatccaggaattccattggatagtttgtcctttgggatgtcagtggattaaatcctccattaagaatcaaagtacttggctgggtgcagtggctcatgcctgtaatccctgcactttgggaggctgaggcaggtggatcacctgaggtcaggagttggagaccaacctggccaacatgatgaaaccccatctctactaaaaatacaaaaaattatccaggtgttgtggcaggtgcctgtaatcccagctactctcgaaaaaacagaaacaaaaactctgacatgtagagtatgtagatgtagagaaaaaagtaaaatgattgttgaaaaaaatgtctattttttatcttctaaatagctttgtgtgtcagagatcagaacgctcattttacatgatatcaagaaccagaatgctagatagctagaatggttgttaacttcctagataaccattgtagaggaacacataaggtaaaacaaatgaataaaaattaaaaaaaaatgagatagccaaagatttgaagctctttacccattaacatgataatcatttcgactttgaatatttgtagaacaagagtcagaactcagaacaaagatctctgaggaaataaaaaaaaatcaagctgcctcctaatttctcatttagtctgtcattgggcattgtcaaactgtcaaactatatttagagattctggttttcatctggagacttagtgagttgtgtaatatcttgaatacacatataagatcttgccaggtggggtggctcatgtctgtaatcccagcactttgggaggatgaggtgggaggatcgctggagcccaggagttcaagaccagcctgggcaacatagcaagtccctggctctatttaaaaaaaaaaaaaaaaaaaaatcctcaatgtagaactttaaatttatccttacgtgttacatccagttgatttgagaaaatatgattctgaattttccatcaattggattggcagtccctttcagctttacagctttacatcatctacagatttgttaagtatgttctcttggtcttctaattcactgatggagtttttgaataggtcgggtccaaagatagagtcctatgaaacactgttggaaacttgtctctgtctgtctcttttttttttggagacagtgtcttgctctgtcgttcaggctggaatgcagtgggacggtctcagctcactacagcctctgcttcttggactcaaagagattctctcacctcagcctctcaagtatatgggactatatgcatgtgcgaccaagcccagataaatttttttttagagatatgttgacattttgcccaggttgggagacttgtctcttgattccattcagtattgtgtgggtttggataggccatctaattataaaatcattgggctggtcatggtggctcatgcctgtaatcccagcactttgggaggctgaggtgggcggatcacctgaggtcaggagtttgagaccagcctgaccaatatggagaaaccccatctctactaaaaacacaaaattagctgggcgtggtggtgcatgcctgtaatcccagctacttgggaggctgaggcaggagaatagcttgaacctgggaggcggaggttgcagtgagccaaaatcgtgtcatcgcactccagcctgggcaacaagagcgaaactccgtctcaaaaaaaaaaaaaaatcatctagctcacattttctccttgtcttcttcctattagaatttaagttcaatgagattagaactctctctctctctcattctctcatatatcccaagcatctaaaacagggattgaaacatagtaagtactcaataaatgtttttgaataaatgaatgaaggatagctgggcgtggtggctcatgcctgtaaccccagcactttgggaagccaaggtgggtggatcactggagctcaggagttcaagaccagcttgggcaacatggggaaaacccatctctacaaaatatggaagaattagccgggcatgacagcacactcctgttgccccagctacttggagggctgaagtgggaggatcgcttgagcctgggaagcagagattgcagtgagccgagatcaagccactgccctccagcccgggtgacagagtgagaccctgtctcaggaataaggatagatatgaagaattcgtcagatgccttgttgaaaacatcatacattgtctacatggaattcctccatattgtaaaatgaatctaatttataccaacaacgtttggcttttttgcagaaaaggaagcaaatgagctgatggaagatctgtttgaaactgtgagtaatgatcctcaagtgagaacatgggattgtaagttggttctccaacaaaatgtgtcctttgatctctgtgatgctccttctagaagagggactgaaccaattctccttttagtctacctgggaaagaatataatgacaaaagaaatttgctaactgctagactcttgattatccacatgtaggttattcttactaaaattttccttgaagctttttttttttttttttgaggcaaagtcttgctctgtcacccaggctctggagaatacagtggtgaaatctcagctcacagcagcctcgacctccagggctcaaaacaattctctcatctaagcctcctgagtagctgggactacaggcacacacctacaggcccggctaattattttatttttttgtagagacagggtcttgccatgttctggaactcataggctcaagtaatcttcctgcctcaacctcccaaagtgctggaattacaggtgtgagccagcacatcttgccccttgaaaacttttgatggcttcccctactgtcatttggtgtgtccttaaagattgccaactagttttaaagtattttgcacacaaataattaccttttccataaatttgtctaaaaagatatttctgtttaagaaattgatcattttgagttatcctagctctgtgcttactgatacaagttgactggttgagcaacttctttcctggcataatagtcattccatatgtgggtttgtaggagtcctgaagtgagaaaggttctgatgtaggctctttctgggtgccagcattattaaagtattgtttatagttttcacttttccttcccaacactggagcaacattcaaaagcccattccccaggaaaaccctccctttcctttgcccacagttccaagatgagatgggattctccaacatggaagatgatggcccagaagaggaggagcgtgtggctgagcctcaagctaactttaacacccctcaagctctacggtaggctagttgaagaccttgagatttggaatagaggaagagtttatttctgaaaaggttttcagaagttgcagttaacaatttttcatccccagccagcttctgttactgatgtaaggatgcagagtcctgtcaggagttaggtgtcaagtgaagtctccttgttatggggcagtgcagctgtaggccaagctgtatctgtttgggaagggagaaaaaacagtagctggcatccatatccacttctccgggtgagtggtgctggagaggtatgtaggactcaatgtggccagccacacaaactaccctatattgtaatatccagtctgtcccttttgttctttttatgtgccattaatatctgctaaatgtgactgaaaatttgttagtcacctaggcattagtggagcaaaccctgaagcacctgcagtaaggagtctgaaacatacgtgctgacctttttgcctaaagttggcacttgtgttacagcatccagaaagtagaggctttaattttttcctcattttgtggtggatttgcatctgcactttattctgttgtagcagcatataatcattaggtcgatggcgagaggtcaggatgcagtttgtgccataagtggaacaaagcaaagagaatagtccctgtaattagtcctgtgtttgaacttaacagcactactaagcagagagcttgggttccatctgaaagctagacctttagggattttccaatttagtgaaaaaagataagataggccaaccaatgtcttaaaaactagaactactagtcattctccattacaacaaatatcacaatacaactacatcaaaaatctcaagattgctaagtcagtatttgacccattattttaatttatagttcatagaacaaaattctggtatagcagaatggaaccattcatcctgggaacgtataataggatctgattaataaatattttggttttgctgatcaactctttataacttcttaaaatttggaaaatatagaactaatttaaaattcctgttagaatccagttaccttctggtattcaatggaatatagtcatatatcatctcatggtcataccctctgtgaaatctatcattaaacgattcatcattgtgtaaacatcgtagaatgtacttacataaacctaaatggtttagcctactgcatacctattgctcccaggctacaaaacctgtacagtgtgttactgtactgtactgaatactgtaggcagttgtaacacaatggtaagtacatatgtatgtaaacatagaaaaggtacagtaatcttatggagccacctctgactatgtggttcgttattgactgaaacattctgtggcgcatgactgtacttgggcagcttctgcttctctttcgattgcaaatacaaacctgtttttgttttaatctttgactaaataaaaatccctctgtaagtccatagagagtaagcacatcttaaaacacaataaggaagagagaggagaaaaagacagtcaaaacaaaaactctggggcttcccttatcaattacctaaataatccttgttaaaactaagtgcaggctatgtttccattttctacttttttatgcttcttctcttctgttccttcagtggtggtagcgcggatgttcaaattttcagttctcagtaaagattgtatagacagtcccacggtcttcaggtttttactctgtgctacccaaacctacagtaaatactataaaagaaaacttattcaaacgtaatctttatctgcaaaaactattgaaaaacgttaccatttaactattgctgtaatatagggggttccttgaaatatgataacctgcttgttatagctacttcagcagatcttatcctgttgcatagggtatcagcatatgcttaatcatttaggtatattattctccctttatttctttctatgtaaacatagaaaaggtatagtaatcatacatagaactgacatgctaggtattggaatttttgcttcagccctgcaaacaatctttcaggagggtatggatgggaagttagggttaggaaccttggaagaggaatttaaagggctaaaagaagatagccttcatggataatattttaactaacttctccgttctgttcatttgaactaccatgtacttcagttattttggtatatccttttcctgcttcatgctagaaagtctttgacttgttaagaaagcagggcagtgcagcctgagtagataggataatgggacaagctggacctgggatgggagtaacatcccagggagtaacaagtaatgagagaagaaatgagaatgatgagttcccaccagctccttggctgctttcttacccatatatttctctgtccctagttttttgtttaattttttcttcatttgtatattatttggaagaggaattgtagaggaatgggatggggtgtaatacagaatcatttgatgcatgctaactactttgggaaaagatttgtgtaaggctgggagtttgactgttggctaaagtgaaaaggggggattagtagggaatgaaaattgttcaggctctttgctcatcattgcaaagaattggatgtgttgtggacctaggaaaacactcaaattcagtcatccccgtttgggataggtttgaggaactactggccaacctactaaatgaacaacatcagatagcgaaggaactatttgaacagctgaagatgaagaaaccttcagccaaacagcagaaggaggtagagaaggttaaaccccagtgtaaggaagttcatcagaccctgattctggacccagcacaaaggaagagactccagcagcagatgcagcaggtaacactttccttggtcatattaatattgaattataccaaggcctaactctgaggctttggtataatctaaaattagcagctttgtaaatgtcagagatagttaccttactacgtattaaaaccgtagtatcttcacatcagttaggagcttgagaagtcatcatgttcatgtcctgtggctcagggaagacagcacataaggaccctaatggtattcggaattacagatttcaaagagtcctcagtaatctattctgaaatttaaccttcactgtgacaagtagttttttttcccttttcccttttcttttttcttttttttttgagacgtagtctcgctctgtcacccaggctggagtgcagtggctcaatctcagctcactgcaagctctgcctcccgggttcacgccattctcctgcctcagcctcccgagtagctgtgactacagggactcgccaccacacccagctaattttttgtatttttagtagagacagggttcactgtgttagccaggatggtctcgatctcctaacctcgtgatccacccgcctcggcctcccagagtgctgggattacacgcgtgagtcactgcgcccggccttttccttttctaatctcagttcctcctctgtttagaggttaaacttcctctggttctgtcattttgttcaagggaacatgtctgagaaatttatgccaagatcctacgttgttctcacactctttgcagaaagcaaaatttgtgtcataaagttgcaaacatcttagttaatgactctctggtggctgggtgcagtggctcacacatgtaatcccagcactttgggaggctgaggtgggaggattgcttgagcaggggagttcaaaagcagcctggacaacatagtgagactctgtctctacaaaaaataaaaataaggctgggcacagtggctcacacctgtaatcccagcactttgggaggccaaggcgggtgaatcatgaggtcaggagtttgaggcaagcctggccaacatggtgaaaccccgtctctacgaaaacaaaaaattagctgggtgtggcggcgggcacctgtaatcccagctactcgggaggttgaggcaagagaatcacttgaacctgggaggcagaggttacagtgagccgagatcacgccattgcactccagcccaaaagtcagtgcgagactctgtctaaaaataataataataataataataaaataaattagccaggcattgtggtcacagctacttgggaggctgaggtgggaagattgcttgagcacaggtggttgagagggcattgagtcatggttgcaccactgcactccaagctgtgtgacagagcaagaccctgtctccagggggaaaaaaaaatatctctgggctcctgaaatggcagtgtcataacatatcactgcattattttctttctctccccagcatgttcagctcttgacacaaatccaccttcttgccacctgcaaccccaatctcaatccggaggccagtagcaccaggatatgtcttgtaagtttccaaattgccgtaattctatagactagaatataaaattagcttggcaggttatttctcacagttattctctcaggtatttttgattgctgtggcttcctatgtttgctgagtgaacataagccactgattcacatgaaaggacaaagagtgtattcaattttttcttttcttttttgagacagggtcttgctctttcacccaggatggagtgcggtggaacaatttcagttcactgcaacccctgcctcccgggttcaagtgattctcctgcctcagcctcccaagtagctgggactacaggcgggcaccaccacgggtaattttttttgtatttttagtagagacagggttttgccatgttggccaggctggtctcgaattcctgacttcaagtgatctgcccacctctacctcccaaagtactgggattacagccatgagccactgcgcctggcctgtccttctgatatttttattgggtcctcctcctcatctttagattcaccctgacttcttaggtttttggtaccgctattcatttcatagatgttgaggctgggcatagtggctcacacctgtaattccagcactttgggaggctgaggtgataggatcacttgagcccagtggtcaagaacagcctgggcaacatagtaagacccggtctgtgttttttttgttttgttttgttttaatttaaataatgaagtaaatatacatgtagatgttgaattcattatccattcatgaagctcaatattagtgttttatgtgtagagctagttttgctcatgacgttttgaggtattttgagctttttttttttttttttttttttttgagacggagtctcgctctgtcgcccaggctggagtgcagtggcgggatctcggctcactgcaagctccgcctcccgggttcacgccattctcttgcctcagcctcccaagtagctgggactacaggcacccgccactatgcccggctaattttttgtatttttagtagagacggggtttcaccgttttagccgggatggtctcgatctcctgacctcgtgatccgcccacctcggcctcccaaagtgctgggattacaggcgtgagccaccgcgcccggcctattttgagattttaaatttgaaatttggccaggtatggtggctcatgcctgtagtcccagcactttggtaggtcaaggtgggaggattgcttgagcccaggagtttgagaccagcctgggcaacatagtaagaccccatccctaccaaaaaaataaaaaataaaaaaattagctggggatggtgccgagtgcctgtagtcccagcaacttgggagactgaggtaggaggatcacttgagcctgggacgttgagactgtagggagccgtgcttatatatcactccagcctgggtgacagagtgagaacctgtctcacaaaaacaaaaccatactttacctcataaaaattgcctcaaacttttggacaggtaatgataatactctcagcttcttcagtaagtcttctttggattttgaagagtacatttgctagtattctaaaacttccttggtgatcaacaggatgtcttcatctcttactgtattcagaggaggatgaggagtacttggttgtaggcattattctgagaccaaaagacaaaacaattttaaaagtaatggtcctggtcgggtgaggtgactcatccctgtaatcccagcactatgagaggccgaggcaggcggattgtgagcccaggagttcgagatcagcctggccaagatgggaaaacgctgtctctgcaaaaaatacaaaaatcagctaggtttggaggtgtatgcctatagtcccagcttctcaggaggcagtgggaggatggcttgagcctgggagggggagtttgcagtgagctgagatcatgccactgcagtccagcctgagcggcagagtgagaccatgtctcaaaataaattaattaattaaattaaagtaatagtccccattcttgagactcttaattctagctcgggagctagaccatgtattccttagtgagaaacagtttaaaaataaaacaagaatataatccctgaatatctgagaactcaggcataatcttaacagtagtttattgtgaaagactttatgattatttttacctgtttttatcctgtagtaggaaggtcagcttctcatttagattctgaaggctattggtattaattgtctggaattgtcttagatcttccttgtgtcgtgttttcccagaaagagctgggaacctttgctcaaagctccatcgcccttcaccatcagtacaaccccaagtttcagaccctgttccaaccctgtaacttgatgggagctatgcagctgattgaagacttcagcacacatgtcagcattgactgcagccctcataaaactgtcaagaagactggtaggagacagatgtgtcagctttaagtttttacttgcggtgagaggtggtgggaatcttatcccatagataacttcctaggatacttgcctaggaatggaggacacaggacatttgtaatttcttccttctctcttttatcctccctttgtactcattatccaagttctagaattacatgataatctccgggcctgggtaaggcatggaggcagtggacagtataggaatatgggaggtagagatctgaggctcagtgctaagaattggactacagcaatatgaggggtaagtattaggaatcagatcaagataaactggggcctggtaaagatgaaagtcaggtggtaaagttcggtcatgtttagctttttattctcttcattaagatcaactaactttatttaccataatgattgtagcataggtgatatctccattctgaatgaaatgttgacttgcaagttaggcgtaaattagagattgtacatttgccgtgttcagtattttaaagaaatttgccggtttagattctaccttgcattggtttagtattttttgagaaaatatttgctatttacttaagccaaatatttacttctgatttgtttgctgacttagcaaattagttgtggtttgttctggatttgggtttgtctttggattctattttaaatccctaagtcttatcattacattgaatgtagttgaatttaagtgtactatatcatagacacagatcccaaactactttaatagctatattatatgaaatggtaatgaaaacgtgatttaataccaaattatagtattatcttacacatctagtgtcctgtgtttttcttctggagatataaaaatgacacttatggaaggagaaatatggatatagtagttttgtctctagaaatgcagaggtgcctaaaattgagaggctgagagagggagacagaaatgaatgagactgaattgtctcattccttttatggttcttttgttcccaacctcaggaggaatctgggagaacttaatgaaagttaagaaagaatgaaataaaagtaaaatttggaataccaggtttgtgagggagattaaagaagttggaatcttttttcttttttttttttttaagatggagtctcgctctgtcacctaggctggagtgcagtggggtgatctcggctcactgcaacctccgcctcccaggttcaaacaattctcctgcctcagcctcccaagtagctggaattacaggtgcgtgccaccatgcctggctaatttttacatttttggtagagatggggtttcactatgttggccaggctggtcttgaactcctgacctcaggtgatccacctgcctcggcctcccaaagtgctgggattacaggcgtgagccagcacgcctggcctggaatcttatcctggaagaaaaaagcattgttgaaggtctgttatccttcagagatttaaaggggaaaggaggtaaaacatttttgagcatacactatgtgacaggtattactaggtactttttaagtgtttgttttactttgtgaataaagtgttacacgtaagaaagagtaagagaggccgggcgccgtggcttacgcctgtaatccaacactttaggaggccgaggctgtcggatgacaaggtcaggagatcaagaccatcctgtctacagtgaaaccccgtctctactaaaaatacaaaaaatcagccaggcgtggtggcaggcgcctgtagtcccagctactcaggaggctgaggcaggagaatggcctgaacccgggaggcggagcttgcagtgagccaagattgcgccacgcactccagtctgggcgacagagccagactccgtctaaaaaaaaaaaaaaaaaaagtcaacttttattgccagtgaatgggactccctttagacctaatgttagttgaggaaagactgtggaaactctttggggagtggtaggcagatgggagggaatcaagttagataaggacagctctacctaaatgcaaaaatgcattcacaggctttttgaagccctcttttttcctagaagttgatttatcagagatttattttcttatagccaatgaatttccctgtttgccaaagcaagtggcttggatcctggccacaagcaaggttttcatgtatccagagttacttccagtgtgttccctgaaggcaaagaatccccaggataagatcctcttcaccaaggctgaggacaagtaagtgtttactctgggggatcaaatatcccaaggagaagatgtagttcctttgaggagtttaggggaagtaagacttgtataataagacatggacacaaaaggaaaagcagtatagatgagcagagtcctctagaacgtgcttgttctagcagtgccaaatactgctttttggggggatgttacacacatttttaaaatgttttagactggacatggcggctcccacctgtaatcccagcactttgaaaggccaaggcaggaggttggcttttctaatgttattatttatttagagacaggatcttactctgtcacccaggctggagtacagtgttgcaatcacagctcactgcagccttgaactcctgggatcaagtgatcctcctgcctcagcctccatggagtagctgggaccacaagcgtgtgccaccatacatggctgattttttttgtacaggtgagggtatctctgtgttgcccaggctgctcttgaattcctgacctcaaatgatcctcccactcctggcctcccaaagtgctgggactataggcataagccaccacacccagctagattatgaacatttttatggccctttgtgtgtattgccacactgttaacagcaaatatgtatatatgtaaccatgattatatatgttatgttagagggtagtattggtgccagtttaatttgtctgacggggtacctattattcattttatatttgttttattagaatcattctccttcccatgtattctctttgaacttcctttgtgttgttaatatacagctcatcatgatctgacatttattgatgatttatgactagtttctcttgctcctacttaattgtgaactatttgattcttattcatagtacttaatcactactcactaaatacctgaaattttctactgagtagtcaccaacttgtagtagtcactacaagaattagttgtagaaaaagtagattggccagccatggtggctcacacctgtaatgacgacactttgggaggccgaggcaggaggatcacttgaggccagaagttcaagatcagcctaggcaacaaagtgagaactggtctctacaaataatgaaataaaacattagttaggcatggtagcaaacgtttatagccacagatactcaggaggctgaagtgcgggaatcgattgaacccaggcattcaagactgcagtgcactgtaatcatgccactgctctccagcctggacaacagagcaaaaccctgtctgaaaaaaatgaaaaagtagattgggccacacgccatgggctcatgcctgtaatctcagcactttgggaggctgagactggagaatcgcttcagcttaggaagtagcagctgcagtgggctgcgatcacgccactgcactccagcccaggtgacagagtgagaccttgttttaagaacaagtaagaaaaagtagattgtaaaatgtgttagtctggggaggccctttagaaggaaggactgtgaagtgagatttagtgttattgctcctttctcagtttgttagctttaggactgaagcattttgaagggactgagtttcttaaccctctaatcagcaagtaccttctaacctgcaagactgcccgccaactgacagtgagaatcaagaacctcaacatgaacagagctcctgacaacatcattaaagtgagtgtttcctgcatgcactatccaggcacctcaccaacacatatctgttcttttctcttgttattctcaaagaaaagaagaaccttcttttatctaaagctaatttctcctacttatatactagattaattcccctgttgccttttcagggacattgattcattcattacgttcctctggagtatcttcatcctcttaaaagattccacaaatccatgtttccctgtaataattctctttcttgaactttctagaaatgatatgcagtattccacttacatgctttgggtttttgttttgttttgtttttttggtcagacataatcttgcactgtcacccaggctggagtgcaggagtatagtggcatgatcttggctcactgcagcttccgcctcccgggttcaagtgattctcctgcctcagcctcccaaatagctgagattacaggcgtgcccaccacgctcagctaattttttgtatttttagtagatacgggtttcaccatgttggccaggctggtcttgaacttctgacctcaagtgatccaccagttttggcttcccagaggctaggattgcaggcataagccaccgtgcccagcctatatactttttctcaattttgtgtttgtatgtatgcatgtatgtgtgtgtgtgtgtgtgtgtgtgtttgtgtgtgtctgtgtctgtatgtatgtatgtatgtatgtatgtatgtattgagatggagtttcgctcttgtcgcccaggcccagcctatatactttttctcaactctttttacttattgattgattgattgagatggagtctcgctcttgacccccaggctggagtgcaatggtgcgatcttggctgactgcaacctctgcctcctgggttcaagtgattctcctgcctcagcctcccttgtagctgggattacaggcccctgccaccatgcccagctgatttttgtatttagtagagtcggggtttcaccatgttggccaggctggtctcgaactcctgacctcaggtgatccatctgcctcggcctccctaagtgctgggattacaaatgtgagccattgcccccagccttcttttttatttagatatttatttatgtttttttttttttttagagacaggttctcactctgtcatcctggctggagtgcatgggcacaatcataggtcactgcaacctcaaattcctgggtgatccttccacttcagccttccaagtagcttggactacaggtgcatgccaccaaggctagccgattattttattttgtgtgaagacagggtgtcattttgtttcccaggctggtcttgaagtcctgacctcaagcagtcctcttgcctcagctcggcctcccagagtgttgggattacaggcgtgagccatgatgcccagcctttggtttcattgtgtttttgtatttttcttgagacaaggtcttactctcctgcctaggctggagtacagtggtatagtcatagctcactgcagccttgaactcctaggctcaagcattcttccaacgtcagcctcccaaggagctgggattatatgcattagccactgtgcttggccattaaatttatttatttatttattttattttatttttttgagacagaatctgtctctgtcacccaggctggagtgcagtggcacaattttagctcactgcaacctccacctaccgggttcaagcaattttcatgccttagcctcctaagtagctgggactacaggcatgcgccaccacacctggctaatttttatatttttagtagaaacataatttcaccatgttggtcagtctgatcttgaactcctgatctcaggtgatctgcccacctcggcctcccaaagtgctggaattataggcgtgagcctctgtgcctggcaaaaaactttttttttttagggatggggtgtccctatattgcccaggctggtcttcaatttttggccttaggcaattctcctgtctcagcctctaattggtactgcctggtgtattggatttaggccttacttattaaccataaaccacggaagccgaagatttacctctctcctcactcccttactcccaccacaaacatgcacattttctgctctccaaactcctcactagtagttatggtagaattttggttagattgtattcagggtttacattgtaagattttaaggactgttggctgggcgcggtggctcacgcctgtaatcccagcactttgggaggccaaggcaggtggataacgaggtcaggaaatcgagaccatcctggctaacatggtgaaaccccagctctactaaaaatacaaaaaactggctgggcgtggtggcgggcgcctgtagtcccagctactcgggaggctgaggcaggagaatggtgtgaacccgggaggtggagcttgcagtgagccgagatcgcgccactgcactccagtcttgccagagcaagactccgtctcaaaaaaaaaaaatagattttaaggactgtataaatgctcttcacagctcagctatgttactgtgttaccttgcctttcctgctgaacattttgtttcccagatcatcttctttcagtgtgttcaggtattctagatattctgtcactttcatcttgaagaaattgctccctgagccctctgacattattccactttaagcgtgttgctctccatgttgctgcactgatgtcttcttgggctttttcttcaccatcatcccaggaattccttttgcctcatactgtgttagatcctcttatttcctgaattccacatctttgcttttgcattactttttttttttttttttttttttttgagacacagagtcttgctctgtcccccaggctggatctcggctcactgcaacctgcaaccttggtcttggtcttgaactcctgacctcaggggatccacccacctcagcctcccagagtgcggggattacaggcgtgagacaccacgcctggccttgttttttgttttgttttgcttttttttgagaccgagtctcgctttgttgcccaggctggagtccaaaggcgcgatgatcttggctcactgcaacgtccgcctcccgggttcaagcaattctcctgcctcagcctcccgagtagctgggattataggcacatgccactacgcctggctaattttttgtatttttagtagagacagggtttcaccatgttagccaggatggttttgatctcctgacctcttgatccacccgtttcggtctcccaaagtgctgggattacaggcgtgagtattacttctttactttagtggaacacattctagtagcttttttttaaaaaaaatttttttctgaattttaaaaaattgaggtgggggggtctcagttttttgcccaggctggtctcagactcctgggttcaagtgatcctcctgcttcagcatcccaaagtgctgagattataggcatgagccaccctgcatggccccattccagtagcatcctgagggagagtgcttgggaagggaattttcacatttaaaccatctccggggccgggcgcagtggctcacgcctgtaatcccagcactttgggaggctgaggcgggtggatcacgaggtcgggaaatcgagaccatcctggctaatgtggtgaaaccccgtctctactaaaagtacaaaaaaattagccgggtgtggtggcgggcgtctgtagtcccaggtactctggaggctgaggcaggagaatggcgtgaacctgggaggtggagcttgcagtgagccgagatctcgccactacactccagcctgggtgacagagcgagactccgtattaaaaaaaaaaaaaaaaaaatctccattcatggtcttttgattgtatcgatgtcagtttcctcgtttttgtttttgttttattttttttctttttttgagacagagtctcactgttgctcactgcagcctctgcctcctgggttcaagcgattctcctgcctcagcctcctgagtagctgggattagccaccacacccagctaatttttgtatttttagtagagatggggttttgccatgttggccaggtgatctcgaacccctgacctcaagtgatctgcccaccttggcctcccatagtgctgggattacaggcatgagccaccacatcctccatgtctggccagtttcctggtagtaatattgtactgtgtaccttgtttatatgtatagctcttgtttctatgtaacataaaaacattatattgggagaaactggttgaagggtacatgggacctcttggtactattttttgcaatttcctatgaatataattatttcaaaataaaaggaaaaaataatactctcctctgtcactgtatctagaattctagataggaaataatttttttaagaagcttttaagggcctcacttcattttcttctaactcctagtgtggtgttaagaaatttcatgccatttaactttttttttttttttccgagacagggtcccaccctgttgcccagtttggagcgtggctaaatcatggctcactggtgtctccaacccggtgtgcaccactatgcccagctaattttttttttttttttttttaagacatggtctcgttatgttggccaggctggtctcaaactcctggcctcaagtgctcgtcctgtcttggcctcccaaagtaatgggattataggcatgagccatggccccatttaactcttgagtctttgtgtaacacctgtttttctcaacctctgacagcatgcaggatttttcctttggcttcaatattttgaaaatgcatgataatatgccttagtatttgtctatttttatccatggttttttaaaaagtactttctttttgtttttgtttgtttgtttgttttgagacagagtctcgctccattgcccaggctggagtgcaatggcgtgatcttggctcactggaacctctgcctcccaggttcaagcaattgtcctgtttcagcgtcccgaggagctgggactacaggcgctcaccaccacaccctgctaatttttgtatttttagtagagacggggtttcaccttgttggtcaggctggtctcaaactcctgacctcgtgacccacccacctcagcctcccagagtgctgggattacaggtgtgggccaccatgcctggcgtatccatggttttaaggcacacgtgataaaccttattcttctgcagaaataatttttttttttttttttgagatggagtctcactctgttgccaggctggagtgcagtggcgtgatgtcggcccactgcactctccacctcctgggttcaagtgattctcgtgcctcagcctcccgagtagctgagattacaggcacgcgccaccacacttagctaatttttgtatttttagtagagatggggtttcaccatgttggccaggatggtcttgatctcctgaccttgtgatctgcctgcctcggcctcccaaagtgctgggattacaggcataagccaccacgcctggccagaagtaatttgtgtttaagttttagttttgtgtcatttttcgtgcacacctttgtacttttgttgggggatggggcggggtgtcggggttggagtcttgctctgttgcccaggctggagtgcagtggtgcagtcttggctcactgcaacctcttaattcctcagttcaagtgattctcctgcctcagcctgccaagtagctaggatcacaggcgtgcaccaccacacccagctaatttttttttgtactttattagagacagggtttcgccatgttggccaggctggtcatgaactcctgacctccagtgatccatcctcctcgttctcccaaagtgctggcattacaggcatgagccaccatgcccagccctttgtacattttttaatgtaggatgccatttgtccacttgactctcccactagtctgtaagctccatgagagcaggaattgcttcccttatgtgtgtgcttagcttttagcacagtgcctaggatatagaaaacatcttatgttcatcatgttggatgaacagatgcttattgtcatggtttaagttcagttcttatcttctttttttttttttgagatggagtctcaccctgttaccaacgctggagtgcagtggcatgatcttggctcactgcaatctccaccctaccacccccactgccaggttcaagcgattcttttgccccagcctcccaagtaactgggattacaggcacccaccaccacacccagctaatttttgtatttttagtagagatggagtttcaccatgttggccaggctggtctcaaactctcaatctcaagtgatctgcccgcctcagcctcacaaagtgctgggtttacagatgtgagccaccaaggccagcctatttactcttaaaactgaactgcctcggtctttttttttttccttcccttctgatgcccttcacaccatcatttgcttaaagtctttgatgtgtccattttatagattacgatgctgtctttgcagctgttgagcaggaacaaatcttacataagattgctcttagcatctgcttccttttctctctgtgacctaaactctccccttcctggcaaccagaatggagatcatcagttagaaaatattgaatagggctgggcgcggtggctgacgcctgtaatcctagcactttgggaggccgaggcgggtggatcacgaggtcaggagatcgagaccatcctggctaacacagtgaaaccctgtctctactaaaaatacaaaaaaatcagccgggtgtggtggcgggcacctgtagtcccagctactccggaggctgaggcaggagaatggcgtgaacctgggaggtggagcttgcagtgagcggagatcgcgccattgcactccatcctgggcgacagagcaagactccgtctcaaaaagaaaatactgaataactataaaatctttaaatagagattagtttaatttgaaatgtacaagtattcagcatatgctattcgtatatgtgtgttcatggatgtttgtgtatgtggtcttgtgtgtgtgtgtgtgtgtgtgtgtgtgtgtgtgtttctcttgatccaccaccaccccattcaccagcctgacagaagacagtgtttccagaaggaatgtaattcatgcgcatttttttcatgttaagttttataagaagaccaaacagctgccagtcctaggaaaatgctgtgaagagatccagccacatcagtggaagccacctatagagagagaagaacaccggctcccattctggttaaaggtacagccctcttcctcgaagtctgtaggaggcagaaggtcactgaaagttctgagagaatatcaaggacttccttaatcgtctaatgctttagttgtagaactaggacttcaggaatcttcctgattcacctttcttcccttacttttctgcccttctccgggtgattctacaacattttcaaaataatgggtaaaatggtaatttgctaaaggaaattcagagaagagtttctaaagtgtataattggactgtggtctttgtagaaatttcatatgcagagtcccttggaaagatgccttgagcttgtctcaggtccctaaacttagaaagtcctattctttttcccaaattctgacatgtgctggatcagagtgttctcatttccaataggccagtctgccatccatccaggaagaactgcggcacatggctgatggtgctagagaggtaggaaatatgactggaaccactgagatcaactcagatcaaggcctagaaaaagacaactcagagttggggagtgaaactcggtacccactgctattgcctaagggtgtagtcctgaaactgaagccagttgccgaccgtttccccaagaaggcttggagacagaagcgttcatcagtcctgaaacccctccttatccaacccagcccctctctccagcccagcttcaaccctgggaaaacaccagcccaatcaactcattcagaagcccctccgagcaaaatggtgctccggattcctcacccaatacagccagccactgttttacagacagttccaggtgtccctccactgggggtcagtggaggtgagagttttgagtctcctgcagcactgcctgctatgccccctgaggccaggacaagcttccctctgtctgagtcccagactttgctctcttctgcccctgtgcccaaggtaatgatgccctcccctgcctcttccatgtttcgaaagccatatgtgagacggagaccctcaaaaagaaggggagccagggcctttcgctgtatcaaacctgcccctgttatccaccctgcatctgttatcttcactgttcctgctaccactgtgaagattgtgagccttggcggtggctgtaacatgatccagcctgtcaatgcggctgtggcccagagtccccagactattcccatcgccaccctcttggttaaccctacttccttcccctgtccattgaaccagccccttgtggcctcctctgtctcacccttaattgtttctggcaattctgtgaatcttcctataccatccacccctgaagataaggcccacatgaatgtggacattgcttgtgctgtggctgatggggaaaatgcctttcagggcctagaacccaaattagagccccaggaactatctcctctctctgctactgttttccccaaagtggaacatagcccagggcctccaccagtcgataaacagtgccaagaaggattgtcagagaacagtgcctatcgctggaccgttgtgaaaacagaggagggaaggcaagctctggagccgctccctcagggcatccaggagtctctaaacaactcttcccctggggatttagaggaagttgtcaagatggaacctgaagatgctacagaggaaatcagtggatttctttgagctaggagaataagagtctggagactgggagccttcacttcggcctccgattggtggcgcatagggtgtaaccaataggaaacccctaaagggtacttaaaccccagattttgcaactggggctcttgagcagcttgctttagcctgctcccactctgtggaatatacttttgcttcaataaatctgtgcttttattgcttcattgtttca

SEQ ID NO: 14987 - DNA, 2498 bp, Homo sapiens
gagaaggcttgggctcgcgccgctgaagtcggcttacccgctggccgcctcctgacaagcgggagggatccgcggtggacccagggaagcggaggagcctggcggccaccccctcttcctcacttccctgtactctcatcgctctcggcctccgacacgaaaaggaagcaaatgagctgatggaagatctgtttgaaactttccaagatgagatgggattctccaacatggaagatgatggcccagaagaggaggagcgtgtggctgagcctcaagctaactttaacacccctcaagctctacggtttgaggaactactggccaacctactaaatgaacaacatcagatagcgaaggaactatttgaacagctgaagatgaagaaaccttcagccaaacagcagaaggaggtagagaaggttaaaccccagtgtaaggaagttcatcagaccctgattctggacccagcacaaaggaagagactccagcagcagatgcagcagcatgttcagctcttgacacaaatccaccttcttgccacctgcaaccccaatctcaatccggaggccagtagcaccaggatatgtcttaaagagctgggaacctttgctcaaagctccatcgcccttcaccatcagtacaaccccaagtttcagaccctgttccaaccctgtaacttgatgggagctatgcagctgattgaagacttcagcacacatgtcagcattgactgcagccctcataaaactgtcaagaagactgtttgttagctttaggactgaagcattttgaagggactgagtttcttaaccctctaatcagcaagtaccttctaacctgcaagactgcccgccaactgacagtgagaatcaagaacctcaacatgaacagagctcctgacaacatcattaaattttataagaagaccaaacagctgccagtcctaggaaaatgctgtgaagagatccagccacatcagtggaagccacctatagagagagaagaacaccggctcccattctggttaaaggccagtctgccatccatccaggaagaactgcggcacatggctgatggtgctagagaggtaggaaatatgactggaaccactgagatcaactcagatcaaggcctagaaaaagacaactcagagttggggagtgaaactcggtacccactgctattgcctaagggtgtagtcctgaaactgaagccagttgccgaccgtttccccaagaaggcttggagacagaagcgttcatcagtcctgaaacccctccttatccaacccagcccctctctccagcccagcttcaaccctgggaaaacaccagcccaatcaactcattcagaagcccctccgagcaaaatggtgctccggattcctcacccaatacagccagccactgttttacagacagttccaggtgtccctccactgggggtcagtggaggtgagagttttgagtctcctgcagcactgcctgctatgccccctgaggccaggacaagcttccctctgtctgagtcccagactttgctctcttctgcccctgtgcccaaggtaatgatgccctcccctgcctcttccatgtttcgaaagccatatgtgagacggagaccctcaaaaagaaggggagccagggcctttcgctgtatcaaacctgcccctgttatccaccctgcatctgttatcttcactgttcctgctaccactgtgaagattgtgagccttggcggtggctgtaacatgatccagcctgtcaatgcggctgtggcccagagtccccagactattcccatcgccaccctcttggttaaccctacttccttcccctgtccattgaaccagccccttgtggcctcctctgtctcacccttaattgtttctggcaattctgtgaatcttcctataccatccacccctgaagataaggcccacatgaatgtggacattgcttgtgctgtggctgatggggaaaatgcctttcagggcctagaacccaaattagagccccaggaactatctcctctctctgctactgttttccccaaagtggaacatagcccagggcctccaccagtcgataaacagtgccaagaaggattgtcagagaacagtgcctatcgctggaccgttgtgaaaacagaggagggaaggcaagctctggagccgctccctcagggcatccaggagtctctaaacaactcttcccctggggatttagaggaagttgtcaagatggaacctgaagatgctacagaggaaatcagtggatttctttgagctaggagaataagagtctggagactgggagccttcacttcggcctccgattggtggcgcatagggtgtaaccaataggaaacccctaaagggtacttaaaccccagattttgcaactggggctcttgagcagcttgctttagcctgctcccactctgtggaatatacttttgcttcaataaatctgtgcttttattgcttcattgtttca

SEQ ID NO: 14988 - DNA, 29261 bp, Homo sapiens
ggaggagagaagaggaggtggagaaggcttgggctcgcgccgctgaaggtacgcgtgagggcctgcgctggagccggcttgacagggtctgagggggagtggagaactgggcgaggaggttcccgtgggtgagcgcgtacgggatggctggctcgcaggacggccgaaggtggtggttggtgggagcagccagcgacgagcccgtagacactcgtacgcgtgcgggctgacgtgcgcgctacatggccggagtcgggcgaagcgggggaccgtggggaagaacgcgaggagggaggagtgggaggttgggggtgtcgctaggcgcccttagctccctccctctggaggagctgccgcggccactctgctgccgccgctgccgccgccattttgggttcgctttgcgaggggaaacgatcccagtgtcggttgcgggatccgcctcctctcagtttgcccctttagccctccacctttcccttctcctctctcgcatttccgccagtcggcttacccgctggccgcctcctgacaagcgggagggatccgcggtggacccagggaagcggaggagcctggcggccaccccctcttcctcacttccctgtactctcatcgctctcggcctccgacacggtgagtagaacgatttgggccggcattcgggcctaagcactctctcagcgattgaatcctgggctttctgggagccactgtcatctcccggacctggacctctgggagagcagtggtgaagatgggggaggggagagcagggagggggatcctgagcctaccgggaagtccctccaggcggggtgaaggggtgtccctgacaggcagactcccggagggggctgggaagtaagcgagtggaggcggagtcggctgtgcccctgacaggttagtttgtgtttgtaggcatgatcggagcctcccccatagtccagtttgtgtgtgtttaattaagggataagagtggtcgaggacacgatcttgagaggggattttacctgtgtgacaaggtctgtggtgtccctgccgcgttgaacggtatgtgggaacgacaggatgatctcagtgttgtacgtttaataaatgtcactggttagtttgtacatggaaagagatgtttttggtctagcagacagatggtctgttggtgtgtagcggctgtgttggtgtgtgtatgtgaggatggcaagtgtttccgtaagagtttgcctttatttgtgtaagtgtaatggagttccccttataagttagcttatttcttgaataaatgttgggaggttccttgcaggttgatatgtgtgtgtattttagggattgggagcccctagttacttgttgggaaagagcggcaatggtagtgttctgtacagcatgtgtctgtgaggtcagggaggggagaaacttggcatagccagttgtggtcttaagaatagtttgtgcctttggttagagtgagttgtgtaaatgtgaagggccaaaatatctttaacagaatcattgctacaaagctgtaaagaatgggtggccttatttgttgtcgcgggtttatagtaatagtttacaatacaataagaaagctctttcagtttctttgtgatactgaatctctgtgaaaatggtaggatgctttcttccattttacaaaataggaaatttaggcataaggagagaacttctccaaggccgcatgttaaattggtgacaaagttggaactgtaactcccatattttcactactactgcagcagtatattcagcataccatggtgcctcaggaagtctttgtcggcaaatctgagtatgctggaaagataggagcacataagactggttggcttgtatttgggggagaccgattgtgtcagatatgtatgtggaacgtagctgtccttgccgagtctgacctgtatgaaatgcatatccatggctatattattttggatttatggaggaagcagagcatttctgacacttaaggttgtatgcgtgagggagaaggctttcacagcttaacttgtaccagagcagctgcatgggtgctgacagcttaacttgaaatctgtgggaggaaggatcctttttcactcattcaacaaatataaccattcaatgaatggtccatgccttgaggtgaggatcatcaaggtgtctctgtaaatagcctggatgcaatctgaggggagttgttttgacggtggtaggtattaagttgagggaggcagtgtggaattaaaaccagagaactgtttttgggtactggtaattgttaatatatgtgcctgtggatgttggaacttcttggctgggctgaaggaatcctttgaaagactgatttcggcagggcgcggtggctcacacctgtaatcccagcactttgggaggccgaggtgggcggatcacgaggtcaggagatcgaatcacgaggtcaggagatcgagactatcctggctaacaggatgaaaccccgtctctactaaaaatacaaaaaattagccgggcgtggtggcgggcgcctgtagtcccagctactcggggaggctgaggcaggagaatggcgtgaacccgggaggcagagcttgcagtgagctgagattgcgccactgcactccagcctgggccacagaggagactccatctccaaaaaaaaaaaaaaaaaaaaaaaaaagactgatttcatgtagtaaggatcccgtctatgaactctatgaatatgaggtaagaatgcatgaactaagccaacttagctgtattcttctggaaaatgggatgtttcttgataggctagattagtggttcttaaaagttttttggggtcacttatccttcagagaatcggatgaaagacactgggccctcaagttagaagatgagcataagcgcaatcacatgatttatatatatgattttaggaacttaaactgtaatgaaatagagccaatttatatttagatctcatttgaaaacctttcattttcattgttcgggtgtgtggatgttagtatgagtttaaggtgaaggagtctatgttagtatttgaacatgttgacaggatccatatttttaatttattctttttatcgtctgcaaacatttctgcagtattagtaaatgactctgtatttggtaaaaagggaagctaatgtcgcacaagtatctatggctttgttctttgtcagtatctttttgttctcaaactctgagaagcgtctttttttcagttttggattgggcctgaggtgatttgaagctcctgtcttggagtttaacttagttataacaaacactgagttaatcctatgcaggagacacaaagataattaatatatggtctctgtgcttgaagagacgctaattttctgtggttgaagagatgctgtgaattgtgtgatagtggcagctctcaaaaggacaaggaagagggaaacatattcctagaagctgaaattttattacccaattgcaaagactttttgtcactacttattcttaggaataaccataaagtgtttattttattctgtatggaactttgtactttaaaaaaatatgttttgtatcatctggtgtttttgtataaaggaactgttggtttgaaaagaaggtaaacatcatttatattccttaccttgttttgggatgtatctctacagtgagtttatgtaaaaaggtcttaatgtcatttttgggtatacatacatgtagaaagccctcctgatataaaatccagtagctatttgacagactacccattaatttattactggaacttaaaaataattactgtacttttaaaagaacaagaaattggtcaggtggggtggctcacgcctgtaatcctagcactttgggaggacgaggcggatggattgtcagagctcagaagatcgagaccagcctgggcaacacggtgaaaccccgtctctactaaaatacaaaaaattagctgcatgtgttggagtgcacctgtagtcccagctactcgggaagctgaggcacgagaattgcttgaaccaagaattgcttgaactgggagggggaagttgcagtgagctgaaatcatgccactgcactctagcctcggcatcagagcaacactctgtctcacaaaaaaaaaaaaaaaagcaagaaatgtaaaaaggtgttttaataggacagattataggattcagtgagataatggagaagttttaggaaaaattgtctgatagtcctttctttctattgacatggcccctgtataagaatgctatgtaaatttgtgaaaagtttaatattttctctaatttttaacgggtagtaggttcatggtgttatttttctcaaaacgtacatgtgatatgtgtgtgtagtgtgcatatatgtgcatgtatgtgtatacaatttctttatttttttaattgagattaggtctcgctatggttttttgtttttgtttttgtttttgagagagagtttcgctctcctcgcccaggctggagtacaatggcacaatcttgcctcactgcaacctctgcctcccaggttcaagtgattctctttcctcagcttcccaaatagctgggattacaggcgcgtgccaacacgccctgctgatttttgtatttttagttgagacagggtttccccacgttggccaggctggtcacgaactcctaacctcaagttctccagccgtctcggccttccaaagtgctgggattataggagtgagccactgcacctggcccaggtcttgctatgtagatcaatctggtcttgaactcctggcctcaagccatcctcctgtcttggcctcccagtttgctgggattacagatgtgagccagcatgcccagctctttttacctgcttaccaaatccaagattttctccaaaatgaactggaatagccttcttactgtgttaattttgccttggtggggaagcctaagtcttggaactaaattggggtggttatgacagttctctttttaaagctgatcagtatttcagtatttcacttgttgttgttttttttgttttgttttgttttttttgagatggagtcttgctctgtagcccagtttggaatgcagtggcaggattttgactcactgtagcctctgccacccggattcaagtgattctcctgcctcaatgtcctgagcagctgggtttacaggcacgcaccactacacctggctaatttttgtattgttagtagagacagggtttcaccatgttagccagtagccaagctgttctcatactcctgacctcaagtgatccacctgcctcagcctcccaaagtgctgggattacaggtgtgagccaccacgcctagccaaacccatctctttcattaaaccacctcattttggttcagaaacaagactgccatgtatgtatttaatgcttattatgtgccaagcactattccaggtactaagatacagtgatggacaaaacaagatcccttctcctctatctcaggacttattaatttgggcattttcattttccaatataggatcttttagtactggtataggattcctgaaggaattcctgaaatataattatttttctgctagagcaaatcaattttgttttttgttttttttttgagatggagtttcgctcttgtcgcccaggctggagtgcaatggcgcaatctcggctcactgcaacctccgactcccgggttcaagcgattctcctgcctcagcctcccaagtagctgggattacaggcattagccaccacgctaggctaatttttgtatttttagtagagacagggtttcaccaggttggccaggctggtctcgaactcctgacctcaggtgatcctccaggctcagcctcccaaagtgctaggattacaggcaggagccaccacgcccagaagagcaaaattcttctgttgacaaaaatttctttcctctgaggaagagacactgtgtgcctgtgttttatccaggaattccattggatagtttgtcctttgggatgtcagtggattaaatcctccattaagaatcaaagtacttggctgggtgcagtggctcatgcctgtaatccctgcactttgggaggctgaggcaggtggatcacctgaggtcaggagttggagaccaacctggccaacatgatgaaaccccatctctactaaaaatacaaaaaattatccaggtgttgtggcaggtgcctgtaatcccagctactctcgaaaaaacagaaacaaaaactctgacatgtagagtatgtagatgtagagaaaaaagtaaaatgattgttgaaaaaaatgtctattttttatcttctaaatagctttgtgtgtcagagatcagaacgctcattttacatgatatcaagaaccagaatgctagatagctagaatggttgttaacttcctagataaccattgtagaggaacacataaggtaaaacaaatgaataaaaattaaaaaaaaatgagatagccaaagatttgaagctctttacccattaacatgataatcatttcgactttgaatatttgtagaacaagagtcagaactcagaacaaagatctctgaggaaataaaaaaaaatcaagctgcctcctaatttctcatttagtctgtcattgggcattgtcaaactgtcaaactatatttagagattctggttttcatctggagacttagtgagttgtgtaatatcttgaatacacatataagatcttgccaggtggggtggctcatgtctgtaatcccagcactttgggaggatgaggtgggaggatcgctggagcccaggagttcaagaccagcctgggcaacatagcaagtccctggctctatttaaaaaaaaaaaaaaaaaaaaatcctcaatgtagaactttaaatttatccttacgtgttacatccagttgatttgagaaaatatgattctgaattttccatcaattggattggcagtccctttcagctttacagctttacatcatctacagatttgttaagtatgttctcttggtcttctaattcactgatggagtttttgaataggtcgggtccaaagatagagtcctatgaaacactgttggaaacttgtctctgtctgtctcttttttttttggagacagtgtcttgctctgtcgttcaggctggaatgcagtgggacggtctcagctcactacagcctctgcttcttggactcaaagagattctctcacctcagcctctcaagtatatgggactatatgcatgtgcgaccaagcccagataaatttttttttagagatatgttgacattttgcccaggttgggagacttgtctcttgattccattcagtattgtgtgggtttggataggccatctaattataaaatcattgggctggtcatggtggctcatgcctgtaatcccagcactttgggaggctgaggtgggcggatcacctgaggtcaggagtttgagaccagcctgaccaatatggagaaaccccatctctactaaaaacacaaaattagctgggcgtggtggtgcatgcctgtaatcccagctacttgggaggctgaggcaggagaatagcttgaacctgggaggcggaggttgcagtgagccaaaatcgtgtcatcgcactccagcctgggcaacaagagcgaaactccgtctcaaaaaaaaaaaaaaatcatctagctcacattttctccttgtcttcttcctattagaatttaagttcaatgagattagaactctctctctctctcattctctcatatatcccaagcatctaaaacagggattgaaacatagtaagtactcaataaatgtttttgaataaatgaatgaaggatagctgggcgtggtggctcatgcctgtaaccccagcactttgggaagccaaggtgggtggatcactggagctcaggagttcaagaccagcttgggcaacatggggaaaacccatctctacaaaatatggaagaattagccgggcatgacagcacactcctgttgccccagctacttggagggctgaagtgggaggatcgcttgagcctgggaagcagagattgcagtgagccgagatcaagccactgccctccagcccgggtgacagagtgagaccctgtctcaggaataaggatagatatgaagaattcgtcagatgccttgttgaaaacatcatacattgtctacatggaattcctccatattgtaaaatgaatctaatttataccaacaacgtttggcttttttgcagaaaaggaagcaaatgagctgatggaagatctgtttgaaactgtgagtaatgatcctcaagtgagaacatgggattgtaagttggttctccaacaaaatgtgtcctttgatctctgtgatgctccttctagaagagggactgaaccaattctccttttagtctacctgggaaagaatataatgacaaaagaaatttgctaactgctagactcttgattatccacatgtaggttattcttactaaaattttccttgaagctttttttttttttttttgaggcaaagtcttgctctgtcacccaggctctggagaatacagtggtgaaatctcagctcacagcagcctcgacctccagggctcaaaacaattctctcatctaagcctcctgagtagctgggactacaggcacacacctacaggcccggctaattattttatttttttgtagagacagggtcttgccatgttctggaactcataggctcaagtaatcttcctgcctcaacctcccaaagtgctggaattacaggtgtgagccagcacatcttgccccttgaaaacttttgatggcttcccctactgtcatttggtgtgtccttaaagattgccaactagttttaaagtattttgcacacaaataattaccttttccataaatttgtctaaaaagatatttctgtttaagaaattgatcattttgagttatcctagctctgtgcttactgatacaagttgactggttgagcaacttctttcctggcataatagtcattccatatgtgggtttgtaggagtcctgaagtgagaaaggttctgatgtaggctctttctgggtgccagcattattaaagtattgtttatagttttcacttttccttcccaacactggagcaacattcaaaagcccattccccaggaaaaccctccctttcctttgcccacagttccaagatgagatgggattctccaacatggaagatgatggcccagaagaggaggagcgtgtggctgagcctcaagctaactttaacacccctcaagctctacggtaggctagttgaagaccttgagatttggaatagaggaagagtttatttctgaaaaggttttcagaagttgcagttaacaatttttcatccccagccagcttctgttactgatgtaaggatgcagagtcctgtcaggagttaggtgtcaagtgaagtctccttgttatggggcagtgcagctgtaggccaagctgtatctgtttgggaagggagaaaaaacagtagctggcatccatatccacttctccgggtgagtggtgctggagaggtatgtaggactcaatgtggccagccacacaaactaccctatattgtaatatccagtctgtcccttttgttctttttatgtgccattaatatctgctaaatgtgactgaaaatttgttagtcacctaggcattagtggagcaaaccctgaagcacctgcagtaaggagtctgaaacatacgtgctgacctttttgcctaaagttggcacttgtgttacagcatccagaaagtagaggctttaattttttcctcattttgtggtggatttgcatctgcactttattctgttgtagcagcatataatcattaggtcgatggcgagaggtcaggatgcagtttgtgccataagtggaacaaagcaaagagaatagtccctgtaattagtcctgtgtttgaacttaacagcactactaagcagagagcttgggttccatctgaaagctagacctttagggattttccaatttagtgaaaaaagataagataggccaaccaatgtcttaaaaactagaactactagtcattctccattacaacaaatatcacaatacaactacatcaaaaatctcaagattgctaagtcagtatttgacccattattttaatttatagttcatagaacaaaattctggtatagcagaatggaaccattcatcctgggaacgtataataggatctgattaataaatattttggttttgctgatcaactctttataacttcttaaaatttggaaaatatagaactaatttaaaattcctgttagaatccagttaccttctggtattcaatggaatatagtcatatatcatctcatggtcataccctctgtgaaatctatcattaaacgattcatcattgtgtaaacatcgtagaatgtacttacataaacctaaatggtttagcctactgcatacctattgctcccaggctacaaaacctgtacagtgtgttactgtactgtactgaatactgtaggcagttgtaacacaatggtaagtacatatgtatgtaaacatagaaaaggtacagtaatcttatggagccacctctgactatgtggttcgttattgactgaaacattctgtggcgcatgactgtacttgggcagcttctgcttctctttcgattgcaaatacaaacctgtttttgttttaatctttgactaaataaaaatccctctgtaagtccatagagagtaagcacatcttaaaacacaataaggaagagagaggagaaaaagacagtcaaaacaaaaactctggggcttcccttatcaattacctaaataatccttgttaaaactaagtgcaggctatgtttccattttctacttttttatgcttcttctcttctgttccttcagtggtggtagcgcggatgttcaaattttcagttctcagtaaagattgtatagacagtcccacggtcttcaggtttttactctgtgctacccaaacctacagtaaatactataaaagaaaacttattcaaacgtaatctttatctgcaaaaactattgaaaaacgttaccatttaactattgctgtaatatagggggttccttgaaatatgataacctgcttgttatagctacttcagcagatcttatcctgttgcatagggtatcagcatatgcttaatcatttaggtatattattctccctttatttctttctatgtaaacatagaaaaggtatagtaatcatacatagaactgacatgctaggtattggaatttttgcttcagccctgcaaacaatctttcaggagggtatggatgggaagttagggttaggaaccttggaagaggaatttaaagggctaaaagaagatagccttcatggataatattttaactaacttctccgttctgttcatttgaactaccatgtacttcagttattttggtatatccttttcctgcttcatgctagaaagtctttgacttgttaagaaagcagggcagtgcagcctgagtagataggataatgggacaagctggacctgggatgggagtaacatcccagggagtaacaagtaatgagagaagaaatgagaatgatgagttcccaccagctccttggctgctttcttacccatatatttctctgtccctagttttttgtttaattttttcttcatttgtatattatttggaagaggaattgtagaggaatgggatggggtgtaatacagaatcatttgatgcatgctaactactttgggaaaagatttgtgtaaggctgggagtttgactgttggctaaagtgaaaaggggggattagtagggaatgaaaattgttcaggctctttgctcatcattgcaaagaattggatgtgttgtggacctaggaaaacactcaaattcagtcatccccgtttgggataggtttgaggaactactggccaacctactaaatgaacaacatcagatagcgaaggaactatttgaacagctgaagatgaagaaaccttcagccaaacagcagaaggaggtagagaaggttaaaccccagtgtaaggaagttcatcagaccctgattctggacccagcacaaaggaagagactccagcagcagatgcagcaggtaacactttccttggtcatattaatattgaattataccaaggcctaactctgaggctttggtataatctaaaattagcagctttgtaaatgtcagagatagttaccttactacgtattaaaaccgtagtatcttcacatcagttaggagcttgagaagtcatcatgttcatgtcctgtggctcagggaagacagcacataaggaccctaatggtattcggaattacagatttcaaagagtcctcagtaatctattctgaaatttaaccttcactgtgacaagtagttttttttcccttttcccttttcttttttcttttttttttgagacgtagtctcgctctgtcacccaggctggagtgcagtggctcaatctcagctcactgcaagctctgcctcccgggttcacgccattctcctgcctcagcctcccgagtagctgtgactacagggactcgccaccacacccagctaattttttgtatttttagtagagacagggttcactgtgttagccaggatggtctcgatctcctaacctcgtgatccacccgcctcggcctcccagagtgctgggattacacgcgtgagtcactgcgcccggccttttccttttctaatctcagttcctcctctgtttagaggttaaacttcctctggttctgtcattttgttcaagggaacatgtctgagaaatttatgccaagatcctacgttgttctcacactctttgcagaaagcaaaatttgtgtcataaagttgcaaacatcttagttaatgactctctggtggctgggtgcagtggctcacacatgtaatcccagcactttgggaggctgaggtgggaggattgcttgagcaggggagttcaaaagcagcctggacaacatagtgagactctgtctctacaaaaaataaaaataaggctgggcacagtggctcacacctgtaatcccagcactttgggaggccaaggcgggtgaatcatgaggtcaggagtttgaggcaagcctggccaacatggtgaaaccccgtctctacgaaaacaaaaaattagctgggtgtggcggcgggcacctgtaatcccagctactcgggaggttgaggcaagagaatcacttgaacctgggaggcagaggttacagtgagccgagatcacgccattgcactccagcccaaaagtcagtgcgagactctgtctaaaaataataataataataataataaaataaattagccaggcattgtggtcacagctacttgggaggctgaggtgggaagattgcttgagcacaggtggttgagagggcattgagtcatggttgcaccactgcactccaagctgtgtgacagagcaagaccctgtctccagggggaaaaaaaaatatctctgggctcctgaaatggcagtgtcataacatatcactgcattattttctttctctccccagcatgttcagctcttgacacaaatccaccttcttgccacctgcaaccccaatctcaatccggaggccagtagcaccaggatatgtcttgtaagtttccaaattgccgtaattctatagactagaatataaaattagcttggcaggttatttctcacagttattctctcaggtatttttgattgctgtggcttcctatgtttgctgagtgaacataagccactgattcacatgaaaggacaaagagtgtattcaattttttcttttcttttttgagacagggtcttgctctttcacccaggatggagtgcggtggaacaatttcagttcactgcaacccctgcctcccgggttcaagtgattctcctgcctcagcctcccaagtagctgggactacaggcgggcaccaccacgggtaattttttttgtatttttagtagagacagggttttgccatgttggccaggctggtctcgaattcctgacttcaagtgatctgcccacctctacctcccaaagtactgggattacagccatgagccactgcgcctggcctgtccttctgatatttttattgggtcctcctcctcatctttagattcaccctgacttcttaggtttttggtaccgctattcatttcatagatgttgaggctgggcatagtggctcacacctgtaattccagcactttgggaggctgaggtgataggatcacttgagcccagtggtcaagaacagcctgggcaacatagtaagacccggtctgtgttttttttgttttgttttgttttaatttaaataatgaagtaaatatacatgtagatgttgaattcattatccattcatgaagctcaatattagtgttttatgtgtagagctagttttgctcatgacgttttgaggtattttgagctttttttttttttttttttttttttgagacggagtctcgctctgtcgcccaggctggagtgcagtggcgggatctcggctcactgcaagctccgcctcccgggttcacgccattctcttgcctcagcctcccaagtagctgggactacaggcacccgccactatgcccggctaattttttgtatttttagtagagacggggtttcaccgttttagccgggatggtctcgatctcctgacctcgtgatccgcccacctcggcctcccaaagtgctgggattacaggcgtgagccaccgcgcccggcctattttgagattttaaatttgaaatttggccaggtatggtggctcatgcctgtagtcccagcactttggtaggtcaaggtgggaggattgcttgagcccaggagtttgagaccagcctgggcaacatagtaagaccccatccctaccaaaaaaataaaaaataaaaaaattagctggggatggtgccgagtgcctgtagtcccagcaacttgggagactgaggtaggaggatcacttgagcctgggacgttgagactgtagggagccgtgcttatatatcactccagcctgggtgacagagtgagaacctgtctcacaaaaacaaaaccatactttacctcataaaaattgcctcaaacttttggacaggtaatgataatactctcagcttcttcagtaagtcttctttggattttgaagagtacatttgctagtattctaaaacttccttggtgatcaacaggatgtcttcatctcttactgtattcagaggaggatgaggagtacttggttgtaggcattattctgagaccaaaagacaaaacaattttaaaagtaatggtcctggtcgggtgaggtgactcatccctgtaatcccagcactatgagaggccgaggcaggcggattgtgagcccaggagttcgagatcagcctggccaagatgggaaaacgctgtctctgcaaaaaatacaaaaatcagctaggtttggaggtgtatgcctatagtcccagcttctcaggaggcagtgggaggatggcttgagcctgggagggggagtttgcagtgagctgagatcatgccactgcagtccagcctgagcggcagagtgagaccatgtctcaaaataaattaattaattaaattaaagtaatagtccccattcttgagactcttaattctagctcgggagctagaccatgtattccttagtgagaaacagtttaaaaataaaacaagaatataatccctgaatatctgagaactcaggcataatcttaacagtagtttattgtgaaagactttatgattatttttacctgtttttatcctgtagtaggaaggtcagcttctcatttagattctgaaggctattggtattaattgtctggaattgtcttagatcttccttgtgtcgtgttttcccagaaagagctgggaacctttgctcaaagctccatcgcccttcaccatcagtacaaccccaagtttcagaccctgttccaaccctgtaacttgatgggagctatgcagctgattgaagacttcagcacacatgtcagcattgactgcagccctcataaaactgtcaagaagactggtaggagacagatgtgtcagctttaagtttttacttgcggtgagaggtggtgggaatcttatcccatagataacttcctaggatacttgcctaggaatggaggacacaggacatttgtaatttcttccttctctcttttatcctccctttgtactcattatccaagttctagaattacatgataatctccgggcctgggtaaggcatggaggcagtggacagtataggaatatgggaggtagagatctgaggctcagtgctaagaattggactacagcaatatgaggggtaagtattaggaatcagatcaagataaactggggcctggtaaagatgaaagtcaggtggtaaagttcggtcatgtttagctttttattctcttcattaagatcaactaactttatttaccataatgattgtagcataggtgatatctccattctgaatgaaatgttgacttgcaagttaggcgtaaattagagattgtacatttgccgtgttcagtattttaaagaaatttgccggtttagattctaccttgcattggtttagtattttttgagaaaatatttgctatttacttaagccaaatatttacttctgatttgtttgctgacttagcaaattagttgtggtttgttctggatttgggtttgtctttggattctattttaaatccctaagtcttatcattacattgaatgtagttgaatttaagtgtactatatcatagacacagatcccaaactactttaatagctatattatatgaaatggtaatgaaaacgtgatttaataccaaattatagtattatcttacacatctagtgtcctgtgtttttcttctggagatataaaaatgacacttatggaaggagaaatatggatatagtagttttgtctctagaaatgcagaggtgcctaaaattgagaggctgagagagggagacagaaatgaatgagactgaattgtctcattccttttatggttcttttgttcccaacctcaggaggaatctgggagaacttaatgaaagttaagaaagaatgaaataaaagtaaaatttggaataccaggtttgtgagggagattaaagaagttggaatcttttttcttttttttttttttaagatggagtctcgctctgtcacctaggctggagtgcagtggggtgatctcggctcactgcaacctccgcctcccaggttcaaacaattctcctgcctcagcctcccaagtagctggaattacaggtgcgtgccaccatgcctggctaatttttacatttttggtagagatggggtttcactatgttggccaggctggtcttgaactcctgacctcaggtgatccacctgcctcggcctcccaaagtgctgggattacaggcgtgagccagcacgcctggcctggaatcttatcctggaagaaaaaagcattgttgaaggtctgttatccttcagagatttaaaggggaaaggaggtaaaacatttttgagcatacactatgtgacaggtattactaggtactttttaagtgtttgttttactttgtgaataaagtgttacacgtaagaaagagtaagagaggccgggcgccgtggcttacgcctgtaatccaacactttaggaggccgaggctgtcggatgacaaggtcaggagatcaagaccatcctgtctacagtgaaaccccgtctctactaaaaatacaaaaaatcagccaggcgtggtggcaggcgcctgtagtcccagctactcaggaggctgaggcaggagaatggcctgaacccgggaggcggagcttgcagtgagccaagattgcgccacgcactccagtctgggcgacagagccagactccgtctaaaaaaaaaaaaaaaaaaagtcaacttttattgccagtgaatgggactccctttagacctaatgttagttgaggaaagactgtggaaactctttggggagtggtaggcagatgggagggaatcaagttagataaggacagctctacctaaatgcaaaaatgcattcacaggctttttgaagccctcttttttcctagaagttgatttatcagagatttattttcttatagccaatgaatttccctgtttgccaaagcaagtggcttggatcctggccacaagcaaggttttcatgtatccagagttacttccagtgtgttccctgaaggcaaagaatccccaggataagatcctcttcaccaaggctgaggacaagtaagtgtttactctgggggatcaaatatcccaaggagaagatgtagttcctttgaggagtttaggggaagtaagacttgtataataagacatggacacaaaaggaaaagcagtatagatgagcagagtcctctagaacgtgcttgttctagcagtgccaaatactgctttttggggggatgttacacacatttttaaaatgttttagactggacatggcggctcccacctgtaatcccagcactttgaaaggccaaggcaggaggttggcttttctaatgttattatttatttagagacaggatcttactctgtcacccaggctggagtacagtgttgcaatcacagctcactgcagccttgaactcctgggatcaagtgatcctcctgcctcagcctccatggagtagctgggaccacaagcgtgtgccaccatacatggctgattttttttgtacaggtgagggtatctctgtgttgcccaggctgctcttgaattcctgacctcaaatgatcctcccactcctggcctcccaaagtgctgggactataggcataagccaccacacccagctagattatgaacatttttatggccctttgtgtgtattgccacactgttaacagcaaatatgtatatatgtaaccatgattatatatgttatgttagagggtagtattggtgccagtttaatttgtctgacggggtacctattattcattttatatttgttttattagaatcattctccttcccatgtattctctttgaacttcctttgtgttgttaatatacagctcatcatgatctgacatttattgatgatttatgactagtttctcttgctcctacttaattgtgaactatttgattcttattcatagtacttaatcactactcactaaatacctgaaattttctactgagtagtcaccaacttgtagtagtcactacaagaattagttgtagaaaaagtagattggccagccatggtggctcacacctgtaatgacgacactttgggaggccgaggcaggaggatcacttgaggccagaagttcaagatcagcctaggcaacaaagtgagaactggtctctacaaataatgaaataaaacattagttaggcatggtagcaaacgtttatagccacagatactcaggaggctgaagtgcgggaatcgattgaacccaggcattcaagactgcagtgcactgtaatcatgccactgctctccagcctggacaacagagcaaaaccctgtctgaaaaaaatgaaaaagtagattgggccacacgccatgggctcatgcctgtaatctcagcactttgggaggctgagactggagaatcgcttcagcttaggaagtagcagctgcagtgggctgcgatcacgccactgcactccagcccaggtgacagagtgagaccttgttttaagaacaagtaagaaaaagtagattgtaaaatgtgttagtctggggaggccctttagaaggaaggactgtgaagtgagatttagtgttattgctcctttctcagtttgttagctttaggactgaagcattttgaagggactgagtttcttaaccctctaatcagcaagtaccttctaacctgcaagactgcccgccaactgacagtgagaatcaagaacctcaacatgaacagagctcctgacaacatcattaaagtgagtgtttcctgcatgcactatccaggcacctcaccaacacatatctgttcttttctcttgttattctcaaagaaaagaagaaccttcttttatctaaagctaatttctcctacttatatactagattaattcccctgttgccttttcagggacattgattcattcattacgttcctctggagtatcttcatcctcttaaaagattccacaaatccatgtttccctgtaataattctctttcttgaactttctagaaatgatatgcagtattccacttacatgctttgggtttttgttttgttttgtttttttggtcagacataatcttgcactgtcacccaggctggagtgcaggagtatagtggcatgatcttggctcactgcagcttccgcctcccgggttcaagtgattctcctgcctcagcctcccaaatagctgagattacaggcgtgcccaccacgctcagctaattttttgtatttttagtagatacgggtttcaccatgttggccaggctggtcttgaacttctgacctcaagtgatccaccagttttggcttcccagaggctaggattgcaggcataagccaccgtgcccagcctatatactttttctcaattttgtgtttgtatgtatgcatgtatgtgtgtgtgtgtgtgtgtgtgtgtttgtgtgtgtctgtgtctgtatgtatgtatgtatgtatgtatgtatgtattgagatggagtttcgctcttgtcgcccaggcccagcctatatactttttctcaactctttttacttattgattgattgattgagatggagtctcgctcttgacccccaggctggagtgcaatggtgcgatcttggctgactgcaacctctgcctcctgggttcaagtgattctcctgcctcagcctcccttgtagctgggattacaggcccctgccaccatgcccagctgatttttgtatttagtagagtcggggtttcaccatgttggccaggctggtctcgaactcctgacctcaggtgatccatctgcctcggcctccctaagtgctgggattacaaatgtgagccattgcccccagccttcttttttatttagatatttatttatgtttttttttttttttagagacaggttctcactctgtcatcctggctggagtgcatgggcacaatcataggtcactgcaacctcaaattcctgggtgatccttccacttcagccttccaagtagcttggactacaggtgcatgccaccaaggctagccgattattttattttgtgtgaagacagggtgtcattttgtttcccaggctggtcttgaagtcctgacctcaagcagtcctcttgcctcagctcggcctcccagagtgttgggattacaggcgtgagccatgatgcccagcctttggtttcattgtgtttttgtatttttcttgagacaaggtcttactctcctgcctaggctggagtacagtggtatagtcatagctcactgcagccttgaactcctaggctcaagcattcttccaacgtcagcctcccaaggagctgggattatatgcattagccactgtgcttggccattaaatttatttatttatttattttattttatttttttgagacagaatctgtctctgtcacccaggctggagtgcagtggcacaattttagctcactgcaacctccacctaccgggttcaagcaattttcatgccttagcctcctaagtagctgggactacaggcatgcgccaccacacctggctaatttttatatttttagtagaaacataatttcaccatgttggtcagtctgatcttgaactcctgatctcaggtgatctgcccacctcggcctcccaaagtgctggaattataggcgtgagcctctgtgcctggcaaaaaactttttttttttagggatggggtgtccctatattgcccaggctggtcttcaatttttggccttaggcaattctcctgtctcagcctctaattggtactgcctggtgtattggatttaggccttacttattaaccataaaccacggaagccgaagatttacctctctcctcactcccttactcccaccacaaacatgcacattttctgctctccaaactcctcactagtagttatggtagaattttggttagattgtattcagggtttacattgtaagattttaaggactgttggctgggcgcggtggctcacgcctgtaatcccagcactttgggaggccaaggcaggtggataacgaggtcaggaaatcgagaccatcctggctaacatggtgaaaccccagctctactaaaaatacaaaaaactggctgggcgtggtggcgggcgcctgtagtcccagctactcgggaggctgaggcaggagaatggtgtgaacccgggaggtggagcttgcagtgagccgagatcgcgccactgcactccagtcttgccagagcaagactccgtctcaaaaaaaaaaaatagattttaaggactgtataaatgctcttcacagctcagctatgttactgtgttaccttgcctttcctgctgaacattttgtttcccagatcatcttctttcagtgtgttcaggtattctagatattctgtcactttcatcttgaagaaattgctccctgagccctctgacattattccactttaagcgtgttgctctccatgttgctgcactgatgtcttcttgggctttttcttcaccatcatcccaggaattccttttgcctcatactgtgttagatcctcttatttcctgaattccacatctttgcttttgcattactttttttttttttttttttttttttgagacacagagtcttgctctgtcccccaggctggatctcggctcactgcaacctgcaaccttggtcttggtcttgaactcctgacctcaggggatccacccacctcagcctcccagagtgcggggattacaggcgtgagacaccacgcctggccttgttttttgttttgttttgcttttttttgagaccgagtctcgctttgttgcccaggctggagtccaaaggcgcgatgatcttggctcactgcaacgtccgcctcccgggttcaagcaattctcctgcctcagcctcccgagtagctgggattataggcacatgccactacgcctggctaattttttgtatttttagtagagacagggtttcaccatgttagccaggatggttttgatctcctgacctcttgatccacccgtttcggtctcccaaagtgctgggattacaggcgtgagtattacttctttactttagtggaacacattctagtagcttttttttaaaaaaaatttttttctgaattttaaaaaattgaggtgggggggtctcagttttttgcccaggctggtctcagactcctgggttcaagtgatcctcctgcttcagcatcccaaagtgctgagattataggcatgagccaccctgcatggccccattccagtagcatcctgagggagagtgcttgggaagggaattttcacatttaaaccatctccggggccgggcgcagtggctcacgcctgtaatcccagcactttgggaggctgaggcgggtggatcacgaggtcgggaaatcgagaccatcctggctaatgtggtgaaaccccgtctctactaaaagtacaaaaaaattagccgggtgtggtggcgggcgtctgtagtcccaggtactctggaggctgaggcaggagaatggcgtgaacctgggaggtggagcttgcagtgagccgagatctcgccactacactccagcctgggtgacagagcgagactccgtattaaaaaaaaaaaaaaaaaaatctccattcatggtcttttgattgtatcgatgtcagtttcctcgtttttgtttttgttttattttttttctttttttgagacagagtctcactgttgctcactgcagcctctgcctcctgggttcaagcgattctcctgcctcagcctcctgagtagctgggattagccaccacacccagctaatttttgtatttttagtagagatggggttttgccatgttggccaggtgatctcgaacccctgacctcaagtgatctgcccaccttggcctcccatagtgctgggattacaggcatgagccaccacatcctccatgtctggccagtttcctggtagtaatattgtactgtgtaccttgtttatatgtatagctcttgtttctatgtaacataaaaacattatattgggagaaactggttgaagggtacatgggacctcttggtactattttttgcaatttcctatgaatataattatttcaaaataaaaggaaaaaataatactctcctctgtcactgtatctagaattctagataggaaataatttttttaagaagcttttaagggcctcacttcattttcttctaactcctagtgtggtgttaagaaatttcatgccatttaactttttttttttttttccgagacagggtcccaccctgttgcccagtttggagcgtggctaaatcatggctcactggtgtctccaacccggtgtgcaccactatgcccagctaattttttttttttttttttttaagacatggtctcgttatgttggccaggctggtctcaaactcctggcctcaagtgctcgtcctgtcttggcctcccaaagtaatgggattataggcatgagccatggccccatttaactcttgagtctttgtgtaacacctgtttttctcaacctctgacagcatgcaggatttttcctttggcttcaatattttgaaaatgcatgataatatgccttagtatttgtctatttttatccatggttttttaaaaagtactttctttttgtttttgtttgtttgtttgttttgagacagagtctcgctccattgcccaggctggagtgcaatggcgtgatcttggctcactggaacctctgcctcccaggttcaagcaattgtcctgtttcagcgtcccgaggagctgggactacaggcgctcaccaccacaccctgctaatttttgtatttttagtagagacggggtttcaccttgttggtcaggctggtctcaaactcctgacctcgtgacccacccacctcagcctcccagagtgctgggattacaggtgtgggccaccatgcctggcgtatccatggttttaaggcacacgtgataaaccttattcttctgcagaaataatttttttttttttttttgagatggagtctcactctgttgccaggctggagtgcagtggcgtgatgtcggcccactgcactctccacctcctgggttcaagtgattctcgtgcctcagcctcccgagtagctgagattacaggcacgcgccaccacacttagctaatttttgtatttttagtagagatggggtttcaccatgttggccaggatggtcttgatctcctgaccttgtgatctgcctgcctcggcctcccaaagtgctgggattacaggcataagccaccacgcctggccagaagtaatttgtgtttaagttttagttttgtgtcatttttcgtgcacacctttgtacttttgttgggggatggggcggggtgtcggggttggagtcttgctctgttgcccaggctggagtgcagtggtgcagtcttggctcactgcaacctcttaattcctcagttcaagtgattctcctgcctcagcctgccaagtagctaggatcacaggcgtgcaccaccacacccagctaatttttttttgtactttattagagacagggtttcgccatgttggccaggctggtcatgaactcctgacctccagtgatccatcctcctcgttctcccaaagtgctggcattacaggcatgagccaccatgcccagccctttgtacattttttaatgtaggatgccatttgtccacttgactctcccactagtctgtaagctccatgagagcaggaattgcttcccttatgtgtgtgcttagcttttagcacagtgcctaggatatagaaaacatcttatgttcatcatgttggatgaacagatgcttattgtcatggtttaagttcagttcttatcttctttttttttttttgagatggagtctcaccctgttaccaacgctggagtgcagtggcatgatcttggctcactgcaatctccaccctaccacccccactgccaggttcaagcgattcttttgccccagcctcccaagtaactgggattacaggcacccaccaccacacccagctaatttttgtatttttagtagagatggagtttcaccatgttggccaggctggtctcaaactctcaatctcaagtgatctgcccgcctcagcctcacaaagtgctgggtttacagatgtgagccaccaaggccagcctatttactcttaaaactgaactgcctcggtctttttttttttccttcccttctgatgcccttcacaccatcatttgcttaaagtctttgatgtgtccattttatagattacgatgctgtctttgcagctgttgagcaggaacaaatcttacataagattgctcttagcatctgcttccttttctctctgtgacctaaactctccccttcctggcaaccagaatggagatcatcagttagaaaatattgaatagggctgggcgcggtggctgacgcctgtaatcctagcactttgggaggccgaggcgggtggatcacgaggtcaggagatcgagaccatcctggctaacacagtgaaaccctgtctctactaaaaatacaaaaaaatcagccgggtgtggtggcgggcacctgtagtcccagctactccggaggctgaggcaggagaatggcgtgaacctgggaggtggagcttgcagtgagcggagatcgcgccattgcactccatcctgggcgacagagcaagactccgtctcaaaaagaaaatactgaataactataaaatctttaaatagagattagtttaatttgaaatgtacaagtattcagcatatgctattcgtatatgtgtgttcatggatgtttgtgtatgtggtcttgtgtgtgtgtgtgtgtgtgtgtgtgtgtgtgtgtttctcttgatccaccaccaccccattcaccagcctgacagaagacagtgtttccagaaggaatgtaattcatgcgcatttttttcatgttaagttttataagaagaccaaacagctgccagtcctaggaaaatgctgtgaagagatccagccacatcagtggaagccacctatagagagagaagaacaccggctcccattctggttaaaggtacagccctcttcctcgaagtctgtaggaggcagaaggtcactgaaagttctgagagaatatcaaggacttccttaatcgtctaatgctttagttgtagaactaggacttcaggaatcttcctgattcacctttcttcccttacttttctgcccttctccgggtgattctacaacattttcaaaataatgggtaaaatggtaatttgctaaaggaaattcagagaagagtttctaaagtgtataattggactgtggtctttgtagaaatttcatatgcagagtcccttggaaagatgccttgagcttgtctcaggtccctaaacttagaaagtcctattctttttcccaaattctgacatgtgctggatcagagtgttctcatttccaataggccagtctgccatccatccaggaagaactgcggcacatggctgatggtgctagagaggtaggaaatatgactggaaccactgagatcaactcagatcaaggcctagaaaaagacaactcagagttggggagtgaaactcggtacccactgctattgcctaagggtgtagtcctgaaactgaagccagttgccgaccgtttccccaagaaggcttggagacagaagcgttcatcagtcctgaaacccctccttatccaacccagcccctctctccagcccagcttcaaccctgggaaaacaccagcccaatcaactcattcagaagcccctccgagcaaaatggtgctccggattcctcacccaatacagccagccactgttttacagacagttccaggtgtccctccactgggggtcagtggaggtgagagttttgagtctcctgcagcactgcctgctatgccccctgaggccaggacaagcttccctctgtctgagtcccagactttgctctcttctgcccctgtgcccaaggtaatgatgccctcccctgcctcttccatgtttcgaaagccatatgtgagacggagaccctcaaaaagaaggggagccagggcctttcgctgtatcaaacctgcccctgttatccaccctgcatctgttatcttcactgttcctgctaccactgtgaagattgtgagccttggcggtggctgtaacatgatccagcctgtcaatgcggctgtggcccagagtccccagactattcccatcgccaccctcttggttaaccctacttccttcccctgtccattgaaccagccccttgtggcctcctctgtctcacccttaattgtttctggcaattctgtgaatcttcctataccatccacccctgaagataaggcccacatgaatgtggacattgcttgtgctgtggctgatggggaaaatgcctttcagggcctagaacccaaattagagccccaggaactatctcctctctctgctactgttttccccaaagtggaacatagcccagggcctccaccagtcgataaacagtgccaagaaggattgtcagagaacagtgcctatcgctggaccgttgtgaaaacagaggagggaaggcaagctctggagccgctccctcagggcatccaggagtctctaaacaactcttcccctggggatttagaggaagttgtcaagatggaacctgaagatgctacagaggaaatcagtggatttctttgagctaggagaataagagtctggagactgggagccttcacttcggcctccgattggtggcgcatagggtgtaaccaataggaaacccctaaagggtacttaaaccccagattttgcaactggggctcttgagcagcttgctttagcctgctcccactctgtggaatatacttttgcttcaataaatctgtgcttttattgcttcattgtttca

SEQ ID NO: 14989 - DNA, 2663 bp, Homo sapiens
ggaggagagaagaggaggtggagaaggcttgggctcgcgccgctgaagtcggcttacccgctggccgcctcctgacaagcgggagggatccgcggtggacccagggaagcggaggagcctggcggccaccccctcttcctcacttccctgtactctcatcgctctcggcctccgacacgaaaaggaagcaaatgagctgatggaagatctgtttgaaactttccaagatgagatgggattctccaacatggaagatgatggcccagaagaggaggagcgtgtggctgagcctcaagctaactttaacacccctcaagctctacggtttgaggaactactggccaacctactaaatgaacaacatcagatagcgaaggaactatttgaacagctgaagatgaagaaaccttcagccaaacagcagaaggaggtagagaaggttaaaccccagtgtaaggaagttcatcagaccctgattctggacccagcacaaaggaagagactccagcagcagatgcagcagcatgttcagctcttgacacaaatccaccttcttgccacctgcaaccccaatctcaatccggaggccagtagcaccaggatatgtcttaaagagctgggaacctttgctcaaagctccatcgcccttcaccatcagtacaaccccaagtttcagaccctgttccaaccctgtaacttgatgggagctatgcagctgattgaagacttcagcacacatgtcagcattgactgcagccctcataaaactgtcaagaagactgccaatgaatttccctgtttgccaaagcaagtggcttggatcctggccacaagcaaggttttcatgtatccagagttacttccagtgtgttccctgaaggcaaagaatccccaggataagatcctcttcaccaaggctgaggacaatttgttagctttaggactgaagcattttgaagggactgagtttcttaaccctctaatcagcaagtaccttctaacctgcaagactgcccgccaactgacagtgagaatcaagaacctcaacatgaacagagctcctgacaacatcattaaattttataagaagaccaaacagctgccagtcctaggaaaatgctgtgaagagatccagccacatcagtggaagccacctatagagagagaagaacaccggctcccattctggttaaaggccagtctgccatccatccaggaagaactgcggcacatggctgatggtgctagagaggtaggaaatatgactggaaccactgagatcaactcagatcaaggcctagaaaaagacaactcagagttggggagtgaaactcggtacccactgctattgcctaagggtgtagtcctgaaactgaagccagttgccgaccgtttccccaagaaggcttggagacagaagcgttcatcagtcctgaaacccctccttatccaacccagcccctctctccagcccagcttcaaccctgggaaaacaccagcccaatcaactcattcagaagcccctccgagcaaaatggtgctccggattcctcacccaatacagccagccactgttttacagacagttccaggtgtccctccactgggggtcagtggaggtgagagttttgagtctcctgcagcactgcctgctatgccccctgaggccaggacaagcttccctctgtctgagtcccagactttgctctcttctgcccctgtgcccaaggtaatgatgccctcccctgcctcttccatgtttcgaaagccatatgtgagacggagaccctcaaaaagaaggggagccagggcctttcgctgtatcaaacctgcccctgttatccaccctgcatctgttatcttcactgttcctgctaccactgtgaagattgtgagccttggcggtggctgtaacatgatccagcctgtcaatgcggctgtggcccagagtccccagactattcccatcgccaccctcttggttaaccctacttccttcccctgtccattgaaccagccccttgtggcctcctctgtctcacccttaattgtttctggcaattctgtgaatcttcctataccatccacccctgaagataaggcccacatgaatgtggacattgcttgtgctgtggctgatggggaaaatgcctttcagggcctagaacccaaattagagccccaggaactatctcctctctctgctactgttttccccaaagtggaacatagcccagggcctccaccagtcgataaacagtgccaagaaggattgtcagagaacagtgcctatcgctggaccgttgtgaaaacagaggagggaaggcaagctctggagccgctccctcagggcatccaggagtctctaaacaactcttcccctggggatttagaggaagttgtcaagatggaacctgaagatgctacagaggaaatcagtggatttctttgagctaggagaataagagtctggagactgggagccttcacttcggcctccgattggtggcgcatagggtgtaaccaataggaaacccctaaagggtacttaaaccccagattttgcaactggggctcttgagcagcttgctttagcctgctcccactctgtggaatatacttttgcttcaataaatctgtgcttttattgcttcattgtttca

SEQ ID NO: 14990 - DNA, 29329 bp, Homo sapiens
gtagggtgggggtgctggcggcggctgctttggcggcggttggtggccgtgcgggcggggagggagggggaggagagaagaggaggtggagaaggcttgggctcgcgccgctgaaggtacgcgtgagggcctgcgctggagccggcttgacagggtctgagggggagtggagaactgggcgaggaggttcccgtgggtgagcgcgtacgggatggctggctcgcaggacggccgaaggtggtggttggtgggagcagccagcgacgagcccgtagacactcgtacgcgtgcgggctgacgtgcgcgctacatggccggagtcgggcgaagcgggggaccgtggggaagaacgcgaggagggaggagtgggaggttgggggtgtcgctaggcgcccttagctccctccctctggaggagctgccgcggccactctgctgccgccgctgccgccgccattttgggttcgctttgcgaggggaaacgatcccagtgtcggttgcgggatccgcctcctctcagtttgcccctttagccctccacctttcccttctcctctctcgcatttccgccagtcggcttacccgctggccgcctcctgacaagcgggagggatccgcggtggacccagggaagcggaggagcctggcggccaccccctcttcctcacttccctgtactctcatcgctctcggcctccgacacggtgagtagaacgatttgggccggcattcgggcctaagcactctctcagcgattgaatcctgggctttctgggagccactgtcatctcccggacctggacctctgggagagcagtggtgaagatgggggaggggagagcagggagggggatcctgagcctaccgggaagtccctccaggcggggtgaaggggtgtccctgacaggcagactcccggagggggctgggaagtaagcgagtggaggcggagtcggctgtgcccctgacaggttagtttgtgtttgtaggcatgatcggagcctcccccatagtccagtttgtgtgtgtttaattaagggataagagtggtcgaggacacgatcttgagaggggattttacctgtgtgacaaggtctgtggtgtccctgccgcgttgaacggtatgtgggaacgacaggatgatctcagtgttgtacgtttaataaatgtcactggttagtttgtacatggaaagagatgtttttggtctagcagacagatggtctgttggtgtgtagcggctgtgttggtgtgtgtatgtgaggatggcaagtgtttccgtaagagtttgcctttatttgtgtaagtgtaatggagttccccttataagttagcttatttcttgaataaatgttgggaggttccttgcaggttgatatgtgtgtgtattttagggattgggagcccctagttacttgttgggaaagagcggcaatggtagtgttctgtacagcatgtgtctgtgaggtcagggaggggagaaacttggcatagccagttgtggtcttaagaatagtttgtgcctttggttagagtgagttgtgtaaatgtgaagggccaaaatatctttaacagaatcattgctacaaagctgtaaagaatgggtggccttatttgttgtcgcgggtttatagtaatagtttacaatacaataagaaagctctttcagtttctttgtgatactgaatctctgtgaaaatggtaggatgctttcttccattttacaaaataggaaatttaggcataaggagagaacttctccaaggccgcatgttaaattggtgacaaagttggaactgtaactcccatattttcactactactgcagcagtatattcagcataccatggtgcctcaggaagtctttgtcggcaaatctgagtatgctggaaagataggagcacataagactggttggcttgtatttgggggagaccgattgtgtcagatatgtatgtggaacgtagctgtccttgccgagtctgacctgtatgaaatgcatatccatggctatattattttggatttatggaggaagcagagcatttctgacacttaaggttgtatgcgtgagggagaaggctttcacagcttaacttgtaccagagcagctgcatgggtgctgacagcttaacttgaaatctgtgggaggaaggatcctttttcactcattcaacaaatataaccattcaatgaatggtccatgccttgaggtgaggatcatcaaggtgtctctgtaaatagcctggatgcaatctgaggggagttgttttgacggtggtaggtattaagttgagggaggcagtgtggaattaaaaccagagaactgtttttgggtactggtaattgttaatatatgtgcctgtggatgttggaacttcttggctgggctgaaggaatcctttgaaagactgatttcggcagggcgcggtggctcacacctgtaatcccagcactttgggaggccgaggtgggcggatcacgaggtcaggagatcgaatcacgaggtcaggagatcgagactatcctggctaacaggatgaaaccccgtctctactaaaaatacaaaaaattagccgggcgtggtggcgggcgcctgtagtcccagctactcggggaggctgaggcaggagaatggcgtgaacccgggaggcagagcttgcagtgagctgagattgcgccactgcactccagcctgggccacagaggagactccatctccaaaaaaaaaaaaaaaaaaaaaaaaaagactgatttcatgtagtaaggatcccgtctatgaactctatgaatatgaggtaagaatgcatgaactaagccaacttagctgtattcttctggaaaatgggatgtttcttgataggctagattagtggttcttaaaagttttttggggtcacttatccttcagagaatcggatgaaagacactgggccctcaagttagaagatgagcataagcgcaatcacatgatttatatatatgattttaggaacttaaactgtaatgaaatagagccaatttatatttagatctcatttgaaaacctttcattttcattgttcgggtgtgtggatgttagtatgagtttaaggtgaaggagtctatgttagtatttgaacatgttgacaggatccatatttttaatttattctttttatcgtctgcaaacatttctgcagtattagtaaatgactctgtatttggtaaaaagggaagctaatgtcgcacaagtatctatggctttgttctttgtcagtatctttttgttctcaaactctgagaagcgtctttttttcagttttggattgggcctgaggtgatttgaagctcctgtcttggagtttaacttagttataacaaacactgagttaatcctatgcaggagacacaaagataattaatatatggtctctgtgcttgaagagacgctaattttctgtggttgaagagatgctgtgaattgtgtgatagtggcagctctcaaaaggacaaggaagagggaaacatattcctagaagctgaaattttattacccaattgcaaagactttttgtcactacttattcttaggaataaccataaagtgtttattttattctgtatggaactttgtactttaaaaaaatatgttttgtatcatctggtgtttttgtataaaggaactgttggtttgaaaagaaggtaaacatcatttatattccttaccttgttttgggatgtatctctacagtgagtttatgtaaaaaggtcttaatgtcatttttgggtatacatacatgtagaaagccctcctgatataaaatccagtagctatttgacagactacccattaatttattactggaacttaaaaataattactgtacttttaaaagaacaagaaattggtcaggtggggtggctcacgcctgtaatcctagcactttgggaggacgaggcggatggattgtcagagctcagaagatcgagaccagcctgggcaacacggtgaaaccccgtctctactaaaatacaaaaaattagctgcatgtgttggagtgcacctgtagtcccagctactcgggaagctgaggcacgagaattgcttgaaccaagaattgcttgaactgggagggggaagttgcagtgagctgaaatcatgccactgcactctagcctcggcatcagagcaacactctgtctcacaaaaaaaaaaaaaaaagcaagaaatgtaaaaaggtgttttaataggacagattataggattcagtgagataatggagaagttttaggaaaaattgtctgatagtcctttctttctattgacatggcccctgtataagaatgctatgtaaatttgtgaaaagtttaatattttctctaatttttaacgggtagtaggttcatggtgttatttttctcaaaacgtacatgtgatatgtgtgtgtagtgtgcatatatgtgcatgtatgtgtatacaatttctttatttttttaattgagattaggtctcgctatggttttttgtttttgtttttgtttttgagagagagtttcgctctcctcgcccaggctggagtacaatggcacaatcttgcctcactgcaacctctgcctcccaggttcaagtgattctctttcctcagcttcccaaatagctgggattacaggcgcgtgccaacacgccctgctgatttttgtatttttagttgagacagggtttccccacgttggccaggctggtcacgaactcctaacctcaagttctccagccgtctcggccttccaaagtgctgggattataggagtgagccactgcacctggcccaggtcttgctatgtagatcaatctggtcttgaactcctggcctcaagccatcctcctgtcttggcctcccagtttgctgggattacagatgtgagccagcatgcccagctctttttacctgcttaccaaatccaagattttctccaaaatgaactggaatagccttcttactgtgttaattttgccttggtggggaagcctaagtcttggaactaaattggggtggttatgacagttctctttttaaagctgatcagtatttcagtatttcacttgttgttgttttttttgttttgttttgttttttttgagatggagtcttgctctgtagcccagtttggaatgcagtggcaggattttgactcactgtagcctctgccacccggattcaagtgattctcctgcctcaatgtcctgagcagctgggtttacaggcacgcaccactacacctggctaatttttgtattgttagtagagacagggtttcaccatgttagccagtagccaagctgttctcatactcctgacctcaagtgatccacctgcctcagcctcccaaagtgctgggattacaggtgtgagccaccacgcctagccaaacccatctctttcattaaaccacctcattttggttcagaaacaagactgccatgtatgtatttaatgcttattatgtgccaagcactattccaggtactaagatacagtgatggacaaaacaagatcccttctcctctatctcaggacttattaatttgggcattttcattttccaatataggatcttttagtactggtataggattcctgaaggaattcctgaaatataattatttttctgctagagcaaatcaattttgttttttgttttttttttgagatggagtttcgctcttgtcgcccaggctggagtgcaatggcgcaatctcggctcactgcaacctccgactcccgggttcaagcgattctcctgcctcagcctcccaagtagctgggattacaggcattagccaccacgctaggctaatttttgtatttttagtagagacagggtttcaccaggttggccaggctggtctcgaactcctgacctcaggtgatcctccaggctcagcctcccaaagtgctaggattacaggcaggagccaccacgcccagaagagcaaaattcttctgttgacaaaaatttctttcctctgaggaagagacactgtgtgcctgtgttttatccaggaattccattggatagtttgtcctttgggatgtcagtggattaaatcctccattaagaatcaaagtacttggctgggtgcagtggctcatgcctgtaatccctgcactttgggaggctgaggcaggtggatcacctgaggtcaggagttggagaccaacctggccaacatgatgaaaccccatctctactaaaaatacaaaaaattatccaggtgttgtggcaggtgcctgtaatcccagctactctcgaaaaaacagaaacaaaaactctgacatgtagagtatgtagatgtagagaaaaaagtaaaatgattgttgaaaaaaatgtctattttttatcttctaaatagctttgtgtgtcagagatcagaacgctcattttacatgatatcaagaaccagaatgctagatagctagaatggttgttaacttcctagataaccattgtagaggaacacataaggtaaaacaaatgaataaaaattaaaaaaaaatgagatagccaaagatttgaagctctttacccattaacatgataatcatttcgactttgaatatttgtagaacaagagtcagaactcagaacaaagatctctgaggaaataaaaaaaaatcaagctgcctcctaatttctcatttagtctgtcattgggcattgtcaaactgtcaaactatatttagagattctggttttcatctggagacttagtgagttgtgtaatatcttgaatacacatataagatcttgccaggtggggtggctcatgtctgtaatcccagcactttgggaggatgaggtgggaggatcgctggagcccaggagttcaagaccagcctgggcaacatagcaagtccctggctctatttaaaaaaaaaaaaaaaaaaaaatcctcaatgtagaactttaaatttatccttacgtgttacatccagttgatttgagaaaatatgattctgaattttccatcaattggattggcagtccctttcagctttacagctttacatcatctacagatttgttaagtatgttctcttggtcttctaattcactgatggagtttttgaataggtcgggtccaaagatagagtcctatgaaacactgttggaaacttgtctctgtctgtctcttttttttttggagacagtgtcttgctctgtcgttcaggctggaatgcagtgggacggtctcagctcactacagcctctgcttcttggactcaaagagattctctcacctcagcctctcaagtatatgggactatatgcatgtgcgaccaagcccagataaatttttttttagagatatgttgacattttgcccaggttgggagacttgtctcttgattccattcagtattgtgtgggtttggataggccatctaattataaaatcattgggctggtcatggtggctcatgcctgtaatcccagcactttgggaggctgaggtgggcggatcacctgaggtcaggagtttgagaccagcctgaccaatatggagaaaccccatctctactaaaaacacaaaattagctgggcgtggtggtgcatgcctgtaatcccagctacttgggaggctgaggcaggagaatagcttgaacctgggaggcggaggttgcagtgagccaaaatcgtgtcatcgcactccagcctgggcaacaagagcgaaactccgtctcaaaaaaaaaaaaaaatcatctagctcacattttctccttgtcttcttcctattagaatttaagttcaatgagattagaactctctctctctctcattctctcatatatcccaagcatctaaaacagggattgaaacatagtaagtactcaataaatgtttttgaataaatgaatgaaggatagctgggcgtggtggctcatgcctgtaaccccagcactttgggaagccaaggtgggtggatcactggagctcaggagttcaagaccagcttgggcaacatggggaaaacccatctctacaaaatatggaagaattagccgggcatgacagcacactcctgttgccccagctacttggagggctgaagtgggaggatcgcttgagcctgggaagcagagattgcagtgagccgagatcaagccactgccctccagcccgggtgacagagtgagaccctgtctcaggaataaggatagatatgaagaattcgtcagatgccttgttgaaaacatcatacattgtctacatggaattcctccatattgtaaaatgaatctaatttataccaacaacgtttggcttttttgcagaaaaggaagcaaatgagctgatggaagatctgtttgaaactgtgagtaatgatcctcaagtgagaacatgggattgtaagttggttctccaacaaaatgtgtcctttgatctctgtgatgctccttctagaagagggactgaaccaattctccttttagtctacctgggaaagaatataatgacaaaagaaatttgctaactgctagactcttgattatccacatgtaggttattcttactaaaattttccttgaagctttttttttttttttttgaggcaaagtcttgctctgtcacccaggctctggagaatacagtggtgaaatctcagctcacagcagcctcgacctccagggctcaaaacaattctctcatctaagcctcctgagtagctgggactacaggcacacacctacaggcccggctaattattttatttttttgtagagacagggtcttgccatgttctggaactcataggctcaagtaatcttcctgcctcaacctcccaaagtgctggaattacaggtgtgagccagcacatcttgccccttgaaaacttttgatggcttcccctactgtcatttggtgtgtccttaaagattgccaactagttttaaagtattttgcacacaaataattaccttttccataaatttgtctaaaaagatatttctgtttaagaaattgatcattttgagttatcctagctctgtgcttactgatacaagttgactggttgagcaacttctttcctggcataatagtcattccatatgtgggtttgtaggagtcctgaagtgagaaaggttctgatgtaggctctttctgggtgccagcattattaaagtattgtttatagttttcacttttccttcccaacactggagcaacattcaaaagcccattccccaggaaaaccctccctttcctttgcccacagttccaagatgagatgggattctccaacatggaagatgatggcccagaagaggaggagcgtgtggctgagcctcaagctaactttaacacccctcaagctctacggtaggctagttgaagaccttgagatttggaatagaggaagagtttatttctgaaaaggttttcagaagttgcagttaacaatttttcatccccagccagcttctgttactgatgtaaggatgcagagtcctgtcaggagttaggtgtcaagtgaagtctccttgttatggggcagtgcagctgtaggccaagctgtatctgtttgggaagggagaaaaaacagtagctggcatccatatccacttctccgggtgagtggtgctggagaggtatgtaggactcaatgtggccagccacacaaactaccctatattgtaatatccagtctgtcccttttgttctttttatgtgccattaatatctgctaaatgtgactgaaaatttgttagtcacctaggcattagtggagcaaaccctgaagcacctgcagtaaggagtctgaaacatacgtgctgacctttttgcctaaagttggcacttgtgttacagcatccagaaagtagaggctttaattttttcctcattttgtggtggatttgcatctgcactttattctgttgtagcagcatataatcattaggtcgatggcgagaggtcaggatgcagtttgtgccataagtggaacaaagcaaagagaatagtccctgtaattagtcctgtgtttgaacttaacagcactactaagcagagagcttgggttccatctgaaagctagacctttagggattttccaatttagtgaaaaaagataagataggccaaccaatgtcttaaaaactagaactactagtcattctccattacaacaaatatcacaatacaactacatcaaaaatctcaagattgctaagtcagtatttgacccattattttaatttatagttcatagaacaaaattctggtatagcagaatggaaccattcatcctgggaacgtataataggatctgattaataaatattttggttttgctgatcaactctttataacttcttaaaatttggaaaatatagaactaatttaaaattcctgttagaatccagttaccttctggtattcaatggaatatagtcatatatcatctcatggtcataccctctgtgaaatctatcattaaacgattcatcattgtgtaaacatcgtagaatgtacttacataaacctaaatggtttagcctactgcatacctattgctcccaggctacaaaacctgtacagtgtgttactgtactgtactgaatactgtaggcagttgtaacacaatggtaagtacatatgtatgtaaacatagaaaaggtacagtaatcttatggagccacctctgactatgtggttcgttattgactgaaacattctgtggcgcatgactgtacttgggcagcttctgcttctctttcgattgcaaatacaaacctgtttttgttttaatctttgactaaataaaaatccctctgtaagtccatagagagtaagcacatcttaaaacacaataaggaagagagaggagaaaaagacagtcaaaacaaaaactctggggcttcccttatcaattacctaaataatccttgttaaaactaagtgcaggctatgtttccattttctacttttttatgcttcttctcttctgttccttcagtggtggtagcgcggatgttcaaattttcagttctcagtaaagattgtatagacagtcccacggtcttcaggtttttactctgtgctacccaaacctacagtaaatactataaaagaaaacttattcaaacgtaatctttatctgcaaaaactattgaaaaacgttaccatttaactattgctgtaatatagggggttccttgaaatatgataacctgcttgttatagctacttcagcagatcttatcctgttgcatagggtatcagcatatgcttaatcatttaggtatattattctccctttatttctttctatgtaaacatagaaaaggtatagtaatcatacatagaactgacatgctaggtattggaatttttgcttcagccctgcaaacaatctttcaggagggtatggatgggaagttagggttaggaaccttggaagaggaatttaaagggctaaaagaagatagccttcatggataatattttaactaacttctccgttctgttcatttgaactaccatgtacttcagttattttggtatatccttttcctgcttcatgctagaaagtctttgacttgttaagaaagcagggcagtgcagcctgagtagataggataatgggacaagctggacctgggatgggagtaacatcccagggagtaacaagtaatgagagaagaaatgagaatgatgagttcccaccagctccttggctgctttcttacccatatatttctctgtccctagttttttgtttaattttttcttcatttgtatattatttggaagaggaattgtagaggaatgggatggggtgtaatacagaatcatttgatgcatgctaactactttgggaaaagatttgtgtaaggctgggagtttgactgttggctaaagtgaaaaggggggattagtagggaatgaaaattgttcaggctctttgctcatcattgcaaagaattggatgtgttgtggacctaggaaaacactcaaattcagtcatccccgtttgggataggtttgaggaactactggccaacctactaaatgaacaacatcagatagcgaaggaactatttgaacagctgaagatgaagaaaccttcagccaaacagcagaaggaggtagagaaggttaaaccccagtgtaaggaagttcatcagaccctgattctggacccagcacaaaggaagagactccagcagcagatgcagcaggtaacactttccttggtcatattaatattgaattataccaaggcctaactctgaggctttggtataatctaaaattagcagctttgtaaatgtcagagatagttaccttactacgtattaaaaccgtagtatcttcacatcagttaggagcttgagaagtcatcatgttcatgtcctgtggctcagggaagacagcacataaggaccctaatggtattcggaattacagatttcaaagagtcctcagtaatctattctgaaatttaaccttcactgtgacaagtagttttttttcccttttcccttttcttttttcttttttttttgagacgtagtctcgctctgtcacccaggctggagtgcagtggctcaatctcagctcactgcaagctctgcctcccgggttcacgccattctcctgcctcagcctcccgagtagctgtgactacagggactcgccaccacacccagctaattttttgtatttttagtagagacagggttcactgtgttagccaggatggtctcgatctcctaacctcgtgatccacccgcctcggcctcccagagtgctgggattacacgcgtgagtcactgcgcccggccttttccttttctaatctcagttcctcctctgtttagaggttaaacttcctctggttctgtcattttgttcaagggaacatgtctgagaaatttatgccaagatcctacgttgttctcacactctttgcagaaagcaaaatttgtgtcataaagttgcaaacatcttagttaatgactctctggtggctgggtgcagtggctcacacatgtaatcccagcactttgggaggctgaggtgggaggattgcttgagcaggggagttcaaaagcagcctggacaacatagtgagactctgtctctacaaaaaataaaaataaggctgggcacagtggctcacacctgtaatcccagcactttgggaggccaaggcgggtgaatcatgaggtcaggagtttgaggcaagcctggccaacatggtgaaaccccgtctctacgaaaacaaaaaattagctgggtgtggcggcgggcacctgtaatcccagctactcgggaggttgaggcaagagaatcacttgaacctgggaggcagaggttacagtgagccgagatcacgccattgcactccagcccaaaagtcagtgcgagactctgtctaaaaataataataataataataataaaataaattagccaggcattgtggtcacagctacttgggaggctgaggtgggaagattgcttgagcacaggtggttgagagggcattgagtcatggttgcaccactgcactccaagctgtgtgacagagcaagaccctgtctccagggggaaaaaaaaatatctctgggctcctgaaatggcagtgtcataacatatcactgcattattttctttctctccccagcatgttcagctcttgacacaaatccaccttcttgccacctgcaaccccaatctcaatccggaggccagtagcaccaggatatgtcttgtaagtttccaaattgccgtaattctatagactagaatataaaattagcttggcaggttatttctcacagttattctctcaggtatttttgattgctgtggcttcctatgtttgctgagtgaacataagccactgattcacatgaaaggacaaagagtgtattcaattttttcttttcttttttgagacagggtcttgctctttcacccaggatggagtgcggtggaacaatttcagttcactgcaacccctgcctcccgggttcaagtgattctcctgcctcagcctcccaagtagctgggactacaggcgggcaccaccacgggtaattttttttgtatttttagtagagacagggttttgccatgttggccaggctggtctcgaattcctgacttcaagtgatctgcccacctctacctcccaaagtactgggattacagccatgagccactgcgcctggcctgtccttctgatatttttattgggtcctcctcctcatctttagattcaccctgacttcttaggtttttggtaccgctattcatttcatagatgttgaggctgggcatagtggctcacacctgtaattccagcactttgggaggctgaggtgataggatcacttgagcccagtggtcaagaacagcctgggcaacatagtaagacccggtctgtgttttttttgttttgttttgttttaatttaaataatgaagtaaatatacatgtagatgttgaattcattatccattcatgaagctcaatattagtgttttatgtgtagagctagttttgctcatgacgttttgaggtattttgagctttttttttttttttttttttttttgagacggagtctcgctctgtcgcccaggctggagtgcagtggcgggatctcggctcactgcaagctccgcctcccgggttcacgccattctcttgcctcagcctcccaagtagctgggactacaggcacccgccactatgcccggctaattttttgtatttttagtagagacggggtttcaccgttttagccgggatggtctcgatctcctgacctcgtgatccgcccacctcggcctcccaaagtgctgggattacaggcgtgagccaccgcgcccggcctattttgagattttaaatttgaaatttggccaggtatggtggctcatgcctgtagtcccagcactttggtaggtcaaggtgggaggattgcttgagcccaggagtttgagaccagcctgggcaacatagtaagaccccatccctaccaaaaaaataaaaaataaaaaaattagctggggatggtgccgagtgcctgtagtcccagcaacttgggagactgaggtaggaggatcacttgagcctgggacgttgagactgtagggagccgtgcttatatatcactccagcctgggtgacagagtgagaacctgtctcacaaaaacaaaaccatactttacctcataaaaattgcctcaaacttttggacaggtaatgataatactctcagcttcttcagtaagtcttctttggattttgaagagtacatttgctagtattctaaaacttccttggtgatcaacaggatgtcttcatctcttactgtattcagaggaggatgaggagtacttggttgtaggcattattctgagaccaaaagacaaaacaattttaaaagtaatggtcctggtcgggtgaggtgactcatccctgtaatcccagcactatgagaggccgaggcaggcggattgtgagcccaggagttcgagatcagcctggccaagatgggaaaacgctgtctctgcaaaaaatacaaaaatcagctaggtttggaggtgtatgcctatagtcccagcttctcaggaggcagtgggaggatggcttgagcctgggagggggagtttgcagtgagctgagatcatgccactgcagtccagcctgagcggcagagtgagaccatgtctcaaaataaattaattaattaaattaaagtaatagtccccattcttgagactcttaattctagctcgggagctagaccatgtattccttagtgagaaacagtttaaaaataaaacaagaatataatccctgaatatctgagaactcaggcataatcttaacagtagtttattgtgaaagactttatgattatttttacctgtttttatcctgtagtaggaaggtcagcttctcatttagattctgaaggctattggtattaattgtctggaattgtcttagatcttccttgtgtcgtgttttcccagaaagagctgggaacctttgctcaaagctccatcgcccttcaccatcagtacaaccccaagtttcagaccctgttccaaccctgtaacttgatgggagctatgcagctgattgaagacttcagcacacatgtcagcattgactgcagccctcataaaactgtcaagaagactggtaggagacagatgtgtcagctttaagtttttacttgcggtgagaggtggtgggaatcttatcccatagataacttcctaggatacttgcctaggaatggaggacacaggacatttgtaatttcttccttctctcttttatcctccctttgtactcattatccaagttctagaattacatgataatctccgggcctgggtaaggcatggaggcagtggacagtataggaatatgggaggtagagatctgaggctcagtgctaagaattggactacagcaatatgaggggtaagtattaggaatcagatcaagataaactggggcctggtaaagatgaaagtcaggtggtaaagttcggtcatgtttagctttttattctcttcattaagatcaactaactttatttaccataatgattgtagcataggtgatatctccattctgaatgaaatgttgacttgcaagttaggcgtaaattagagattgtacatttgccgtgttcagtattttaaagaaatttgccggtttagattctaccttgcattggtttagtattttttgagaaaatatttgctatttacttaagccaaatatttacttctgatttgtttgctgacttagcaaattagttgtggtttgttctggatttgggtttgtctttggattctattttaaatccctaagtcttatcattacattgaatgtagttgaatttaagtgtactatatcatagacacagatcccaaactactttaatagctatattatatgaaatggtaatgaaaacgtgatttaataccaaattatagtattatcttacacatctagtgtcctgtgtttttcttctggagatataaaaatgacacttatggaaggagaaatatggatatagtagttttgtctctagaaatgcagaggtgcctaaaattgagaggctgagagagggagacagaaatgaatgagactgaattgtctcattccttttatggttcttttgttcccaacctcaggaggaatctgggagaacttaatgaaagttaagaaagaatgaaataaaagtaaaatttggaataccaggtttgtgagggagattaaagaagttggaatcttttttcttttttttttttttaagatggagtctcgctctgtcacctaggctggagtgcagtggggtgatctcggctcactgcaacctccgcctcccaggttcaaacaattctcctgcctcagcctcccaagtagctggaattacaggtgcgtgccaccatgcctggctaatttttacatttttggtagagatggggtttcactatgttggccaggctggtcttgaactcctgacctcaggtgatccacctgcctcggcctcccaaagtgctgggattacaggcgtgagccagcacgcctggcctggaatcttatcctggaagaaaaaagcattgttgaaggtctgttatccttcagagatttaaaggggaaaggaggtaaaacatttttgagcatacactatgtgacaggtattactaggtactttttaagtgtttgttttactttgtgaataaagtgttacacgtaagaaagagtaagagaggccgggcgccgtggcttacgcctgtaatccaacactttaggaggccgaggctgtcggatgacaaggtcaggagatcaagaccatcctgtctacagtgaaaccccgtctctactaaaaatacaaaaaatcagccaggcgtggtggcaggcgcctgtagtcccagctactcaggaggctgaggcaggagaatggcctgaacccgggaggcggagcttgcagtgagccaagattgcgccacgcactccagtctgggcgacagagccagactccgtctaaaaaaaaaaaaaaaaaaagtcaacttttattgccagtgaatgggactccctttagacctaatgttagttgaggaaagactgtggaaactctttggggagtggtaggcagatgggagggaatcaagttagataaggacagctctacctaaatgcaaaaatgcattcacaggctttttgaagccctcttttttcctagaagttgatttatcagagatttattttcttatagccaatgaatttccctgtttgccaaagcaagtggcttggatcctggccacaagcaaggttttcatgtatccagagttacttccagtgtgttccctgaaggcaaagaatccccaggataagatcctcttcaccaaggctgaggacaagtaagtgtttactctgggggatcaaatatcccaaggagaagatgtagttcctttgaggagtttaggggaagtaagacttgtataataagacatggacacaaaaggaaaagcagtatagatgagcagagtcctctagaacgtgcttgttctagcagtgccaaatactgctttttggggggatgttacacacatttttaaaatgttttagactggacatggcggctcccacctgtaatcccagcactttgaaaggccaaggcaggaggttggcttttctaatgttattatttatttagagacaggatcttactctgtcacccaggctggagtacagtgttgcaatcacagctcactgcagccttgaactcctgggatcaagtgatcctcctgcctcagcctccatggagtagctgggaccacaagcgtgtgccaccatacatggctgattttttttgtacaggtgagggtatctctgtgttgcccaggctgctcttgaattcctgacctcaaatgatcctcccactcctggcctcccaaagtgctgggactataggcataagccaccacacccagctagattatgaacatttttatggccctttgtgtgtattgccacactgttaacagcaaatatgtatatatgtaaccatgattatatatgttatgttagagggtagtattggtgccagtttaatttgtctgacggggtacctattattcattttatatttgttttattagaatcattctccttcccatgtattctctttgaacttcctttgtgttgttaatatacagctcatcatgatctgacatttattgatgatttatgactagtttctcttgctcctacttaattgtgaactatttgattcttattcatagtacttaatcactactcactaaatacctgaaattttctactgagtagtcaccaacttgtagtagtcactacaagaattagttgtagaaaaagtagattggccagccatggtggctcacacctgtaatgacgacactttgggaggccgaggcaggaggatcacttgaggccagaagttcaagatcagcctaggcaacaaagtgagaactggtctctacaaataatgaaataaaacattagttaggcatggtagcaaacgtttatagccacagatactcaggaggctgaagtgcgggaatcgattgaacccaggcattcaagactgcagtgcactgtaatcatgccactgctctccagcctggacaacagagcaaaaccctgtctgaaaaaaatgaaaaagtagattgggccacacgccatgggctcatgcctgtaatctcagcactttgggaggctgagactggagaatcgcttcagcttaggaagtagcagctgcagtgggctgcgatcacgccactgcactccagcccaggtgacagagtgagaccttgttttaagaacaagtaagaaaaagtagattgtaaaatgtgttagtctggggaggccctttagaaggaaggactgtgaagtgagatttagtgttattgctcctttctcagtttgttagctttaggactgaagcattttgaagggactgagtttcttaaccctctaatcagcaagtaccttctaacctgcaagactgcccgccaactgacagtgagaatcaagaacctcaacatgaacagagctcctgacaacatcattaaagtgagtgtttcctgcatgcactatccaggcacctcaccaacacatatctgttcttttctcttgttattctcaaagaaaagaagaaccttcttttatctaaagctaatttctcctacttatatactagattaattcccctgttgccttttcagggacattgattcattcattacgttcctctggagtatcttcatcctcttaaaagattccacaaatccatgtttccctgtaataattctctttcttgaactttctagaaatgatatgcagtattccacttacatgctttgggtttttgttttgttttgtttttttggtcagacataatcttgcactgtcacccaggctggagtgcaggagtatagtggcatgatcttggctcactgcagcttccgcctcccgggttcaagtgattctcctgcctcagcctcccaaatagctgagattacaggcgtgcccaccacgctcagctaattttttgtatttttagtagatacgggtttcaccatgttggccaggctggtcttgaacttctgacctcaagtgatccaccagttttggcttcccagaggctaggattgcaggcataagccaccgtgcccagcctatatactttttctcaattttgtgtttgtatgtatgcatgtatgtgtgtgtgtgtgtgtgtgtgtgtttgtgtgtgtctgtgtctgtatgtatgtatgtatgtatgtatgtatgtattgagatggagtttcgctcttgtcgcccaggcccagcctatatactttttctcaactctttttacttattgattgattgattgagatggagtctcgctcttgacccccaggctggagtgcaatggtgcgatcttggctgactgcaacctctgcctcctgggttcaagtgattctcctgcctcagcctcccttgtagctgggattacaggcccctgccaccatgcccagctgatttttgtatttagtagagtcggggtttcaccatgttggccaggctggtctcgaactcctgacctcaggtgatccatctgcctcggcctccctaagtgctgggattacaaatgtgagccattgcccccagccttcttttttatttagatatttatttatgtttttttttttttttagagacaggttctcactctgtcatcctggctggagtgcatgggcacaatcataggtcactgcaacctcaaattcctgggtgatccttccacttcagccttccaagtagcttggactacaggtgcatgccaccaaggctagccgattattttattttgtgtgaagacagggtgtcattttgtttcccaggctggtcttgaagtcctgacctcaagcagtcctcttgcctcagctcggcctcccagagtgttgggattacaggcgtgagccatgatgcccagcctttggtttcattgtgtttttgtatttttcttgagacaaggtcttactctcctgcctaggctggagtacagtggtatagtcatagctcactgcagccttgaactcctaggctcaagcattcttccaacgtcagcctcccaaggagctgggattatatgcattagccactgtgcttggccattaaatttatttatttatttattttattttatttttttgagacagaatctgtctctgtcacccaggctggagtgcagtggcacaattttagctcactgcaacctccacctaccgggttcaagcaattttcatgccttagcctcctaagtagctgggactacaggcatgcgccaccacacctggctaatttttatatttttagtagaaacataatttcaccatgttggtcagtctgatcttgaactcctgatctcaggtgatctgcccacctcggcctcccaaagtgctggaattataggcgtgagcctctgtgcctggcaaaaaactttttttttttagggatggggtgtccctatattgcccaggctggtcttcaatttttggccttaggcaattctcctgtctcagcctctaattggtactgcctggtgtattggatttaggccttacttattaaccataaaccacggaagccgaagatttacctctctcctcactcccttactcccaccacaaacatgcacattttctgctctccaaactcctcactagtagttatggtagaattttggttagattgtattcagggtttacattgtaagattttaaggactgttggctgggcgcggtggctcacgcctgtaatcccagcactttgggaggccaaggcaggtggataacgaggtcaggaaatcgagaccatcctggctaacatggtgaaaccccagctctactaaaaatacaaaaaactggctgggcgtggtggcgggcgcctgtagtcccagctactcgggaggctgaggcaggagaatggtgtgaacccgggaggtggagcttgcagtgagccgagatcgcgccactgcactccagtcttgccagagcaagactccgtctcaaaaaaaaaaaatagattttaaggactgtataaatgctcttcacagctcagctatgttactgtgttaccttgcctttcctgctgaacattttgtttcccagatcatcttctttcagtgtgttcaggtattctagatattctgtcactttcatcttgaagaaattgctccctgagccctctgacattattccactttaagcgtgttgctctccatgttgctgcactgatgtcttcttgggctttttcttcaccatcatcccaggaattccttttgcctcatactgtgttagatcctcttatttcctgaattccacatctttgcttttgcattactttttttttttttttttttttttttgagacacagagtcttgctctgtcccccaggctggatctcggctcactgcaacctgcaaccttggtcttggtcttgaactcctgacctcaggggatccacccacctcagcctcccagagtgcggggattacaggcgtgagacaccacgcctggccttgttttttgttttgttttgcttttttttgagaccgagtctcgctttgttgcccaggctggagtccaaaggcgcgatgatcttggctcactgcaacgtccgcctcccgggttcaagcaattctcctgcctcagcctcccgagtagctgggattataggcacatgccactacgcctggctaattttttgtatttttagtagagacagggtttcaccatgttagccaggatggttttgatctcctgacctcttgatccacccgtttcggtctcccaaagtgctgggattacaggcgtgagtattacttctttactttagtggaacacattctagtagcttttttttaaaaaaaatttttttctgaattttaaaaaattgaggtgggggggtctcagttttttgcccaggctggtctcagactcctgggttcaagtgatcctcctgcttcagcatcccaaagtgctgagattataggcatgagccaccctgcatggccccattccagtagcatcctgagggagagtgcttgggaagggaattttcacatttaaaccatctccggggccgggcgcagtggctcacgcctgtaatcccagcactttgggaggctgaggcgggtggatcacgaggtcgggaaatcgagaccatcctggctaatgtggtgaaaccccgtctctactaaaagtacaaaaaaattagccgggtgtggtggcgggcgtctgtagtcccaggtactctggaggctgaggcaggagaatggcgtgaacctgggaggtggagcttgcagtgagccgagatctcgccactacactccagcctgggtgacagagcgagactccgtattaaaaaaaaaaaaaaaaaaatctccattcatggtcttttgattgtatcgatgtcagtttcctcgtttttgtttttgttttattttttttctttttttgagacagagtctcactgttgctcactgcagcctctgcctcctgggttcaagcgattctcctgcctcagcctcctgagtagctgggattagccaccacacccagctaatttttgtatttttagtagagatggggttttgccatgttggccaggtgatctcgaacccctgacctcaagtgatctgcccaccttggcctcccatagtgctgggattacaggcatgagccaccacatcctccatgtctggccagtttcctggtagtaatattgtactgtgtaccttgtttatatgtatagctcttgtttctatgtaacataaaaacattatattgggagaaactggttgaagggtacatgggacctcttggtactattttttgcaatttcctatgaatataattatttcaaaataaaaggaaaaaataatactctcctctgtcactgtatctagaattctagataggaaataatttttttaagaagcttttaagggcctcacttcattttcttctaactcctagtgtggtgttaagaaatttcatgccatttaactttttttttttttttccgagacagggtcccaccctgttgcccagtttggagcgtggctaaatcatggctcactggtgtctccaacccggtgtgcaccactatgcccagctaattttttttttttttttttttaagacatggtctcgttatgttggccaggctggtctcaaactcctggcctcaagtgctcgtcctgtcttggcctcccaaagtaatgggattataggcatgagccatggccccatttaactcttgagtctttgtgtaacacctgtttttctcaacctctgacagcatgcaggatttttcctttggcttcaatattttgaaaatgcatgataatatgccttagtatttgtctatttttatccatggttttttaaaaagtactttctttttgtttttgtttgtttgtttgttttgagacagagtctcgctccattgcccaggctggagtgcaatggcgtgatcttggctcactggaacctctgcctcccaggttcaagcaattgtcctgtttcagcgtcccgaggagctgggactacaggcgctcaccaccacaccctgctaatttttgtatttttagtagagacggggtttcaccttgttggtcaggctggtctcaaactcctgacctcgtgacccacccacctcagcctcccagagtgctgggattacaggtgtgggccaccatgcctggcgtatccatggttttaaggcacacgtgataaaccttattcttctgcagaaataatttttttttttttttttgagatggagtctcactctgttgccaggctggagtgcagtggcgtgatgtcggcccactgcactctccacctcctgggttcaagtgattctcgtgcctcagcctcccgagtagctgagattacaggcacgcgccaccacacttagctaatttttgtatttttagtagagatggggtttcaccatgttggccaggatggtcttgatctcctgaccttgtgatctgcctgcctcggcctcccaaagtgctgggattacaggcataagccaccacgcctggccagaagtaatttgtgtttaagttttagttttgtgtcatttttcgtgcacacctttgtacttttgttgggggatggggcggggtgtcggggttggagtcttgctctgttgcccaggctggagtgcagtggtgcagtcttggctcactgcaacctcttaattcctcagttcaagtgattctcctgcctcagcctgccaagtagctaggatcacaggcgtgcaccaccacacccagctaatttttttttgtactttattagagacagggtttcgccatgttggccaggctggtcatgaactcctgacctccagtgatccatcctcctcgttctcccaaagtgctggcattacaggcatgagccaccatgcccagccctttgtacattttttaatgtaggatgccatttgtccacttgactctcccactagtctgtaagctccatgagagcaggaattgcttcccttatgtgtgtgcttagcttttagcacagtgcctaggatatagaaaacatcttatgttcatcatgttggatgaacagatgcttattgtcatggtttaagttcagttcttatcttctttttttttttttgagatggagtctcaccctgttaccaacgctggagtgcagtggcatgatcttggctcactgcaatctccaccctaccacccccactgccaggttcaagcgattcttttgccccagcctcccaagtaactgggattacaggcacccaccaccacacccagctaatttttgtatttttagtagagatggagtttcaccatgttggccaggctggtctcaaactctcaatctcaagtgatctgcccgcctcagcctcacaaagtgctgggtttacagatgtgagccaccaaggccagcctatttactcttaaaactgaactgcctcggtctttttttttttccttcccttctgatgcccttcacaccatcatttgcttaaagtctttgatgtgtccattttatagattacgatgctgtctttgcagctgttgagcaggaacaaatcttacataagattgctcttagcatctgcttccttttctctctgtgacctaaactctccccttcctggcaaccagaatggagatcatcagttagaaaatattgaatagggctgggcgcggtggctgacgcctgtaatcctagcactttgggaggccgaggcgggtggatcacgaggtcaggagatcgagaccatcctggctaacacagtgaaaccctgtctctactaaaaatacaaaaaaatcagccgggtgtggtggcgggcacctgtagtcccagctactccggaggctgaggcaggagaatggcgtgaacctgggaggtggagcttgcagtgagcggagatcgcgccattgcactccatcctgggcgacagagcaagactccgtctcaaaaagaaaatactgaataactataaaatctttaaatagagattagtttaatttgaaatgtacaagtattcagcatatgctattcgtatatgtgtgttcatggatgtttgtgtatgtggtcttgtgtgtgtgtgtgtgtgtgtgtgtgtgtgtgtgtttctcttgatccaccaccaccccattcaccagcctgacagaagacagtgtttccagaaggaatgtaattcatgcgcatttttttcatgttaagttttataagaagaccaaacagctgccagtcctaggaaaatgctgtgaagagatccagccacatcagtggaagccacctatagagagagaagaacaccggctcccattctggttaaaggtacagccctcttcctcgaagtctgtaggaggcagaaggtcactgaaagttctgagagaatatcaaggacttccttaatcgtctaatgctttagttgtagaactaggacttcaggaatcttcctgattcacctttcttcccttacttttctgcccttctccgggtgattctacaacattttcaaaataatgggtaaaatggtaatttgctaaaggaaattcagagaagagtttctaaagtgtataattggactgtggtctttgtagaaatttcatatgcagagtcccttggaaagatgccttgagcttgtctcaggtccctaaacttagaaagtcctattctttttcccaaattctgacatgtgctggatcagagtgttctcatttccaataggccagtctgccatccatccaggaagaactgcggcacatggctgatggtgctagagaggtaggaaatatgactggaaccactgagatcaactcagatcaaggcctagaaaaagacaactcagagttggggagtgaaactcggtacccactgctattgcctaagggtgtagtcctgaaactgaagccagttgccgaccgtttccccaagaaggcttggagacagaagcgttcatcagtcctgaaacccctccttatccaacccagcccctctctccagcccagcttcaaccctgggaaaacaccagcccaatcaactcattcagaagcccctccgagcaaaatggtgctccggattcctcacccaatacagccagccactgttttacagacagttccaggtgtccctccactgggggtcagtggaggtgagagttttgagtctcctgcagcactgcctgctatgccccctgaggccaggacaagcttccctctgtctgagtcccagactttgctctcttctgcccctgtgcccaaggtaatgatgccctcccctgcctcttccatgtttcgaaagccatatgtgagacggagaccctcaaaaagaaggggagccagggcctttcgctgtatcaaacctgcccctgttatccaccctgcatctgttatcttcactgttcctgctaccactgtgaagattgtgagccttggcggtggctgtaacatgatccagcctgtcaatgcggctgtggcccagagtccccagactattcccatcgccaccctcttggttaaccctacttccttcccctgtccattgaaccagccccttgtggcctcctctgtctcacccttaattgtttctggcaattctgtgaatcttcctataccatccacccctgaagataaggcccacatgaatgtggacattgcttgtgctgtggctgatggggaaaatgcctttcagggcctagaacccaaattagagccccaggaactatctcctctctctgctactgttttccccaaagtggaacatagcccagggcctccaccagtcgataaacagtgccaagaaggattgtcagagaacagtgcctatcgctggaccgttgtgaaaacagaggagggaaggcaagctctggagccgctccctcagggcatccaggagtctctaaacaactcttcccctggggatttagaggaagttgtcaagatggaacctgaagatgctacagaggaaatcagtggatttctttgagctaggagaataagagtctggagactgggagccttcacttcggcctccgattggtggcgcatagggtgtaaccaataggaaacccctaaagggtacttaaaccccagattttgcaactggggctcttgagcagcttgctttagcctgctcccactctgtggaatatacttttgcttcaataaatctgtgcttttattgcttcattgtttca

SEQ ID NO: 14991 - DNA, 2690 bp, Homo sapiens
gtagggtgggggtgctggcggcggctgctttggcggcggttggtggccgtgcgggcggggagggagggggaggagagaagaggaggtggagaaggcttgggctcgcgccgctgaagtcggcttacccgctggccgcctcctgacaagcgggagggatccgcggtggacccagggaagcggaggagcctggcggccaccccctcttcctcacttccctgtactctcatcgctctcggcctccgacacgttccaagatgagatgggattctccaacatggaagatgatggcccagaagaggaggagcgtgtggctgagcctcaagctaactttaacacccctcaagctctacggtttgaggaactactggccaacctactaaatgaacaacatcagatagcgaaggaactatttgaacagctgaagatgaagaaaccttcagccaaacagcagaaggaggtagagaaggttaaaccccagtgtaaggaagttcatcagaccctgattctggacccagcacaaaggaagagactccagcagcagatgcagcagcatgttcagctcttgacacaaatccaccttcttgccacctgcaaccccaatctcaatccggaggccagtagcaccaggatatgtcttaaagagctgggaacctttgctcaaagctccatcgcccttcaccatcagtacaaccccaagtttcagaccctgttccaaccctgtaacttgatgggagctatgcagctgattgaagacttcagcacacatgtcagcattgactgcagccctcataaaactgtcaagaagactgccaatgaatttccctgtttgccaaagcaagtggcttggatcctggccacaagcaaggttttcatgtatccagagttacttccagtgtgttccctgaaggcaaagaatccccaggataagatcctcttcaccaaggctgaggacaatttgttagctttaggactgaagcattttgaagggactgagtttcttaaccctctaatcagcaagtaccttctaacctgcaagactgcccgccaactgacagtgagaatcaagaacctcaacatgaacagagctcctgacaacatcattaaattttataagaagaccaaacagctgccagtcctaggaaaatgctgtgaagagatccagccacatcagtggaagccacctatagagagagaagaacaccggctcccattctggttaaaggccagtctgccatccatccaggaagaactgcggcacatggctgatggtgctagagaggtaggaaatatgactggaaccactgagatcaactcagatcaaggcctagaaaaagacaactcagagttggggagtgaaactcggtacccactgctattgcctaagggtgtagtcctgaaactgaagccagttgccgaccgtttccccaagaaggcttggagacagaagcgttcatcagtcctgaaacccctccttatccaacccagcccctctctccagcccagcttcaaccctgggaaaacaccagcccaatcaactcattcagaagcccctccgagcaaaatggtgctccggattcctcacccaatacagccagccactgttttacagacagttccaggtgtccctccactgggggtcagtggaggtgagagttttgagtctcctgcagcactgcctgctatgccccctgaggccaggacaagcttccctctgtctgagtcccagactttgctctcttctgcccctgtgcccaaggtaatgatgccctcccctgcctcttccatgtttcgaaagccatatgtgagacggagaccctcaaaaagaaggggagccagggcctttcgctgtatcaaacctgcccctgttatccaccctgcatctgttatcttcactgttcctgctaccactgtgaagattgtgagccttggcggtggctgtaacatgatccagcctgtcaatgcggctgtggcccagagtccccagactattcccatcgccaccctcttggttaaccctacttccttcccctgtccattgaaccagccccttgtggcctcctctgtctcacccttaattgtttctggcaattctgtgaatcttcctataccatccacccctgaagataaggcccacatgaatgtggacattgcttgtgctgtggctgatggggaaaatgcctttcagggcctagaacccaaattagagccccaggaactatctcctctctctgctactgttttccccaaagtggaacatagcccagggcctccaccagtcgataaacagtgccaagaaggattgtcagagaacagtgcctatcgctggaccgttgtgaaaacagaggagggaaggcaagctctggagccgctccctcagggcatccaggagtctctaaacaactcttcccctggggatttagaggaagttgtcaagatggaacctgaagatgctacagaggaaatcagtggatttctttgagctaggagaataagagtctggagactgggagccttcacttcggcctccgattggtggcgcatagggtgtaaccaataggaaacccctaaagggtacttaaaccccagattttgcaactggggctcttgagcagcttgctttagcctgctcccactctgtggaatatacttttgcttcaataaatctgtgcttttattgcttcattgtttca

SEQ ID NO: 14992 - DNA, 29303 bp, Homo sapiens
gctttggcggcggttggtggccgtgcgggcggggagggagggggaggagagaagaggaggtggagaaggcttgggctcgcgccgctgaaggtacgcgtgagggcctgcgctggagccggcttgacagggtctgagggggagtggagaactgggcgaggaggttcccgtgggtgagcgcgtacgggatggctggctcgcaggacggccgaaggtggtggttggtgggagcagccagcgacgagcccgtagacactcgtacgcgtgcgggctgacgtgcgcgctacatggccggagtcgggcgaagcgggggaccgtggggaagaacgcgaggagggaggagtgggaggttgggggtgtcgctaggcgcccttagctccctccctctggaggagctgccgcggccactctgctgccgccgctgccgccgccattttgggttcgctttgcgaggggaaacgatcccagtgtcggttgcgggatccgcctcctctcagtttgcccctttagccctccacctttcccttctcctctctcgcatttccgccagtcggcttacccgctggccgcctcctgacaagcgggagggatccgcggtggacccagggaagcggaggagcctggcggccaccccctcttcctcacttccctgtactctcatcgctctcggcctccgacacggtgagtagaacgatttgggccggcattcgggcctaagcactctctcagcgattgaatcctgggctttctgggagccactgtcatctcccggacctggacctctgggagagcagtggtgaagatgggggaggggagagcagggagggggatcctgagcctaccgggaagtccctccaggcggggtgaaggggtgtccctgacaggcagactcccggagggggctgggaagtaagcgagtggaggcggagtcggctgtgcccctgacaggttagtttgtgtttgtaggcatgatcggagcctcccccatagtccagtttgtgtgtgtttaattaagggataagagtggtcgaggacacgatcttgagaggggattttacctgtgtgacaaggtctgtggtgtccctgccgcgttgaacggtatgtgggaacgacaggatgatctcagtgttgtacgtttaataaatgtcactggttagtttgtacatggaaagagatgtttttggtctagcagacagatggtctgttggtgtgtagcggctgtgttggtgtgtgtatgtgaggatggcaagtgtttccgtaagagtttgcctttatttgtgtaagtgtaatggagttccccttataagttagcttatttcttgaataaatgttgggaggttccttgcaggttgatatgtgtgtgtattttagggattgggagcccctagttacttgttgggaaagagcggcaatggtagtgttctgtacagcatgtgtctgtgaggtcagggaggggagaaacttggcatagccagttgtggtcttaagaatagtttgtgcctttggttagagtgagttgtgtaaatgtgaagggccaaaatatctttaacagaatcattgctacaaagctgtaaagaatgggtggccttatttgttgtcgcgggtttatagtaatagtttacaatacaataagaaagctctttcagtttctttgtgatactgaatctctgtgaaaatggtaggatgctttcttccattttacaaaataggaaatttaggcataaggagagaacttctccaaggccgcatgttaaattggtgacaaagttggaactgtaactcccatattttcactactactgcagcagtatattcagcataccatggtgcctcaggaagtctttgtcggcaaatctgagtatgctggaaagataggagcacataagactggttggcttgtatttgggggagaccgattgtgtcagatatgtatgtggaacgtagctgtccttgccgagtctgacctgtatgaaatgcatatccatggctatattattttggatttatggaggaagcagagcatttctgacacttaaggttgtatgcgtgagggagaaggctttcacagcttaacttgtaccagagcagctgcatgggtgctgacagcttaacttgaaatctgtgggaggaaggatcctttttcactcattcaacaaatataaccattcaatgaatggtccatgccttgaggtgaggatcatcaaggtgtctctgtaaatagcctggatgcaatctgaggggagttgttttgacggtggtaggtattaagttgagggaggcagtgtggaattaaaaccagagaactgtttttgggtactggtaattgttaatatatgtgcctgtggatgttggaacttcttggctgggctgaaggaatcctttgaaagactgatttcggcagggcgcggtggctcacacctgtaatcccagcactttgggaggccgaggtgggcggatcacgaggtcaggagatcgaatcacgaggtcaggagatcgagactatcctggctaacaggatgaaaccccgtctctactaaaaatacaaaaaattagccgggcgtggtggcgggcgcctgtagtcccagctactcggggaggctgaggcaggagaatggcgtgaacccgggaggcagagcttgcagtgagctgagattgcgccactgcactccagcctgggccacagaggagactccatctccaaaaaaaaaaaaaaaaaaaaaaaaaagactgatttcatgtagtaaggatcccgtctatgaactctatgaatatgaggtaagaatgcatgaactaagccaacttagctgtattcttctggaaaatgggatgtttcttgataggctagattagtggttcttaaaagttttttggggtcacttatccttcagagaatcggatgaaagacactgggccctcaagttagaagatgagcataagcgcaatcacatgatttatatatatgattttaggaacttaaactgtaatgaaatagagccaatttatatttagatctcatttgaaaacctttcattttcattgttcgggtgtgtggatgttagtatgagtttaaggtgaaggagtctatgttagtatttgaacatgttgacaggatccatatttttaatttattctttttatcgtctgcaaacatttctgcagtattagtaaatgactctgtatttggtaaaaagggaagctaatgtcgcacaagtatctatggctttgttctttgtcagtatctttttgttctcaaactctgagaagcgtctttttttcagttttggattgggcctgaggtgatttgaagctcctgtcttggagtttaacttagttataacaaacactgagttaatcctatgcaggagacacaaagataattaatatatggtctctgtgcttgaagagacgctaattttctgtggttgaagagatgctgtgaattgtgtgatagtggcagctctcaaaaggacaaggaagagggaaacatattcctagaagctgaaattttattacccaattgcaaagactttttgtcactacttattcttaggaataaccataaagtgtttattttattctgtatggaactttgtactttaaaaaaatatgttttgtatcatctggtgtttttgtataaaggaactgttggtttgaaaagaaggtaaacatcatttatattccttaccttgttttgggatgtatctctacagtgagtttatgtaaaaaggtcttaatgtcatttttgggtatacatacatgtagaaagccctcctgatataaaatccagtagctatttgacagactacccattaatttattactggaacttaaaaataattactgtacttttaaaagaacaagaaattggtcaggtggggtggctcacgcctgtaatcctagcactttgggaggacgaggcggatggattgtcagagctcagaagatcgagaccagcctgggcaacacggtgaaaccccgtctctactaaaatacaaaaaattagctgcatgtgttggagtgcacctgtagtcccagctactcgggaagctgaggcacgagaattgcttgaaccaagaattgcttgaactgggagggggaagttgcagtgagctgaaatcatgccactgcactctagcctcggcatcagagcaacactctgtctcacaaaaaaaaaaaaaaaagcaagaaatgtaaaaaggtgttttaataggacagattataggattcagtgagataatggagaagttttaggaaaaattgtctgatagtcctttctttctattgacatggcccctgtataagaatgctatgtaaatttgtgaaaagtttaatattttctctaatttttaacgggtagtaggttcatggtgttatttttctcaaaacgtacatgtgatatgtgtgtgtagtgtgcatatatgtgcatgtatgtgtatacaatttctttatttttttaattgagattaggtctcgctatggttttttgtttttgtttttgtttttgagagagagtttcgctctcctcgcccaggctggagtacaatggcacaatcttgcctcactgcaacctctgcctcccaggttcaagtgattctctttcctcagcttcccaaatagctgggattacaggcgcgtgccaacacgccctgctgatttttgtatttttagttgagacagggtttccccacgttggccaggctggtcacgaactcctaacctcaagttctccagccgtctcggccttccaaagtgctgggattataggagtgagccactgcacctggcccaggtcttgctatgtagatcaatctggtcttgaactcctggcctcaagccatcctcctgtcttggcctcccagtttgctgggattacagatgtgagccagcatgcccagctctttttacctgcttaccaaatccaagattttctccaaaatgaactggaatagccttcttactgtgttaattttgccttggtggggaagcctaagtcttggaactaaattggggtggttatgacagttctctttttaaagctgatcagtatttcagtatttcacttgttgttgttttttttgttttgttttgttttttttgagatggagtcttgctctgtagcccagtttggaatgcagtggcaggattttgactcactgtagcctctgccacccggattcaagtgattctcctgcctcaatgtcctgagcagctgggtttacaggcacgcaccactacacctggctaatttttgtattgttagtagagacagggtttcaccatgttagccagtagccaagctgttctcatactcctgacctcaagtgatccacctgcctcagcctcccaaagtgctgggattacaggtgtgagccaccacgcctagccaaacccatctctttcattaaaccacctcattttggttcagaaacaagactgccatgtatgtatttaatgcttattatgtgccaagcactattccaggtactaagatacagtgatggacaaaacaagatcccttctcctctatctcaggacttattaatttgggcattttcattttccaatataggatcttttagtactggtataggattcctgaaggaattcctgaaatataattatttttctgctagagcaaatcaattttgttttttgttttttttttgagatggagtttcgctcttgtcgcccaggctggagtgcaatggcgcaatctcggctcactgcaacctccgactcccgggttcaagcgattctcctgcctcagcctcccaagtagctgggattacaggcattagccaccacgctaggctaatttttgtatttttagtagagacagggtttcaccaggttggccaggctggtctcgaactcctgacctcaggtgatcctccaggctcagcctcccaaagtgctaggattacaggcaggagccaccacgcccagaagagcaaaattcttctgttgacaaaaatttctttcctctgaggaagagacactgtgtgcctgtgttttatccaggaattccattggatagtttgtcctttgggatgtcagtggattaaatcctccattaagaatcaaagtacttggctgggtgcagtggctcatgcctgtaatccctgcactttgggaggctgaggcaggtggatcacctgaggtcaggagttggagaccaacctggccaacatgatgaaaccccatctctactaaaaatacaaaaaattatccaggtgttgtggcaggtgcctgtaatcccagctactctcgaaaaaacagaaacaaaaactctgacatgtagagtatgtagatgtagagaaaaaagtaaaatgattgttgaaaaaaatgtctattttttatcttctaaatagctttgtgtgtcagagatcagaacgctcattttacatgatatcaagaaccagaatgctagatagctagaatggttgttaacttcctagataaccattgtagaggaacacataaggtaaaacaaatgaataaaaattaaaaaaaaatgagatagccaaagatttgaagctctttacccattaacatgataatcatttcgactttgaatatttgtagaacaagagtcagaactcagaacaaagatctctgaggaaataaaaaaaaatcaagctgcctcctaatttctcatttagtctgtcattgggcattgtcaaactgtcaaactatatttagagattctggttttcatctggagacttagtgagttgtgtaatatcttgaatacacatataagatcttgccaggtggggtggctcatgtctgtaatcccagcactttgggaggatgaggtgggaggatcgctggagcccaggagttcaagaccagcctgggcaacatagcaagtccctggctctatttaaaaaaaaaaaaaaaaaaaaatcctcaatgtagaactttaaatttatccttacgtgttacatccagttgatttgagaaaatatgattctgaattttccatcaattggattggcagtccctttcagctttacagctttacatcatctacagatttgttaagtatgttctcttggtcttctaattcactgatggagtttttgaataggtcgggtccaaagatagagtcctatgaaacactgttggaaacttgtctctgtctgtctcttttttttttggagacagtgtcttgctctgtcgttcaggctggaatgcagtgggacggtctcagctcactacagcctctgcttcttggactcaaagagattctctcacctcagcctctcaagtatatgggactatatgcatgtgcgaccaagcccagataaatttttttttagagatatgttgacattttgcccaggttgggagacttgtctcttgattccattcagtattgtgtgggtttggataggccatctaattataaaatcattgggctggtcatggtggctcatgcctgtaatcccagcactttgggaggctgaggtgggcggatcacctgaggtcaggagtttgagaccagcctgaccaatatggagaaaccccatctctactaaaaacacaaaattagctgggcgtggtggtgcatgcctgtaatcccagctacttgggaggctgaggcaggagaatagcttgaacctgggaggcggaggttgcagtgagccaaaatcgtgtcatcgcactccagcctgggcaacaagagcgaaactccgtctcaaaaaaaaaaaaaaatcatctagctcacattttctccttgtcttcttcctattagaatttaagttcaatgagattagaactctctctctctctcattctctcatatatcccaagcatctaaaacagggattgaaacatagtaagtactcaataaatgtttttgaataaatgaatgaaggatagctgggcgtggtggctcatgcctgtaaccccagcactttgggaagccaaggtgggtggatcactggagctcaggagttcaagaccagcttgggcaacatggggaaaacccatctctacaaaatatggaagaattagccgggcatgacagcacactcctgttgccccagctacttggagggctgaagtgggaggatcgcttgagcctgggaagcagagattgcagtgagccgagatcaagccactgccctccagcccgggtgacagagtgagaccctgtctcaggaataaggatagatatgaagaattcgtcagatgccttgttgaaaacatcatacattgtctacatggaattcctccatattgtaaaatgaatctaatttataccaacaacgtttggcttttttgcagaaaaggaagcaaatgagctgatggaagatctgtttgaaactgtgagtaatgatcctcaagtgagaacatgggattgtaagttggttctccaacaaaatgtgtcctttgatctctgtgatgctccttctagaagagggactgaaccaattctccttttagtctacctgggaaagaatataatgacaaaagaaatttgctaactgctagactcttgattatccacatgtaggttattcttactaaaattttccttgaagctttttttttttttttttgaggcaaagtcttgctctgtcacccaggctctggagaatacagtggtgaaatctcagctcacagcagcctcgacctccagggctcaaaacaattctctcatctaagcctcctgagtagctgggactacaggcacacacctacaggcccggctaattattttatttttttgtagagacagggtcttgccatgttctggaactcataggctcaagtaatcttcctgcctcaacctcccaaagtgctggaattacaggtgtgagccagcacatcttgccccttgaaaacttttgatggcttcccctactgtcatttggtgtgtccttaaagattgccaactagttttaaagtattttgcacacaaataattaccttttccataaatttgtctaaaaagatatttctgtttaagaaattgatcattttgagttatcctagctctgtgcttactgatacaagttgactggttgagcaacttctttcctggcataatagtcattccatatgtgggtttgtaggagtcctgaagtgagaaaggttctgatgtaggctctttctgggtgccagcattattaaagtattgtttatagttttcacttttccttcccaacactggagcaacattcaaaagcccattccccaggaaaaccctccctttcctttgcccacagttccaagatgagatgggattctccaacatggaagatgatggcccagaagaggaggagcgtgtggctgagcctcaagctaactttaacacccctcaagctctacggtaggctagttgaagaccttgagatttggaatagaggaagagtttatttctgaaaaggttttcagaagttgcagttaacaatttttcatccccagccagcttctgttactgatgtaaggatgcagagtcctgtcaggagttaggtgtcaagtgaagtctccttgttatggggcagtgcagctgtaggccaagctgtatctgtttgggaagggagaaaaaacagtagctggcatccatatccacttctccgggtgagtggtgctggagaggtatgtaggactcaatgtggccagccacacaaactaccctatattgtaatatccagtctgtcccttttgttctttttatgtgccattaatatctgctaaatgtgactgaaaatttgttagtcacctaggcattagtggagcaaaccctgaagcacctgcagtaaggagtctgaaacatacgtgctgacctttttgcctaaagttggcacttgtgttacagcatccagaaagtagaggctttaattttttcctcattttgtggtggatttgcatctgcactttattctgttgtagcagcatataatcattaggtcgatggcgagaggtcaggatgcagtttgtgccataagtggaacaaagcaaagagaatagtccctgtaattagtcctgtgtttgaacttaacagcactactaagcagagagcttgggttccatctgaaagctagacctttagggattttccaatttagtgaaaaaagataagataggccaaccaatgtcttaaaaactagaactactagtcattctccattacaacaaatatcacaatacaactacatcaaaaatctcaagattgctaagtcagtatttgacccattattttaatttatagttcatagaacaaaattctggtatagcagaatggaaccattcatcctgggaacgtataataggatctgattaataaatattttggttttgctgatcaactctttataacttcttaaaatttggaaaatatagaactaatttaaaattcctgttagaatccagttaccttctggtattcaatggaatatagtcatatatcatctcatggtcataccctctgtgaaatctatcattaaacgattcatcattgtgtaaacatcgtagaatgtacttacataaacctaaatggtttagcctactgcatacctattgctcccaggctacaaaacctgtacagtgtgttactgtactgtactgaatactgtaggcagttgtaacacaatggtaagtacatatgtatgtaaacatagaaaaggtacagtaatcttatggagccacctctgactatgtggttcgttattgactgaaacattctgtggcgcatgactgtacttgggcagcttctgcttctctttcgattgcaaatacaaacctgtttttgttttaatctttgactaaataaaaatccctctgtaagtccatagagagtaagcacatcttaaaacacaataaggaagagagaggagaaaaagacagtcaaaacaaaaactctggggcttcccttatcaattacctaaataatccttgttaaaactaagtgcaggctatgtttccattttctacttttttatgcttcttctcttctgttccttcagtggtggtagcgcggatgttcaaattttcagttctcagtaaagattgtatagacagtcccacggtcttcaggtttttactctgtgctacccaaacctacagtaaatactataaaagaaaacttattcaaacgtaatctttatctgcaaaaactattgaaaaacgttaccatttaactattgctgtaatatagggggttccttgaaatatgataacctgcttgttatagctacttcagcagatcttatcctgttgcatagggtatcagcatatgcttaatcatttaggtatattattctccctttatttctttctatgtaaacatagaaaaggtatagtaatcatacatagaactgacatgctaggtattggaatttttgcttcagccctgcaaacaatctttcaggagggtatggatgggaagttagggttaggaaccttggaagaggaatttaaagggctaaaagaagatagccttcatggataatattttaactaacttctccgttctgttcatttgaactaccatgtacttcagttattttggtatatccttttcctgcttcatgctagaaagtctttgacttgttaagaaagcagggcagtgcagcctgagtagataggataatgggacaagctggacctgggatgggagtaacatcccagggagtaacaagtaatgagagaagaaatgagaatgatgagttcccaccagctccttggctgctttcttacccatatatttctctgtccctagttttttgtttaattttttcttcatttgtatattatttggaagaggaattgtagaggaatgggatggggtgtaatacagaatcatttgatgcatgctaactactttgggaaaagatttgtgtaaggctgggagtttgactgttggctaaagtgaaaaggggggattagtagggaatgaaaattgttcaggctctttgctcatcattgcaaagaattggatgtgttgtggacctaggaaaacactcaaattcagtcatccccgtttgggataggtttgaggaactactggccaacctactaaatgaacaacatcagatagcgaaggaactatttgaacagctgaagatgaagaaaccttcagccaaacagcagaaggaggtagagaaggttaaaccccagtgtaaggaagttcatcagaccctgattctggacccagcacaaaggaagagactccagcagcagatgcagcaggtaacactttccttggtcatattaatattgaattataccaaggcctaactctgaggctttggtataatctaaaattagcagctttgtaaatgtcagagatagttaccttactacgtattaaaaccgtagtatcttcacatcagttaggagcttgagaagtcatcatgttcatgtcctgtggctcagggaagacagcacataaggaccctaatggtattcggaattacagatttcaaagagtcctcagtaatctattctgaaatttaaccttcactgtgacaagtagttttttttcccttttcccttttcttttttcttttttttttgagacgtagtctcgctctgtcacccaggctggagtgcagtggctcaatctcagctcactgcaagctctgcctcccgggttcacgccattctcctgcctcagcctcccgagtagctgtgactacagggactcgccaccacacccagctaattttttgtatttttagtagagacagggttcactgtgttagccaggatggtctcgatctcctaacctcgtgatccacccgcctcggcctcccagagtgctgggattacacgcgtgagtcactgcgcccggccttttccttttctaatctcagttcctcctctgtttagaggttaaacttcctctggttctgtcattttgttcaagggaacatgtctgagaaatttatgccaagatcctacgttgttctcacactctttgcagaaagcaaaatttgtgtcataaagttgcaaacatcttagttaatgactctctggtggctgggtgcagtggctcacacatgtaatcccagcactttgggaggctgaggtgggaggattgcttgagcaggggagttcaaaagcagcctggacaacatagtgagactctgtctctacaaaaaataaaaataaggctgggcacagtggctcacacctgtaatcccagcactttgggaggccaaggcgggtgaatcatgaggtcaggagtttgaggcaagcctggccaacatggtgaaaccccgtctctacgaaaacaaaaaattagctgggtgtggcggcgggcacctgtaatcccagctactcgggaggttgaggcaagagaatcacttgaacctgggaggcagaggttacagtgagccgagatcacgccattgcactccagcccaaaagtcagtgcgagactctgtctaaaaataataataataataataataaaataaattagccaggcattgtggtcacagctacttgggaggctgaggtgggaagattgcttgagcacaggtggttgagagggcattgagtcatggttgcaccactgcactccaagctgtgtgacagagcaagaccctgtctccagggggaaaaaaaaatatctctgggctcctgaaatggcagtgtcataacatatcactgcattattttctttctctccccagcatgttcagctcttgacacaaatccaccttcttgccacctgcaaccccaatctcaatccggaggccagtagcaccaggatatgtcttgtaagtttccaaattgccgtaattctatagactagaatataaaattagcttggcaggttatttctcacagttattctctcaggtatttttgattgctgtggcttcctatgtttgctgagtgaacataagccactgattcacatgaaaggacaaagagtgtattcaattttttcttttcttttttgagacagggtcttgctctttcacccaggatggagtgcggtggaacaatttcagttcactgcaacccctgcctcccgggttcaagtgattctcctgcctcagcctcccaagtagctgggactacaggcgggcaccaccacgggtaattttttttgtatttttagtagagacagggttttgccatgttggccaggctggtctcgaattcctgacttcaagtgatctgcccacctctacctcccaaagtactgggattacagccatgagccactgcgcctggcctgtccttctgatatttttattgggtcctcctcctcatctttagattcaccctgacttcttaggtttttggtaccgctattcatttcatagatgttgaggctgggcatagtggctcacacctgtaattccagcactttgggaggctgaggtgataggatcacttgagcccagtggtcaagaacagcctgggcaacatagtaagacccggtctgtgttttttttgttttgttttgttttaatttaaataatgaagtaaatatacatgtagatgttgaattcattatccattcatgaagctcaatattagtgttttatgtgtagagctagttttgctcatgacgttttgaggtattttgagctttttttttttttttttttttttttgagacggagtctcgctctgtcgcccaggctggagtgcagtggcgggatctcggctcactgcaagctccgcctcccgggttcacgccattctcttgcctcagcctcccaagtagctgggactacaggcacccgccactatgcccggctaattttttgtatttttagtagagacggggtttcaccgttttagccgggatggtctcgatctcctgacctcgtgatccgcccacctcggcctcccaaagtgctgggattacaggcgtgagccaccgcgcccggcctattttgagattttaaatttgaaatttggccaggtatggtggctcatgcctgtagtcccagcactttggtaggtcaaggtgggaggattgcttgagcccaggagtttgagaccagcctgggcaacatagtaagaccccatccctaccaaaaaaataaaaaataaaaaaattagctggggatggtgccgagtgcctgtagtcccagcaacttgggagactgaggtaggaggatcacttgagcctgggacgttgagactgtagggagccgtgcttatatatcactccagcctgggtgacagagtgagaacctgtctcacaaaaacaaaaccatactttacctcataaaaattgcctcaaacttttggacaggtaatgataatactctcagcttcttcagtaagtcttctttggattttgaagagtacatttgctagtattctaaaacttccttggtgatcaacaggatgtcttcatctcttactgtattcagaggaggatgaggagtacttggttgtaggcattattctgagaccaaaagacaaaacaattttaaaagtaatggtcctggtcgggtgaggtgactcatccctgtaatcccagcactatgagaggccgaggcaggcggattgtgagcccaggagttcgagatcagcctggccaagatgggaaaacgctgtctctgcaaaaaatacaaaaatcagctaggtttggaggtgtatgcctatagtcccagcttctcaggaggcagtgggaggatggcttgagcctgggagggggagtttgcagtgagctgagatcatgccactgcagtccagcctgagcggcagagtgagaccatgtctcaaaataaattaattaattaaattaaagtaatagtccccattcttgagactcttaattctagctcgggagctagaccatgtattccttagtgagaaacagtttaaaaataaaacaagaatataatccctgaatatctgagaactcaggcataatcttaacagtagtttattgtgaaagactttatgattatttttacctgtttttatcctgtagtaggaaggtcagcttctcatttagattctgaaggctattggtattaattgtctggaattgtcttagatcttccttgtgtcgtgttttcccagaaagagctgggaacctttgctcaaagctccatcgcccttcaccatcagtacaaccccaagtttcagaccctgttccaaccctgtaacttgatgggagctatgcagctgattgaagacttcagcacacatgtcagcattgactgcagccctcataaaactgtcaagaagactggtaggagacagatgtgtcagctttaagtttttacttgcggtgagaggtggtgggaatcttatcccatagataacttcctaggatacttgcctaggaatggaggacacaggacatttgtaatttcttccttctctcttttatcctccctttgtactcattatccaagttctagaattacatgataatctccgggcctgggtaaggcatggaggcagtggacagtataggaatatgggaggtagagatctgaggctcagtgctaagaattggactacagcaatatgaggggtaagtattaggaatcagatcaagataaactggggcctggtaaagatgaaagtcaggtggtaaagttcggtcatgtttagctttttattctcttcattaagatcaactaactttatttaccataatgattgtagcataggtgatatctccattctgaatgaaatgttgacttgcaagttaggcgtaaattagagattgtacatttgccgtgttcagtattttaaagaaatttgccggtttagattctaccttgcattggtttagtattttttgagaaaatatttgctatttacttaagccaaatatttacttctgatttgtttgctgacttagcaaattagttgtggtttgttctggatttgggtttgtctttggattctattttaaatccctaagtcttatcattacattgaatgtagttgaatttaagtgtactatatcatagacacagatcccaaactactttaatagctatattatatgaaatggtaatgaaaacgtgatttaataccaaattatagtattatcttacacatctagtgtcctgtgtttttcttctggagatataaaaatgacacttatggaaggagaaatatggatatagtagttttgtctctagaaatgcagaggtgcctaaaattgagaggctgagagagggagacagaaatgaatgagactgaattgtctcattccttttatggttcttttgttcccaacctcaggaggaatctgggagaacttaatgaaagttaagaaagaatgaaataaaagtaaaatttggaataccaggtttgtgagggagattaaagaagttggaatcttttttcttttttttttttttaagatggagtctcgctctgtcacctaggctggagtgcagtggggtgatctcggctcactgcaacctccgcctcccaggttcaaacaattctcctgcctcagcctcccaagtagctggaattacaggtgcgtgccaccatgcctggctaatttttacatttttggtagagatggggtttcactatgttggccaggctggtcttgaactcctgacctcaggtgatccacctgcctcggcctcccaaagtgctgggattacaggcgtgagccagcacgcctggcctggaatcttatcctggaagaaaaaagcattgttgaaggtctgttatccttcagagatttaaaggggaaaggaggtaaaacatttttgagcatacactatgtgacaggtattactaggtactttttaagtgtttgttttactttgtgaataaagtgttacacgtaagaaagagtaagagaggccgggcgccgtggcttacgcctgtaatccaacactttaggaggccgaggctgtcggatgacaaggtcaggagatcaagaccatcctgtctacagtgaaaccccgtctctactaaaaatacaaaaaatcagccaggcgtggtggcaggcgcctgtagtcccagctactcaggaggctgaggcaggagaatggcctgaacccgggaggcggagcttgcagtgagccaagattgcgccacgcactccagtctgggcgacagagccagactccgtctaaaaaaaaaaaaaaaaaaagtcaacttttattgccagtgaatgggactccctttagacctaatgttagttgaggaaagactgtggaaactctttggggagtggtaggcagatgggagggaatcaagttagataaggacagctctacctaaatgcaaaaatgcattcacaggctttttgaagccctcttttttcctagaagttgatttatcagagatttattttcttatagccaatgaatttccctgtttgccaaagcaagtggcttggatcctggccacaagcaaggttttcatgtatccagagttacttccagtgtgttccctgaaggcaaagaatccccaggataagatcctcttcaccaaggctgaggacaagtaagtgtttactctgggggatcaaatatcccaaggagaagatgtagttcctttgaggagtttaggggaagtaagacttgtataataagacatggacacaaaaggaaaagcagtatagatgagcagagtcctctagaacgtgcttgttctagcagtgccaaatactgctttttggggggatgttacacacatttttaaaatgttttagactggacatggcggctcccacctgtaatcccagcactttgaaaggccaaggcaggaggttggcttttctaatgttattatttatttagagacaggatcttactctgtcacccaggctggagtacagtgttgcaatcacagctcactgcagccttgaactcctgggatcaagtgatcctcctgcctcagcctccatggagtagctgggaccacaagcgtgtgccaccatacatggctgattttttttgtacaggtgagggtatctctgtgttgcccaggctgctcttgaattcctgacctcaaatgatcctcccactcctggcctcccaaagtgctgggactataggcataagccaccacacccagctagattatgaacatttttatggccctttgtgtgtattgccacactgttaacagcaaatatgtatatatgtaaccatgattatatatgttatgttagagggtagtattggtgccagtttaatttgtctgacggggtacctattattcattttatatttgttttattagaatcattctccttcccatgtattctctttgaacttcctttgtgttgttaatatacagctcatcatgatctgacatttattgatgatttatgactagtttctcttgctcctacttaattgtgaactatttgattcttattcatagtacttaatcactactcactaaatacctgaaattttctactgagtagtcaccaacttgtagtagtcactacaagaattagttgtagaaaaagtagattggccagccatggtggctcacacctgtaatgacgacactttgggaggccgaggcaggaggatcacttgaggccagaagttcaagatcagcctaggcaacaaagtgagaactggtctctacaaataatgaaataaaacattagttaggcatggtagcaaacgtttatagccacagatactcaggaggctgaagtgcgggaatcgattgaacccaggcattcaagactgcagtgcactgtaatcatgccactgctctccagcctggacaacagagcaaaaccctgtctgaaaaaaatgaaaaagtagattgggccacacgccatgggctcatgcctgtaatctcagcactttgggaggctgagactggagaatcgcttcagcttaggaagtagcagctgcagtgggctgcgatcacgccactgcactccagcccaggtgacagagtgagaccttgttttaagaacaagtaagaaaaagtagattgtaaaatgtgttagtctggggaggccctttagaaggaaggactgtgaagtgagatttagtgttattgctcctttctcagtttgttagctttaggactgaagcattttgaagggactgagtttcttaaccctctaatcagcaagtaccttctaacctgcaagactgcccgccaactgacagtgagaatcaagaacctcaacatgaacagagctcctgacaacatcattaaagtgagtgtttcctgcatgcactatccaggcacctcaccaacacatatctgttcttttctcttgttattctcaaagaaaagaagaaccttcttttatctaaagctaatttctcctacttatatactagattaattcccctgttgccttttcagggacattgattcattcattacgttcctctggagtatcttcatcctcttaaaagattccacaaatccatgtttccctgtaataattctctttcttgaactttctagaaatgatatgcagtattccacttacatgctttgggtttttgttttgttttgtttttttggtcagacataatcttgcactgtcacccaggctggagtgcaggagtatagtggcatgatcttggctcactgcagcttccgcctcccgggttcaagtgattctcctgcctcagcctcccaaatagctgagattacaggcgtgcccaccacgctcagctaattttttgtatttttagtagatacgggtttcaccatgttggccaggctggtcttgaacttctgacctcaagtgatccaccagttttggcttcccagaggctaggattgcaggcataagccaccgtgcccagcctatatactttttctcaattttgtgtttgtatgtatgcatgtatgtgtgtgtgtgtgtgtgtgtgtgtttgtgtgtgtctgtgtctgtatgtatgtatgtatgtatgtatgtatgtattgagatggagtttcgctcttgtcgcccaggcccagcctatatactttttctcaactctttttacttattgattgattgattgagatggagtctcgctcttgacccccaggctggagtgcaatggtgcgatcttggctgactgcaacctctgcctcctgggttcaagtgattctcctgcctcagcctcccttgtagctgggattacaggcccctgccaccatgcccagctgatttttgtatttagtagagtcggggtttcaccatgttggccaggctggtctcgaactcctgacctcaggtgatccatctgcctcggcctccctaagtgctgggattacaaatgtgagccattgcccccagccttcttttttatttagatatttatttatgtttttttttttttttagagacaggttctcactctgtcatcctggctggagtgcatgggcacaatcataggtcactgcaacctcaaattcctgggtgatccttccacttcagccttccaagtagcttggactacaggtgcatgccaccaaggctagccgattattttattttgtgtgaagacagggtgtcattttgtttcccaggctggtcttgaagtcctgacctcaagcagtcctcttgcctcagctcggcctcccagagtgttgggattacaggcgtgagccatgatgcccagcctttggtttcattgtgtttttgtatttttcttgagacaaggtcttactctcctgcctaggctggagtacagtggtatagtcatagctcactgcagccttgaactcctaggctcaagcattcttccaacgtcagcctcccaaggagctgggattatatgcattagccactgtgcttggccattaaatttatttatttatttattttattttatttttttgagacagaatctgtctctgtcacccaggctggagtgcagtggcacaattttagctcactgcaacctccacctaccgggttcaagcaattttcatgccttagcctcctaagtagctgggactacaggcatgcgccaccacacctggctaatttttatatttttagtagaaacataatttcaccatgttggtcagtctgatcttgaactcctgatctcaggtgatctgcccacctcggcctcccaaagtgctggaattataggcgtgagcctctgtgcctggcaaaaaactttttttttttagggatggggtgtccctatattgcccaggctggtcttcaatttttggccttaggcaattctcctgtctcagcctctaattggtactgcctggtgtattggatttaggccttacttattaaccataaaccacggaagccgaagatttacctctctcctcactcccttactcccaccacaaacatgcacattttctgctctccaaactcctcactagtagttatggtagaattttggttagattgtattcagggtttacattgtaagattttaaggactgttggctgggcgcggtggctcacgcctgtaatcccagcactttgggaggccaaggcaggtggataacgaggtcaggaaatcgagaccatcctggctaacatggtgaaaccccagctctactaaaaatacaaaaaactggctgggcgtggtggcgggcgcctgtagtcccagctactcgggaggctgaggcaggagaatggtgtgaacccgggaggtggagcttgcagtgagccgagatcgcgccactgcactccagtcttgccagagcaagactccgtctcaaaaaaaaaaaatagattttaaggactgtataaatgctcttcacagctcagctatgttactgtgttaccttgcctttcctgctgaacattttgtttcccagatcatcttctttcagtgtgttcaggtattctagatattctgtcactttcatcttgaagaaattgctccctgagccctctgacattattccactttaagcgtgttgctctccatgttgctgcactgatgtcttcttgggctttttcttcaccatcatcccaggaattccttttgcctcatactgtgttagatcctcttatttcctgaattccacatctttgcttttgcattactttttttttttttttttttttttttgagacacagagtcttgctctgtcccccaggctggatctcggctcactgcaacctgcaaccttggtcttggtcttgaactcctgacctcaggggatccacccacctcagcctcccagagtgcggggattacaggcgtgagacaccacgcctggccttgttttttgttttgttttgcttttttttgagaccgagtctcgctttgttgcccaggctggagtccaaaggcgcgatgatcttggctcactgcaacgtccgcctcccgggttcaagcaattctcctgcctcagcctcccgagtagctgggattataggcacatgccactacgcctggctaattttttgtatttttagtagagacagggtttcaccatgttagccaggatggttttgatctcctgacctcttgatccacccgtttcggtctcccaaagtgctgggattacaggcgtgagtattacttctttactttagtggaacacattctagtagcttttttttaaaaaaaatttttttctgaattttaaaaaattgaggtgggggggtctcagttttttgcccaggctggtctcagactcctgggttcaagtgatcctcctgcttcagcatcccaaagtgctgagattataggcatgagccaccctgcatggccccattccagtagcatcctgagggagagtgcttgggaagggaattttcacatttaaaccatctccggggccgggcgcagtggctcacgcctgtaatcccagcactttgggaggctgaggcgggtggatcacgaggtcgggaaatcgagaccatcctggctaatgtggtgaaaccccgtctctactaaaagtacaaaaaaattagccgggtgtggtggcgggcgtctgtagtcccaggtactctggaggctgaggcaggagaatggcgtgaacctgggaggtggagcttgcagtgagccgagatctcgccactacactccagcctgggtgacagagcgagactccgtattaaaaaaaaaaaaaaaaaaatctccattcatggtcttttgattgtatcgatgtcagtttcctcgtttttgtttttgttttattttttttctttttttgagacagagtctcactgttgctcactgcagcctctgcctcctgggttcaagcgattctcctgcctcagcctcctgagtagctgggattagccaccacacccagctaatttttgtatttttagtagagatggggttttgccatgttggccaggtgatctcgaacccctgacctcaagtgatctgcccaccttggcctcccatagtgctgggattacaggcatgagccaccacatcctccatgtctggccagtttcctggtagtaatattgtactgtgtaccttgtttatatgtatagctcttgtttctatgtaacataaaaacattatattgggagaaactggttgaagggtacatgggacctcttggtactattttttgcaatttcctatgaatataattatttcaaaataaaaggaaaaaataatactctcctctgtcactgtatctagaattctagataggaaataatttttttaagaagcttttaagggcctcacttcattttcttctaactcctagtgtggtgttaagaaatttcatgccatttaactttttttttttttttccgagacagggtcccaccctgttgcccagtttggagcgtggctaaatcatggctcactggtgtctccaacccggtgtgcaccactatgcccagctaattttttttttttttttttttaagacatggtctcgttatgttggccaggctggtctcaaactcctggcctcaagtgctcgtcctgtcttggcctcccaaagtaatgggattataggcatgagccatggccccatttaactcttgagtctttgtgtaacacctgtttttctcaacctctgacagcatgcaggatttttcctttggcttcaatattttgaaaatgcatgataatatgccttagtatttgtctatttttatccatggttttttaaaaagtactttctttttgtttttgtttgtttgtttgttttgagacagagtctcgctccattgcccaggctggagtgcaatggcgtgatcttggctcactggaacctctgcctcccaggttcaagcaattgtcctgtttcagcgtcccgaggagctgggactacaggcgctcaccaccacaccctgctaatttttgtatttttagtagagacggggtttcaccttgttggtcaggctggtctcaaactcctgacctcgtgacccacccacctcagcctcccagagtgctgggattacaggtgtgggccaccatgcctggcgtatccatggttttaaggcacacgtgataaaccttattcttctgcagaaataatttttttttttttttttgagatggagtctcactctgttgccaggctggagtgcagtggcgtgatgtcggcccactgcactctccacctcctgggttcaagtgattctcgtgcctcagcctcccgagtagctgagattacaggcacgcgccaccacacttagctaatttttgtatttttagtagagatggggtttcaccatgttggccaggatggtcttgatctcctgaccttgtgatctgcctgcctcggcctcccaaagtgctgggattacaggcataagccaccacgcctggccagaagtaatttgtgtttaagttttagttttgtgtcatttttcgtgcacacctttgtacttttgttgggggatggggcggggtgtcggggttggagtcttgctctgttgcccaggctggagtgcagtggtgcagtcttggctcactgcaacctcttaattcctcagttcaagtgattctcctgcctcagcctgccaagtagctaggatcacaggcgtgcaccaccacacccagctaatttttttttgtactttattagagacagggtttcgccatgttggccaggctggtcatgaactcctgacctccagtgatccatcctcctcgttctcccaaagtgctggcattacaggcatgagccaccatgcccagccctttgtacattttttaatgtaggatgccatttgtccacttgactctcccactagtctgtaagctccatgagagcaggaattgcttcccttatgtgtgtgcttagcttttagcacagtgcctaggatatagaaaacatcttatgttcatcatgttggatgaacagatgcttattgtcatggtttaagttcagttcttatcttctttttttttttttgagatggagtctcaccctgttaccaacgctggagtgcagtggcatgatcttggctcactgcaatctccaccctaccacccccactgccaggttcaagcgattcttttgccccagcctcccaagtaactgggattacaggcacccaccaccacacccagctaatttttgtatttttagtagagatggagtttcaccatgttggccaggctggtctcaaactctcaatctcaagtgatctgcccgcctcagcctcacaaagtgctgggtttacagatgtgagccaccaaggccagcctatttactcttaaaactgaactgcctcggtctttttttttttccttcccttctgatgcccttcacaccatcatttgcttaaagtctttgatgtgtccattttatagattacgatgctgtctttgcagctgttgagcaggaacaaatcttacataagattgctcttagcatctgcttccttttctctctgtgacctaaactctccccttcctggcaaccagaatggagatcatcagttagaaaatattgaatagggctgggcgcggtggctgacgcctgtaatcctagcactttgggaggccgaggcgggtggatcacgaggtcaggagatcgagaccatcctggctaacacagtgaaaccctgtctctactaaaaatacaaaaaaatcagccgggtgtggtggcgggcacctgtagtcccagctactccggaggctgaggcaggagaatggcgtgaacctgggaggtggagcttgcagtgagcggagatcgcgccattgcactccatcctgggcgacagagcaagactccgtctcaaaaagaaaatactgaataactataaaatctttaaatagagattagtttaatttgaaatgtacaagtattcagcatatgctattcgtatatgtgtgttcatggatgtttgtgtatgtggtcttgtgtgtgtgtgtgtgtgtgtgtgtgtgtgtgtgtttctcttgatccaccaccaccccattcaccagcctgacagaagacagtgtttccagaaggaatgtaattcatgcgcatttttttcatgttaagttttataagaagaccaaacagctgccagtcctaggaaaatgctgtgaagagatccagccacatcagtggaagccacctatagagagagaagaacaccggctcccattctggttaaaggtacagccctcttcctcgaagtctgtaggaggcagaaggtcactgaaagttctgagagaatatcaaggacttccttaatcgtctaatgctttagttgtagaactaggacttcaggaatcttcctgattcacctttcttcccttacttttctgcccttctccgggtgattctacaacattttcaaaataatgggtaaaatggtaatttgctaaaggaaattcagagaagagtttctaaagtgtataattggactgtggtctttgtagaaatttcatatgcagagtcccttggaaagatgccttgagcttgtctcaggtccctaaacttagaaagtcctattctttttcccaaattctgacatgtgctggatcagagtgttctcatttccaataggccagtctgccatccatccaggaagaactgcggcacatggctgatggtgctagagaggtaggaaatatgactggaaccactgagatcaactcagatcaaggcctagaaaaagacaactcagagttggggagtgaaactcggtacccactgctattgcctaagggtgtagtcctgaaactgaagccagttgccgaccgtttccccaagaaggcttggagacagaagcgttcatcagtcctgaaacccctccttatccaacccagcccctctctccagcccagcttcaaccctgggaaaacaccagcccaatcaactcattcagaagcccctccgagcaaaatggtgctccggattcctcacccaatacagccagccactgttttacagacagttccaggtgtccctccactgggggtcagtggaggtgagagttttgagtctcctgcagcactgcctgctatgccccctgaggccaggacaagcttccctctgtctgagtcccagactttgctctcttctgcccctgtgcccaaggtaatgatgccctcccctgcctcttccatgtttcgaaagccatatgtgagacggagaccctcaaaaagaaggggagccagggcctttcgctgtatcaaacctgcccctgttatccaccctgcatctgttatcttcactgttcctgctaccactgtgaagattgtgagccttggcggtggctgtaacatgatccagcctgtcaatgcggctgtggcccagagtccccagactattcccatcgccaccctcttggttaaccctacttccttcccctgtccattgaaccagccccttgtggcctcctctgtctcacccttaattgtttctggcaattctgtgaatcttcctataccatccacccctgaagataaggcccacatgaatgtggacattgcttgtgctgtggctgatggggaaaatgcctttcagggcctagaacccaaattagagccccaggaactatctcctctctctgctactgttttccccaaagtggaacatagcccagggcctccaccagtcgataaacagtgccaagaaggattgtcagagaacagtgcctatcgctggaccgttgtgaaaacagaggagggaaggcaagctctggagccgctccctcagggcatccaggagtctctaaacaactcttcccctggggatttagaggaagttgtcaagatggaacctgaagatgctacagaggaaatcagtggatttctttgagctaggagaataagagtctggagactgggagccttcacttcggcctccgattggtggcgcatagggtgtaaccaataggaaacccctaaagggtacttaaaccccagattttgcaactggggctcttgagcagcttgctttagcctgctcccactctgtggaatatacttttgcttcaataaatctgtgcttttattgcttcattgtttca

SEQ ID NO: 14993 - DNA, 2701 bp, Homo sapiens
gctttggcggcggttggtggccgtgcgggcggggagggagggggaggagagaagaggaggtggagaaggcttgggctcgcgccgctgaagtcggcttacccgctggccgcctcctgacaagcgggagggatccgcggtggacccagggaagcggaggagcctggcggccaccccctcttcctcacttccctgtactctcatcgctctcggcctccgacacgaaaaggaagcaaatgagctgatggaagatctgtttgaaactttccaagatgagatgggattctccaacatggaagatgatggcccagaagaggaggagcgtgtggctgagcctcaagctaactttaacacccctcaagctctacggtttgaggaactactggccaacctactaaatgaacaacatcagatagcgaaggaactatttgaacagctgaagatgaagaaaccttcagccaaacagcagaaggaggtagagaaggttaaaccccagtgtaaggaagttcatcagaccctgattctggacccagcacaaaggaagagactccagcagcagatgcagcagcatgttcagctcttgacacaaatccaccttcttgccacctgcaaccccaatctcaatccggaggccagtagcaccaggatatgtcttagctgggaacctttgctcaaagctccatcgcccttcaccatcagtacaaccccaagtttcagaccctgttccaaccctgtaacttgatgggagctatgcagctgattgaagacttcagcacacatgtcagcattgactgcagccctcataaaactgtcaagaagactgccaatgaatttccctgtttgccaaagcaagtggcttggatcctggccacaagcaaggttttcatgtatccagagttacttccagtgtgttccctgaaggcaaagaatccccaggataagatcctcttcaccaaggctgaggacaatttgttagctttaggactgaagcattttgaagggactgagtttcttaaccctctaatcagcaagtaccttctaacctgcaagactgcccgccaactgacagtgagaatcaagaacctcaacatgaacagagctcctgacaacatcattaaattttataagaagaccaaacagctgccagtcctaggaaaatgctgtgaagagatccagccacatcagtggaagccacctatagagagagaagaacaccggctcccattctggttaaaggccagtctgccatccatccaggaagaactgcggcacatggctgatggtgctagagaggtaggaaatatgactggaaccactgagatcaactcagatcaaggcctagaaaaagacaactcagagttggggagtgaaactcggtacccactgctattgcctaagggtgtagtcctgaaactgaagccagttgccgaccgtttccccaagaaggcttggagacagaagcgttcatcagtcctgaaacccctccttatccaacccagcccctctctccagcccagcttcaaccctgggaaaacaccagcccaatcaactcattcagaagcccctccgagcaaaatggtgctccggattcctcacccaatacagccagccactgttttacagacagttccaggtgtccctccactgggggtcagtggaggtgagagttttgagtctcctgcagcactgcctgctatgccccctgaggccaggacaagcttccctctgtctgagtcccagactttgctctcttctgcccctgtgcccaaggtaatgatgccctcccctgcctcttccatgtttcgaaagccatatgtgagacggagaccctcaaaaagaaggggagccagggcctttcgctgtatcaaacctgcccctgttatccaccctgcatctgttatcttcactgttcctgctaccactgtgaagattgtgagccttggcggtggctgtaacatgatccagcctgtcaatgcggctgtggcccagagtccccagactattcccatcgccaccctcttggttaaccctacttccttcccctgtccattgaaccagccccttgtggcctcctctgtctcacccttaattgtttctggcaattctgtgaatcttcctataccatccacccctgaagataaggcccacatgaatgtggacattgcttgtgctgtggctgatggggaaaatgcctttcagggcctagaacccaaattagagccccaggaactatctcctctctctgctactgttttccccaaagtggaacatagcccagggcctccaccagtcgataaacagtgccaagaaggattgtcagagaacagtgcctatcgctggaccgttgtgaaaacagaggagggaaggcaagctctggagccgctccctcagggcatccaggagtctctaaacaactcttcccctggggatttagaggaagttgtcaagatggaacctgaagatgctacagaggaaatcagtggatttctttgagctaggagaataagagtctggagactgggagccttcacttcggcctccgattggtggcgcatagggtgtaaccaataggaaacccctaaagggtacttaaaccccagattttgcaactggggctcttgagcagcttgctttagcctgctcccactctgtggaatatacttttgcttcaataaatctgtgcttttattgcttcattgtttca

SEQ ID NO: 14994 - DNA, 29260 bp, Homo sapiens
gaggagagaagaggaggtggagaaggcttgggctcgcgccgctgaaggtacgcgtgagggcctgcgctggagccggcttgacagggtctgagggggagtggagaactgggcgaggaggttcccgtgggtgagcgcgtacgggatggctggctcgcaggacggccgaaggtggtggttggtgggagcagccagcgacgagcccgtagacactcgtacgcgtgcgggctgacgtgcgcgctacatggccggagtcgggcgaagcgggggaccgtggggaagaacgcgaggagggaggagtgggaggttgggggtgtcgctaggcgcccttagctccctccctctggaggagctgccgcggccactctgctgccgccgctgccgccgccattttgggttcgctttgcgaggggaaacgatcccagtgtcggttgcgggatccgcctcctctcagtttgcccctttagccctccacctttcccttctcctctctcgcatttccgccagtcggcttacccgctggccgcctcctgacaagcgggagggatccgcggtggacccagggaagcggaggagcctggcggccaccccctcttcctcacttccctgtactctcatcgctctcggcctccgacacggtgagtagaacgatttgggccggcattcgggcctaagcactctctcagcgattgaatcctgggctttctgggagccactgtcatctcccggacctggacctctgggagagcagtggtgaagatgggggaggggagagcagggagggggatcctgagcctaccgggaagtccctccaggcggggtgaaggggtgtccctgacaggcagactcccggagggggctgggaagtaagcgagtggaggcggagtcggctgtgcccctgacaggttagtttgtgtttgtaggcatgatcggagcctcccccatagtccagtttgtgtgtgtttaattaagggataagagtggtcgaggacacgatcttgagaggggattttacctgtgtgacaaggtctgtggtgtccctgccgcgttgaacggtatgtgggaacgacaggatgatctcagtgttgtacgtttaataaatgtcactggttagtttgtacatggaaagagatgtttttggtctagcagacagatggtctgttggtgtgtagcggctgtgttggtgtgtgtatgtgaggatggcaagtgtttccgtaagagtttgcctttatttgtgtaagtgtaatggagttccccttataagttagcttatttcttgaataaatgttgggaggttccttgcaggttgatatgtgtgtgtattttagggattgggagcccctagttacttgttgggaaagagcggcaatggtagtgttctgtacagcatgtgtctgtgaggtcagggaggggagaaacttggcatagccagttgtggtcttaagaatagtttgtgcctttggttagagtgagttgtgtaaatgtgaagggccaaaatatctttaacagaatcattgctacaaagctgtaaagaatgggtggccttatttgttgtcgcgggtttatagtaatagtttacaatacaataagaaagctctttcagtttctttgtgatactgaatctctgtgaaaatggtaggatgctttcttccattttacaaaataggaaatttaggcataaggagagaacttctccaaggccgcatgttaaattggtgacaaagttggaactgtaactcccatattttcactactactgcagcagtatattcagcataccatggtgcctcaggaagtctttgtcggcaaatctgagtatgctggaaagataggagcacataagactggttggcttgtatttgggggagaccgattgtgtcagatatgtatgtggaacgtagctgtccttgccgagtctgacctgtatgaaatgcatatccatggctatattattttggatttatggaggaagcagagcatttctgacacttaaggttgtatgcgtgagggagaaggctttcacagcttaacttgtaccagagcagctgcatgggtgctgacagcttaacttgaaatctgtgggaggaaggatcctttttcactcattcaacaaatataaccattcaatgaatggtccatgccttgaggtgaggatcatcaaggtgtctctgtaaatagcctggatgcaatctgaggggagttgttttgacggtggtaggtattaagttgagggaggcagtgtggaattaaaaccagagaactgtttttgggtactggtaattgttaatatatgtgcctgtggatgttggaacttcttggctgggctgaaggaatcctttgaaagactgatttcggcagggcgcggtggctcacacctgtaatcccagcactttgggaggccgaggtgggcggatcacgaggtcaggagatcgaatcacgaggtcaggagatcgagactatcctggctaacaggatgaaaccccgtctctactaaaaatacaaaaaattagccgggcgtggtggcgggcgcctgtagtcccagctactcggggaggctgaggcaggagaatggcgtgaacccgggaggcagagcttgcagtgagctgagattgcgccactgcactccagcctgggccacagaggagactccatctccaaaaaaaaaaaaaaaaaaaaaaaaaagactgatttcatgtagtaaggatcccgtctatgaactctatgaatatgaggtaagaatgcatgaactaagccaacttagctgtattcttctggaaaatgggatgtttcttgataggctagattagtggttcttaaaagttttttggggtcacttatccttcagagaatcggatgaaagacactgggccctcaagttagaagatgagcataagcgcaatcacatgatttatatatatgattttaggaacttaaactgtaatgaaatagagccaatttatatttagatctcatttgaaaacctttcattttcattgttcgggtgtgtggatgttagtatgagtttaaggtgaaggagtctatgttagtatttgaacatgttgacaggatccatatttttaatttattctttttatcgtctgcaaacatttctgcagtattagtaaatgactctgtatttggtaaaaagggaagctaatgtcgcacaagtatctatggctttgttctttgtcagtatctttttgttctcaaactctgagaagcgtctttttttcagttttggattgggcctgaggtgatttgaagctcctgtcttggagtttaacttagttataacaaacactgagttaatcctatgcaggagacacaaagataattaatatatggtctctgtgcttgaagagacgctaattttctgtggttgaagagatgctgtgaattgtgtgatagtggcagctctcaaaaggacaaggaagagggaaacatattcctagaagctgaaattttattacccaattgcaaagactttttgtcactacttattcttaggaataaccataaagtgtttattttattctgtatggaactttgtactttaaaaaaatatgttttgtatcatctggtgtttttgtataaaggaactgttggtttgaaaagaaggtaaacatcatttatattccttaccttgttttgggatgtatctctacagtgagtttatgtaaaaaggtcttaatgtcatttttgggtatacatacatgtagaaagccctcctgatataaaatccagtagctatttgacagactacccattaatttattactggaacttaaaaataattactgtacttttaaaagaacaagaaattggtcaggtggggtggctcacgcctgtaatcctagcactttgggaggacgaggcggatggattgtcagagctcagaagatcgagaccagcctgggcaacacggtgaaaccccgtctctactaaaatacaaaaaattagctgcatgtgttggagtgcacctgtagtcccagctactcgggaagctgaggcacgagaattgcttgaaccaagaattgcttgaactgggagggggaagttgcagtgagctgaaatcatgccactgcactctagcctcggcatcagagcaacactctgtctcacaaaaaaaaaaaaaaaagcaagaaatgtaaaaaggtgttttaataggacagattataggattcagtgagataatggagaagttttaggaaaaattgtctgatagtcctttctttctattgacatggcccctgtataagaatgctatgtaaatttgtgaaaagtttaatattttctctaatttttaacgggtagtaggttcatggtgttatttttctcaaaacgtacatgtgatatgtgtgtgtagtgtgcatatatgtgcatgtatgtgtatacaatttctttatttttttaattgagattaggtctcgctatggttttttgtttttgtttttgtttttgagagagagtttcgctctcctcgcccaggctggagtacaatggcacaatcttgcctcactgcaacctctgcctcccaggttcaagtgattctctttcctcagcttcccaaatagctgggattacaggcgcgtgccaacacgccctgctgatttttgtatttttagttgagacagggtttccccacgttggccaggctggtcacgaactcctaacctcaagttctccagccgtctcggccttccaaagtgctgggattataggagtgagccactgcacctggcccaggtcttgctatgtagatcaatctggtcttgaactcctggcctcaagccatcctcctgtcttggcctcccagtttgctgggattacagatgtgagccagcatgcccagctctttttacctgcttaccaaatccaagattttctccaaaatgaactggaatagccttcttactgtgttaattttgccttggtggggaagcctaagtcttggaactaaattggggtggttatgacagttctctttttaaagctgatcagtatttcagtatttcacttgttgttgttttttttgttttgttttgttttttttgagatggagtcttgctctgtagcccagtttggaatgcagtggcaggattttgactcactgtagcctctgccacccggattcaagtgattctcctgcctcaatgtcctgagcagctgggtttacaggcacgcaccactacacctggctaatttttgtattgttagtagagacagggtttcaccatgttagccagtagccaagctgttctcatactcctgacctcaagtgatccacctgcctcagcctcccaaagtgctgggattacaggtgtgagccaccacgcctagccaaacccatctctttcattaaaccacctcattttggttcagaaacaagactgccatgtatgtatttaatgcttattatgtgccaagcactattccaggtactaagatacagtgatggacaaaacaagatcccttctcctctatctcaggacttattaatttgggcattttcattttccaatataggatcttttagtactggtataggattcctgaaggaattcctgaaatataattatttttctgctagagcaaatcaattttgttttttgttttttttttgagatggagtttcgctcttgtcgcccaggctggagtgcaatggcgcaatctcggctcactgcaacctccgactcccgggttcaagcgattctcctgcctcagcctcccaagtagctgggattacaggcattagccaccacgctaggctaatttttgtatttttagtagagacagggtttcaccaggttggccaggctggtctcgaactcctgacctcaggtgatcctccaggctcagcctcccaaagtgctaggattacaggcaggagccaccacgcccagaagagcaaaattcttctgttgacaaaaatttctttcctctgaggaagagacactgtgtgcctgtgttttatccaggaattccattggatagtttgtcctttgggatgtcagtggattaaatcctccattaagaatcaaagtacttggctgggtgcagtggctcatgcctgtaatccctgcactttgggaggctgaggcaggtggatcacctgaggtcaggagttggagaccaacctggccaacatgatgaaaccccatctctactaaaaatacaaaaaattatccaggtgttgtggcaggtgcctgtaatcccagctactctcgaaaaaacagaaacaaaaactctgacatgtagagtatgtagatgtagagaaaaaagtaaaatgattgttgaaaaaaatgtctattttttatcttctaaatagctttgtgtgtcagagatcagaacgctcattttacatgatatcaagaaccagaatgctagatagctagaatggttgttaacttcctagataaccattgtagaggaacacataaggtaaaacaaatgaataaaaattaaaaaaaaatgagatagccaaagatttgaagctctttacccattaacatgataatcatttcgactttgaatatttgtagaacaagagtcagaactcagaacaaagatctctgaggaaataaaaaaaaatcaagctgcctcctaatttctcatttagtctgtcattgggcattgtcaaactgtcaaactatatttagagattctggttttcatctggagacttagtgagttgtgtaatatcttgaatacacatataagatcttgccaggtggggtggctcatgtctgtaatcccagcactttgggaggatgaggtgggaggatcgctggagcccaggagttcaagaccagcctgggcaacatagcaagtccctggctctatttaaaaaaaaaaaaaaaaaaaaatcctcaatgtagaactttaaatttatccttacgtgttacatccagttgatttgagaaaatatgattctgaattttccatcaattggattggcagtccctttcagctttacagctttacatcatctacagatttgttaagtatgttctcttggtcttctaattcactgatggagtttttgaataggtcgggtccaaagatagagtcctatgaaacactgttggaaacttgtctctgtctgtctcttttttttttggagacagtgtcttgctctgtcgttcaggctggaatgcagtgggacggtctcagctcactacagcctctgcttcttggactcaaagagattctctcacctcagcctctcaagtatatgggactatatgcatgtgcgaccaagcccagataaatttttttttagagatatgttgacattttgcccaggttgggagacttgtctcttgattccattcagtattgtgtgggtttggataggccatctaattataaaatcattgggctggtcatggtggctcatgcctgtaatcccagcactttgggaggctgaggtgggcggatcacctgaggtcaggagtttgagaccagcctgaccaatatggagaaaccccatctctactaaaaacacaaaattagctgggcgtggtggtgcatgcctgtaatcccagctacttgggaggctgaggcaggagaatagcttgaacctgggaggcggaggttgcagtgagccaaaatcgtgtcatcgcactccagcctgggcaacaagagcgaaactccgtctcaaaaaaaaaaaaaaatcatctagctcacattttctccttgtcttcttcctattagaatttaagttcaatgagattagaactctctctctctctcattctctcatatatcccaagcatctaaaacagggattgaaacatagtaagtactcaataaatgtttttgaataaatgaatgaaggatagctgggcgtggtggctcatgcctgtaaccccagcactttgggaagccaaggtgggtggatcactggagctcaggagttcaagaccagcttgggcaacatggggaaaacccatctctacaaaatatggaagaattagccgggcatgacagcacactcctgttgccccagctacttggagggctgaagtgggaggatcgcttgagcctgggaagcagagattgcagtgagccgagatcaagccactgccctccagcccgggtgacagagtgagaccctgtctcaggaataaggatagatatgaagaattcgtcagatgccttgttgaaaacatcatacattgtctacatggaattcctccatattgtaaaatgaatctaatttataccaacaacgtttggcttttttgcagaaaaggaagcaaatgagctgatggaagatctgtttgaaactgtgagtaatgatcctcaagtgagaacatgggattgtaagttggttctccaacaaaatgtgtcctttgatctctgtgatgctccttctagaagagggactgaaccaattctccttttagtctacctgggaaagaatataatgacaaaagaaatttgctaactgctagactcttgattatccacatgtaggttattcttactaaaattttccttgaagctttttttttttttttttgaggcaaagtcttgctctgtcacccaggctctggagaatacagtggtgaaatctcagctcacagcagcctcgacctccagggctcaaaacaattctctcatctaagcctcctgagtagctgggactacaggcacacacctacaggcccggctaattattttatttttttgtagagacagggtcttgccatgttctggaactcataggctcaagtaatcttcctgcctcaacctcccaaagtgctggaattacaggtgtgagccagcacatcttgccccttgaaaacttttgatggcttcccctactgtcatttggtgtgtccttaaagattgccaactagttttaaagtattttgcacacaaataattaccttttccataaatttgtctaaaaagatatttctgtttaagaaattgatcattttgagttatcctagctctgtgcttactgatacaagttgactggttgagcaacttctttcctggcataatagtcattccatatgtgggtttgtaggagtcctgaagtgagaaaggttctgatgtaggctctttctgggtgccagcattattaaagtattgtttatagttttcacttttccttcccaacactggagcaacattcaaaagcccattccccaggaaaaccctccctttcctttgcccacagttccaagatgagatgggattctccaacatggaagatgatggcccagaagaggaggagcgtgtggctgagcctcaagctaactttaacacccctcaagctctacggtaggctagttgaagaccttgagatttggaatagaggaagagtttatttctgaaaaggttttcagaagttgcagttaacaatttttcatccccagccagcttctgttactgatgtaaggatgcagagtcctgtcaggagttaggtgtcaagtgaagtctccttgttatggggcagtgcagctgtaggccaagctgtatctgtttgggaagggagaaaaaacagtagctggcatccatatccacttctccgggtgagtggtgctggagaggtatgtaggactcaatgtggccagccacacaaactaccctatattgtaatatccagtctgtcccttttgttctttttatgtgccattaatatctgctaaatgtgactgaaaatttgttagtcacctaggcattagtggagcaaaccctgaagcacctgcagtaaggagtctgaaacatacgtgctgacctttttgcctaaagttggcacttgtgttacagcatccagaaagtagaggctttaattttttcctcattttgtggtggatttgcatctgcactttattctgttgtagcagcatataatcattaggtcgatggcgagaggtcaggatgcagtttgtgccataagtggaacaaagcaaagagaatagtccctgtaattagtcctgtgtttgaacttaacagcactactaagcagagagcttgggttccatctgaaagctagacctttagggattttccaatttagtgaaaaaagataagataggccaaccaatgtcttaaaaactagaactactagtcattctccattacaacaaatatcacaatacaactacatcaaaaatctcaagattgctaagtcagtatttgacccattattttaatttatagttcatagaacaaaattctggtatagcagaatggaaccattcatcctgggaacgtataataggatctgattaataaatattttggttttgctgatcaactctttataacttcttaaaatttggaaaatatagaactaatttaaaattcctgttagaatccagttaccttctggtattcaatggaatatagtcatatatcatctcatggtcataccctctgtgaaatctatcattaaacgattcatcattgtgtaaacatcgtagaatgtacttacataaacctaaatggtttagcctactgcatacctattgctcccaggctacaaaacctgtacagtgtgttactgtactgtactgaatactgtaggcagttgtaacacaatggtaagtacatatgtatgtaaacatagaaaaggtacagtaatcttatggagccacctctgactatgtggttcgttattgactgaaacattctgtggcgcatgactgtacttgggcagcttctgcttctctttcgattgcaaatacaaacctgtttttgttttaatctttgactaaataaaaatccctctgtaagtccatagagagtaagcacatcttaaaacacaataaggaagagagaggagaaaaagacagtcaaaacaaaaactctggggcttcccttatcaattacctaaataatccttgttaaaactaagtgcaggctatgtttccattttctacttttttatgcttcttctcttctgttccttcagtggtggtagcgcggatgttcaaattttcagttctcagtaaagattgtatagacagtcccacggtcttcaggtttttactctgtgctacccaaacctacagtaaatactataaaagaaaacttattcaaacgtaatctttatctgcaaaaactattgaaaaacgttaccatttaactattgctgtaatatagggggttccttgaaatatgataacctgcttgttatagctacttcagcagatcttatcctgttgcatagggtatcagcatatgcttaatcatttaggtatattattctccctttatttctttctatgtaaacatagaaaaggtatagtaatcatacatagaactgacatgctaggtattggaatttttgcttcagccctgcaaacaatctttcaggagggtatggatgggaagttagggttaggaaccttggaagaggaatttaaagggctaaaagaagatagccttcatggataatattttaactaacttctccgttctgttcatttgaactaccatgtacttcagttattttggtatatccttttcctgcttcatgctagaaagtctttgacttgttaagaaagcagggcagtgcagcctgagtagataggataatgggacaagctggacctgggatgggagtaacatcccagggagtaacaagtaatgagagaagaaatgagaatgatgagttcccaccagctccttggctgctttcttacccatatatttctctgtccctagttttttgtttaattttttcttcatttgtatattatttggaagaggaattgtagaggaatgggatggggtgtaatacagaatcatttgatgcatgctaactactttgggaaaagatttgtgtaaggctgggagtttgactgttggctaaagtgaaaaggggggattagtagggaatgaaaattgttcaggctctttgctcatcattgcaaagaattggatgtgttgtggacctaggaaaacactcaaattcagtcatccccgtttgggataggtttgaggaactactggccaacctactaaatgaacaacatcagatagcgaaggaactatttgaacagctgaagatgaagaaaccttcagccaaacagcagaaggaggtagagaaggttaaaccccagtgtaaggaagttcatcagaccctgattctggacccagcacaaaggaagagactccagcagcagatgcagcaggtaacactttccttggtcatattaatattgaattataccaaggcctaactctgaggctttggtataatctaaaattagcagctttgtaaatgtcagagatagttaccttactacgtattaaaaccgtagtatcttcacatcagttaggagcttgagaagtcatcatgttcatgtcctgtggctcagggaagacagcacataaggaccctaatggtattcggaattacagatttcaaagagtcctcagtaatctattctgaaatttaaccttcactgtgacaagtagttttttttcccttttcccttttcttttttcttttttttttgagacgtagtctcgctctgtcacccaggctggagtgcagtggctcaatctcagctcactgcaagctctgcctcccgggttcacgccattctcctgcctcagcctcccgagtagctgtgactacagggactcgccaccacacccagctaattttttgtatttttagtagagacagggttcactgtgttagccaggatggtctcgatctcctaacctcgtgatccacccgcctcggcctcccagagtgctgggattacacgcgtgagtcactgcgcccggccttttccttttctaatctcagttcctcctctgtttagaggttaaacttcctctggttctgtcattttgttcaagggaacatgtctgagaaatttatgccaagatcctacgttgttctcacactctttgcagaaagcaaaatttgtgtcataaagttgcaaacatcttagttaatgactctctggtggctgggtgcagtggctcacacatgtaatcccagcactttgggaggctgaggtgggaggattgcttgagcaggggagttcaaaagcagcctggacaacatagtgagactctgtctctacaaaaaataaaaataaggctgggcacagtggctcacacctgtaatcccagcactttgggaggccaaggcgggtgaatcatgaggtcaggagtttgaggcaagcctggccaacatggtgaaaccccgtctctacgaaaacaaaaaattagctgggtgtggcggcgggcacctgtaatcccagctactcgggaggttgaggcaagagaatcacttgaacctgggaggcagaggttacagtgagccgagatcacgccattgcactccagcccaaaagtcagtgcgagactctgtctaaaaataataataataataataataaaataaattagccaggcattgtggtcacagctacttgggaggctgaggtgggaagattgcttgagcacaggtggttgagagggcattgagtcatggttgcaccactgcactccaagctgtgtgacagagcaagaccctgtctccagggggaaaaaaaaatatctctgggctcctgaaatggcagtgtcataacatatcactgcattattttctttctctccccagcatgttcagctcttgacacaaatccaccttcttgccacctgcaaccccaatctcaatccggaggccagtagcaccaggatatgtcttgtaagtttccaaattgccgtaattctatagactagaatataaaattagcttggcaggttatttctcacagttattctctcaggtatttttgattgctgtggcttcctatgtttgctgagtgaacataagccactgattcacatgaaaggacaaagagtgtattcaattttttcttttcttttttgagacagggtcttgctctttcacccaggatggagtgcggtggaacaatttcagttcactgcaacccctgcctcccgggttcaagtgattctcctgcctcagcctcccaagtagctgggactacaggcgggcaccaccacgggtaattttttttgtatttttagtagagacagggttttgccatgttggccaggctggtctcgaattcctgacttcaagtgatctgcccacctctacctcccaaagtactgggattacagccatgagccactgcgcctggcctgtccttctgatatttttattgggtcctcctcctcatctttagattcaccctgacttcttaggtttttggtaccgctattcatttcatagatgttgaggctgggcatagtggctcacacctgtaattccagcactttgggaggctgaggtgataggatcacttgagcccagtggtcaagaacagcctgggcaacatagtaagacccggtctgtgttttttttgttttgttttgttttaatttaaataatgaagtaaatatacatgtagatgttgaattcattatccattcatgaagctcaatattagtgttttatgtgtagagctagttttgctcatgacgttttgaggtattttgagctttttttttttttttttttttttttgagacggagtctcgctctgtcgcccaggctggagtgcagtggcgggatctcggctcactgcaagctccgcctcccgggttcacgccattctcttgcctcagcctcccaagtagctgggactacaggcacccgccactatgcccggctaattttttgtatttttagtagagacggggtttcaccgttttagccgggatggtctcgatctcctgacctcgtgatccgcccacctcggcctcccaaagtgctgggattacaggcgtgagccaccgcgcccggcctattttgagattttaaatttgaaatttggccaggtatggtggctcatgcctgtagtcccagcactttggtaggtcaaggtgggaggattgcttgagcccaggagtttgagaccagcctgggcaacatagtaagaccccatccctaccaaaaaaataaaaaataaaaaaattagctggggatggtgccgagtgcctgtagtcccagcaacttgggagactgaggtaggaggatcacttgagcctgggacgttgagactgtagggagccgtgcttatatatcactccagcctgggtgacagagtgagaacctgtctcacaaaaacaaaaccatactttacctcataaaaattgcctcaaacttttggacaggtaatgataatactctcagcttcttcagtaagtcttctttggattttgaagagtacatttgctagtattctaaaacttccttggtgatcaacaggatgtcttcatctcttactgtattcagaggaggatgaggagtacttggttgtaggcattattctgagaccaaaagacaaaacaattttaaaagtaatggtcctggtcgggtgaggtgactcatccctgtaatcccagcactatgagaggccgaggcaggcggattgtgagcccaggagttcgagatcagcctggccaagatgggaaaacgctgtctctgcaaaaaatacaaaaatcagctaggtttggaggtgtatgcctatagtcccagcttctcaggaggcagtgggaggatggcttgagcctgggagggggagtttgcagtgagctgagatcatgccactgcagtccagcctgagcggcagagtgagaccatgtctcaaaataaattaattaattaaattaaagtaatagtccccattcttgagactcttaattctagctcgggagctagaccatgtattccttagtgagaaacagtttaaaaataaaacaagaatataatccctgaatatctgagaactcaggcataatcttaacagtagtttattgtgaaagactttatgattatttttacctgtttttatcctgtagtaggaaggtcagcttctcatttagattctgaaggctattggtattaattgtctggaattgtcttagatcttccttgtgtcgtgttttcccagaaagagctgggaacctttgctcaaagctccatcgcccttcaccatcagtacaaccccaagtttcagaccctgttccaaccctgtaacttgatgggagctatgcagctgattgaagacttcagcacacatgtcagcattgactgcagccctcataaaactgtcaagaagactggtaggagacagatgtgtcagctttaagtttttacttgcggtgagaggtggtgggaatcttatcccatagataacttcctaggatacttgcctaggaatggaggacacaggacatttgtaatttcttccttctctcttttatcctccctttgtactcattatccaagttctagaattacatgataatctccgggcctgggtaaggcatggaggcagtggacagtataggaatatgggaggtagagatctgaggctcagtgctaagaattggactacagcaatatgaggggtaagtattaggaatcagatcaagataaactggggcctggtaaagatgaaagtcaggtggtaaagttcggtcatgtttagctttttattctcttcattaagatcaactaactttatttaccataatgattgtagcataggtgatatctccattctgaatgaaatgttgacttgcaagttaggcgtaaattagagattgtacatttgccgtgttcagtattttaaagaaatttgccggtttagattctaccttgcattggtttagtattttttgagaaaatatttgctatttacttaagccaaatatttacttctgatttgtttgctgacttagcaaattagttgtggtttgttctggatttgggtttgtctttggattctattttaaatccctaagtcttatcattacattgaatgtagttgaatttaagtgtactatatcatagacacagatcccaaactactttaatagctatattatatgaaatggtaatgaaaacgtgatttaataccaaattatagtattatcttacacatctagtgtcctgtgtttttcttctggagatataaaaatgacacttatggaaggagaaatatggatatagtagttttgtctctagaaatgcagaggtgcctaaaattgagaggctgagagagggagacagaaatgaatgagactgaattgtctcattccttttatggttcttttgttcccaacctcaggaggaatctgggagaacttaatgaaagttaagaaagaatgaaataaaagtaaaatttggaataccaggtttgtgagggagattaaagaagttggaatcttttttcttttttttttttttaagatggagtctcgctctgtcacctaggctggagtgcagtggggtgatctcggctcactgcaacctccgcctcccaggttcaaacaattctcctgcctcagcctcccaagtagctggaattacaggtgcgtgccaccatgcctggctaatttttacatttttggtagagatggggtttcactatgttggccaggctggtcttgaactcctgacctcaggtgatccacctgcctcggcctcccaaagtgctgggattacaggcgtgagccagcacgcctggcctggaatcttatcctggaagaaaaaagcattgttgaaggtctgttatccttcagagatttaaaggggaaaggaggtaaaacatttttgagcatacactatgtgacaggtattactaggtactttttaagtgtttgttttactttgtgaataaagtgttacacgtaagaaagagtaagagaggccgggcgccgtggcttacgcctgtaatccaacactttaggaggccgaggctgtcggatgacaaggtcaggagatcaagaccatcctgtctacagtgaaaccccgtctctactaaaaatacaaaaaatcagccaggcgtggtggcaggcgcctgtagtcccagctactcaggaggctgaggcaggagaatggcctgaacccgggaggcggagcttgcagtgagccaagattgcgccacgcactccagtctgggcgacagagccagactccgtctaaaaaaaaaaaaaaaaaaagtcaacttttattgccagtgaatgggactccctttagacctaatgttagttgaggaaagactgtggaaactctttggggagtggtaggcagatgggagggaatcaagttagataaggacagctctacctaaatgcaaaaatgcattcacaggctttttgaagccctcttttttcctagaagttgatttatcagagatttattttcttatagccaatgaatttccctgtttgccaaagcaagtggcttggatcctggccacaagcaaggttttcatgtatccagagttacttccagtgtgttccctgaaggcaaagaatccccaggataagatcctcttcaccaaggctgaggacaagtaagtgtttactctgggggatcaaatatcccaaggagaagatgtagttcctttgaggagtttaggggaagtaagacttgtataataagacatggacacaaaaggaaaagcagtatagatgagcagagtcctctagaacgtgcttgttctagcagtgccaaatactgctttttggggggatgttacacacatttttaaaatgttttagactggacatggcggctcccacctgtaatcccagcactttgaaaggccaaggcaggaggttggcttttctaatgttattatttatttagagacaggatcttactctgtcacccaggctggagtacagtgttgcaatcacagctcactgcagccttgaactcctgggatcaagtgatcctcctgcctcagcctccatggagtagctgggaccacaagcgtgtgccaccatacatggctgattttttttgtacaggtgagggtatctctgtgttgcccaggctgctcttgaattcctgacctcaaatgatcctcccactcctggcctcccaaagtgctgggactataggcataagccaccacacccagctagattatgaacatttttatggccctttgtgtgtattgccacactgttaacagcaaatatgtatatatgtaaccatgattatatatgttatgttagagggtagtattggtgccagtttaatttgtctgacggggtacctattattcattttatatttgttttattagaatcattctccttcccatgtattctctttgaacttcctttgtgttgttaatatacagctcatcatgatctgacatttattgatgatttatgactagtttctcttgctcctacttaattgtgaactatttgattcttattcatagtacttaatcactactcactaaatacctgaaattttctactgagtagtcaccaacttgtagtagtcactacaagaattagttgtagaaaaagtagattggccagccatggtggctcacacctgtaatgacgacactttgggaggccgaggcaggaggatcacttgaggccagaagttcaagatcagcctaggcaacaaagtgagaactggtctctacaaataatgaaataaaacattagttaggcatggtagcaaacgtttatagccacagatactcaggaggctgaagtgcgggaatcgattgaacccaggcattcaagactgcagtgcactgtaatcatgccactgctctccagcctggacaacagagcaaaaccctgtctgaaaaaaatgaaaaagtagattgggccacacgccatgggctcatgcctgtaatctcagcactttgggaggctgagactggagaatcgcttcagcttaggaagtagcagctgcagtgggctgcgatcacgccactgcactccagcccaggtgacagagtgagaccttgttttaagaacaagtaagaaaaagtagattgtaaaatgtgttagtctggggaggccctttagaaggaaggactgtgaagtgagatttagtgttattgctcctttctcagtttgttagctttaggactgaagcattttgaagggactgagtttcttaaccctctaatcagcaagtaccttctaacctgcaagactgcccgccaactgacagtgagaatcaagaacctcaacatgaacagagctcctgacaacatcattaaagtgagtgtttcctgcatgcactatccaggcacctcaccaacacatatctgttcttttctcttgttattctcaaagaaaagaagaaccttcttttatctaaagctaatttctcctacttatatactagattaattcccctgttgccttttcagggacattgattcattcattacgttcctctggagtatcttcatcctcttaaaagattccacaaatccatgtttccctgtaataattctctttcttgaactttctagaaatgatatgcagtattccacttacatgctttgggtttttgttttgttttgtttttttggtcagacataatcttgcactgtcacccaggctggagtgcaggagtatagtggcatgatcttggctcactgcagcttccgcctcccgggttcaagtgattctcctgcctcagcctcccaaatagctgagattacaggcgtgcccaccacgctcagctaattttttgtatttttagtagatacgggtttcaccatgttggccaggctggtcttgaacttctgacctcaagtgatccaccagttttggcttcccagaggctaggattgcaggcataagccaccgtgcccagcctatatactttttctcaattttgtgtttgtatgtatgcatgtatgtgtgtgtgtgtgtgtgtgtgtgtttgtgtgtgtctgtgtctgtatgtatgtatgtatgtatgtatgtatgtattgagatggagtttcgctcttgtcgcccaggcccagcctatatactttttctcaactctttttacttattgattgattgattgagatggagtctcgctcttgacccccaggctggagtgcaatggtgcgatcttggctgactgcaacctctgcctcctgggttcaagtgattctcctgcctcagcctcccttgtagctgggattacaggcccctgccaccatgcccagctgatttttgtatttagtagagtcggggtttcaccatgttggccaggctggtctcgaactcctgacctcaggtgatccatctgcctcggcctccctaagtgctgggattacaaatgtgagccattgcccccagccttcttttttatttagatatttatttatgtttttttttttttttagagacaggttctcactctgtcatcctggctggagtgcatgggcacaatcataggtcactgcaacctcaaattcctgggtgatccttccacttcagccttccaagtagcttggactacaggtgcatgccaccaaggctagccgattattttattttgtgtgaagacagggtgtcattttgtttcccaggctggtcttgaagtcctgacctcaagcagtcctcttgcctcagctcggcctcccagagtgttgggattacaggcgtgagccatgatgcccagcctttggtttcattgtgtttttgtatttttcttgagacaaggtcttactctcctgcctaggctggagtacagtggtatagtcatagctcactgcagccttgaactcctaggctcaagcattcttccaacgtcagcctcccaaggagctgggattatatgcattagccactgtgcttggccattaaatttatttatttatttattttattttatttttttgagacagaatctgtctctgtcacccaggctggagtgcagtggcacaattttagctcactgcaacctccacctaccgggttcaagcaattttcatgccttagcctcctaagtagctgggactacaggcatgcgccaccacacctggctaatttttatatttttagtagaaacataatttcaccatgttggtcagtctgatcttgaactcctgatctcaggtgatctgcccacctcggcctcccaaagtgctggaattataggcgtgagcctctgtgcctggcaaaaaactttttttttttagggatggggtgtccctatattgcccaggctggtcttcaatttttggccttaggcaattctcctgtctcagcctctaattggtactgcctggtgtattggatttaggccttacttattaaccataaaccacggaagccgaagatttacctctctcctcactcccttactcccaccacaaacatgcacattttctgctctccaaactcctcactagtagttatggtagaattttggttagattgtattcagggtttacattgtaagattttaaggactgttggctgggcgcggtggctcacgcctgtaatcccagcactttgggaggccaaggcaggtggataacgaggtcaggaaatcgagaccatcctggctaacatggtgaaaccccagctctactaaaaatacaaaaaactggctgggcgtggtggcgggcgcctgtagtcccagctactcgggaggctgaggcaggagaatggtgtgaacccgggaggtggagcttgcagtgagccgagatcgcgccactgcactccagtcttgccagagcaagactccgtctcaaaaaaaaaaaatagattttaaggactgtataaatgctcttcacagctcagctatgttactgtgttaccttgcctttcctgctgaacattttgtttcccagatcatcttctttcagtgtgttcaggtattctagatattctgtcactttcatcttgaagaaattgctccctgagccctctgacattattccactttaagcgtgttgctctccatgttgctgcactgatgtcttcttgggctttttcttcaccatcatcccaggaattccttttgcctcatactgtgttagatcctcttatttcctgaattccacatctttgcttttgcattactttttttttttttttttttttttttgagacacagagtcttgctctgtcccccaggctggatctcggctcactgcaacctgcaaccttggtcttggtcttgaactcctgacctcaggggatccacccacctcagcctcccagagtgcggggattacaggcgtgagacaccacgcctggccttgttttttgttttgttttgcttttttttgagaccgagtctcgctttgttgcccaggctggagtccaaaggcgcgatgatcttggctcactgcaacgtccgcctcccgggttcaagcaattctcctgcctcagcctcccgagtagctgggattataggcacatgccactacgcctggctaattttttgtatttttagtagagacagggtttcaccatgttagccaggatggttttgatctcctgacctcttgatccacccgtttcggtctcccaaagtgctgggattacaggcgtgagtattacttctttactttagtggaacacattctagtagcttttttttaaaaaaaatttttttctgaattttaaaaaattgaggtgggggggtctcagttttttgcccaggctggtctcagactcctgggttcaagtgatcctcctgcttcagcatcccaaagtgctgagattataggcatgagccaccctgcatggccccattccagtagcatcctgagggagagtgcttgggaagggaattttcacatttaaaccatctccggggccgggcgcagtggctcacgcctgtaatcccagcactttgggaggctgaggcgggtggatcacgaggtcgggaaatcgagaccatcctggctaatgtggtgaaaccccgtctctactaaaagtacaaaaaaattagccgggtgtggtggcgggcgtctgtagtcccaggtactctggaggctgaggcaggagaatggcgtgaacctgggaggtggagcttgcagtgagccgagatctcgccactacactccagcctgggtgacagagcgagactccgtattaaaaaaaaaaaaaaaaaaatctccattcatggtcttttgattgtatcgatgtcagtttcctcgtttttgtttttgttttattttttttctttttttgagacagagtctcactgttgctcactgcagcctctgcctcctgggttcaagcgattctcctgcctcagcctcctgagtagctgggattagccaccacacccagctaatttttgtatttttagtagagatggggttttgccatgttggccaggtgatctcgaacccctgacctcaagtgatctgcccaccttggcctcccatagtgctgggattacaggcatgagccaccacatcctccatgtctggccagtttcctggtagtaatattgtactgtgtaccttgtttatatgtatagctcttgtttctatgtaacataaaaacattatattgggagaaactggttgaagggtacatgggacctcttggtactattttttgcaatttcctatgaatataattatttcaaaataaaaggaaaaaataatactctcctctgtcactgtatctagaattctagataggaaataatttttttaagaagcttttaagggcctcacttcattttcttctaactcctagtgtggtgttaagaaatttcatgccatttaactttttttttttttttccgagacagggtcccaccctgttgcccagtttggagcgtggctaaatcatggctcactggtgtctccaacccggtgtgcaccactatgcccagctaattttttttttttttttttttaagacatggtctcgttatgttggccaggctggtctcaaactcctggcctcaagtgctcgtcctgtcttggcctcccaaagtaatgggattataggcatgagccatggccccatttaactcttgagtctttgtgtaacacctgtttttctcaacctctgacagcatgcaggatttttcctttggcttcaatattttgaaaatgcatgataatatgccttagtatttgtctatttttatccatggttttttaaaaagtactttctttttgtttttgtttgtttgtttgttttgagacagagtctcgctccattgcccaggctggagtgcaatggcgtgatcttggctcactggaacctctgcctcccaggttcaagcaattgtcctgtttcagcgtcccgaggagctgggactacaggcgctcaccaccacaccctgctaatttttgtatttttagtagagacggggtttcaccttgttggtcaggctggtctcaaactcctgacctcgtgacccacccacctcagcctcccagagtgctgggattacaggtgtgggccaccatgcctggcgtatccatggttttaaggcacacgtgataaaccttattcttctgcagaaataatttttttttttttttttgagatggagtctcactctgttgccaggctggagtgcagtggcgtgatgtcggcccactgcactctccacctcctgggttcaagtgattctcgtgcctcagcctcccgagtagctgagattacaggcacgcgccaccacacttagctaatttttgtatttttagtagagatggggtttcaccatgttggccaggatggtcttgatctcctgaccttgtgatctgcctgcctcggcctcccaaagtgctgggattacaggcataagccaccacgcctggccagaagtaatttgtgtttaagttttagttttgtgtcatttttcgtgcacacctttgtacttttgttgggggatggggcggggtgtcggggttggagtcttgctctgttgcccaggctggagtgcagtggtgcagtcttggctcactgcaacctcttaattcctcagttcaagtgattctcctgcctcagcctgccaagtagctaggatcacaggcgtgcaccaccacacccagctaatttttttttgtactttattagagacagggtttcgccatgttggccaggctggtcatgaactcctgacctccagtgatccatcctcctcgttctcccaaagtgctggcattacaggcatgagccaccatgcccagccctttgtacattttttaatgtaggatgccatttgtccacttgactctcccactagtctgtaagctccatgagagcaggaattgcttcccttatgtgtgtgcttagcttttagcacagtgcctaggatatagaaaacatcttatgttcatcatgttggatgaacagatgcttattgtcatggtttaagttcagttcttatcttctttttttttttttgagatggagtctcaccctgttaccaacgctggagtgcagtggcatgatcttggctcactgcaatctccaccctaccacccccactgccaggttcaagcgattcttttgccccagcctcccaagtaactgggattacaggcacccaccaccacacccagctaatttttgtatttttagtagagatggagtttcaccatgttggccaggctggtctcaaactctcaatctcaagtgatctgcccgcctcagcctcacaaagtgctgggtttacagatgtgagccaccaaggccagcctatttactcttaaaactgaactgcctcggtctttttttttttccttcccttctgatgcccttcacaccatcatttgcttaaagtctttgatgtgtccattttatagattacgatgctgtctttgcagctgttgagcaggaacaaatcttacataagattgctcttagcatctgcttccttttctctctgtgacctaaactctccccttcctggcaaccagaatggagatcatcagttagaaaatattgaatagggctgggcgcggtggctgacgcctgtaatcctagcactttgggaggccgaggcgggtggatcacgaggtcaggagatcgagaccatcctggctaacacagtgaaaccctgtctctactaaaaatacaaaaaaatcagccgggtgtggtggcgggcacctgtagtcccagctactccggaggctgaggcaggagaatggcgtgaacctgggaggtggagcttgcagtgagcggagatcgcgccattgcactccatcctgggcgacagagcaagactccgtctcaaaaagaaaatactgaataactataaaatctttaaatagagattagtttaatttgaaatgtacaagtattcagcatatgctattcgtatatgtgtgttcatggatgtttgtgtatgtggtcttgtgtgtgtgtgtgtgtgtgtgtgtgtgtgtgtgtttctcttgatccaccaccaccccattcaccagcctgacagaagacagtgtttccagaaggaatgtaattcatgcgcatttttttcatgttaagttttataagaagaccaaacagctgccagtcctaggaaaatgctgtgaagagatccagccacatcagtggaagccacctatagagagagaagaacaccggctcccattctggttaaaggtacagccctcttcctcgaagtctgtaggaggcagaaggtcactgaaagttctgagagaatatcaaggacttccttaatcgtctaatgctttagttgtagaactaggacttcaggaatcttcctgattcacctttcttcccttacttttctgcccttctccgggtgattctacaacattttcaaaataatgggtaaaatggtaatttgctaaaggaaattcagagaagagtttctaaagtgtataattggactgtggtctttgtagaaatttcatatgcagagtcccttggaaagatgccttgagcttgtctcaggtccctaaacttagaaagtcctattctttttcccaaattctgacatgtgctggatcagagtgttctcatttccaataggccagtctgccatccatccaggaagaactgcggcacatggctgatggtgctagagaggtaggaaatatgactggaaccactgagatcaactcagatcaaggcctagaaaaagacaactcagagttggggagtgaaactcggtacccactgctattgcctaagggtgtagtcctgaaactgaagccagttgccgaccgtttccccaagaaggcttggagacagaagcgttcatcagtcctgaaacccctccttatccaacccagcccctctctccagcccagcttcaaccctgggaaaacaccagcccaatcaactcattcagaagcccctccgagcaaaatggtgctccggattcctcacccaatacagccagccactgttttacagacagttccaggtgtccctccactgggggtcagtggaggtgagagttttgagtctcctgcagcactgcctgctatgccccctgaggccaggacaagcttccctctgtctgagtcccagactttgctctcttctgcccctgtgcccaaggtaatgatgccctcccctgcctcttccatgtttcgaaagccatatgtgagacggagaccctcaaaaagaaggggagccagggcctttcgctgtatcaaacctgcccctgttatccaccctgcatctgttatcttcactgttcctgctaccactgtgaagattgtgagccttggcggtggctgtaacatgatccagcctgtcaatgcggctgtggcccagagtccccagactattcccatcgccaccctcttggttaaccctacttccttcccctgtccattgaaccagccccttgtggcctcctctgtctcacccttaattgtttctggcaattctgtgaatcttcctataccatccacccctgaagataaggcccacatgaatgtggacattgcttgtgctgtggctgatggggaaaatgcctttcagggcctagaacccaaattagagccccaggaactatctcctctctctgctactgttttccccaaagtggaacatagcccagggcctccaccagtcgataaacagtgccaagaaggattgtcagagaacagtgcctatcgctggaccgttgtgaaaacagaggagggaaggcaagctctggagccgctccctcagggcatccaggagtctctaaacaactcttcccctggggatttagaggaagttgtcaagatggaacctgaagatgctacagaggaaatcagtggatttctttgagctaggagaataagagtctggagactgggagccttcacttcggcctccgattggtggcgcatagggtgtaaccaataggaaacccctaaagggtacttaaaccccagattttgcaactggggctcttgagcagcttgctttagcctgctcccactctgtggaatatacttttgcttcaataaatctgtgcttttattgcttcattgtttca

SEQ ID NO: 14995 - DNA, 2743 bp, Homo sapiens
gaggagagaagaggaggtggagaaggcttgggctcgcgccgctgaagtcggcttacccgctggccgcctcctgacaagcgggagggatccgcggtggacccagggaagcggaggagcctggcggccaccccctcttcctcacttccctgtactctcatcgctctcggcctccgacacgaaaaggaagcaaatgagctgatggaagatctgtttgaaactagacagggtcttgccatgttctggaactcataggctcaagtaatcttcctgcctcaacctcccaaagtgctggaattacagttccaagatgagatgggattctccaacatggaagatgatggcccagaagaggaggagcgtgtggctgagcctcaagctaactttaacacccctcaagctctacggtttgaggaactactggccaacctactaaatgaacaacatcagatagcgaaggaactatttgaacagctgaagatgaagaaaccttcagccaaacagcagaaggaggtagagaaggttaaaccccagtgtaaggaagttcatcagaccctgattctggacccagcacaaaggaagagactccagcagcagatgcagcagcatgttcagctcttgacacaaatccaccttcttgccacctgcaaccccaatctcaatccggaggccagtagcaccaggatatgtcttaaagagctgggaacctttgctcaaagctccatcgcccttcaccatcagtacaaccccaagtttcagaccctgttccaaccctgtaacttgatgggagctatgcagctgattgaagacttcagcacacatgtcagcattgactgcagccctcataaaactgtcaagaagactgccaatgaatttccctgtttgccaaagcaagtggcttggatcctggccacaagcaaggttttcatgtatccagagttacttccagtgtgttccctgaaggcaaagaatccccaggataagatcctcttcaccaaggctgaggacaatttgttagctttaggactgaagcattttgaagggactgagtttcttaaccctctaatcagcaagtaccttctaacctgcaagactgcccgccaactgacagtgagaatcaagaacctcaacatgaacagagctcctgacaacatcattaaattttataagaagaccaaacagctgccagtcctaggaaaatgctgtgaagagatccagccacatcagtggaagccacctatagagagagaagaacaccggctcccattctggttaaaggccagtctgccatccatccaggaagaactgcggcacatggctgatggtgctagagaggtaggaaatatgactggaaccactgagatcaactcagatcaaggcctagaaaaagacaactcagagttggggagtgaaactcggtacccactgctattgcctaagggtgtagtcctgaaactgaagccagttgccgaccgtttccccaagaaggcttggagacagaagcgttcatcagtcctgaaacccctccttatccaacccagcccctctctccagcccagcttcaaccctgggaaaacaccagcccaatcaactcattcagaagcccctccgagcaaaatggtgctccggattcctcacccaatacagccagccactgttttacagacagttccaggtgtccctccactgggggtcagtggaggtgagagttttgagtctcctgcagcactgcctgctatgccccctgaggccaggacaagcttccctctgtctgagtcccagactttgctctcttctgcccctgtgcccaaggtaatgatgccctcccctgcctcttccatgtttcgaaagccatatgtgagacggagaccctcaaaaagaaggggagccagggcctttcgctgtatcaaacctgcccctgttatccaccctgcatctgttatcttcactgttcctgctaccactgtgaagattgtgagccttggcggtggctgtaacatgatccagcctgtcaatgcggctgtggcccagagtccccagactattcccatcgccaccctcttggttaaccctacttccttcccctgtccattgaaccagccccttgtggcctcctctgtctcacccttaattgtttctggcaattctgtgaatcttcctataccatccacccctgaagataaggcccacatgaatgtggacattgcttgtgctgtggctgatggggaaaatgcctttcagggcctagaacccaaattagagccccaggaactatctcctctctctgctactgttttccccaaagtggaacatagcccagggcctccaccagtcgataaacagtgccaagaaggattgtcagagaacagtgcctatcgctggaccgttgtgaaaacagaggagggaaggcaagctctggagccgctccctcagggcatccaggagtctctaaacaactcttcccctggggatttagaggaagttgtcaagatggaacctgaagatgctacagaggaaatcagtggatttctttgagctaggagaataagagtctggagactgggagccttcacttcggcctccgattggtggcgcatagggtgtaaccaataggaaacccctaaagggtacttaaaccccagattttgcaactggggctcttgagcagcttgctttagcctgctcccactctgtggaatatacttttgcttcaataaatctgtgcttttattgcttcattgtttca

SEQ ID NO: 14996 - DNA, 29555 bp, Homo sapiens; identical to SEQ ID NO: 14980

SEQ ID NO: 14997 - DNA, 2555 bp, Homo sapiens
cctcgatcccctcgccgcggtcccatggaggaggaggcgagccgcagcgccgcggcgacgaacccagggagaaaaggaagcaaatgagctgatggaagatctgtttgaaactttccaagatgagatgggattctccaacatggaagatgatggcccagaagaggaggagcgtgtggctgagcctcaagctaactttaacacccctcaagctctacggtttgaggaactactggccaacctactaaatgaacaacatcagatagcgaaggaactatttgaacagctgaagatgaagaaaccttcagccaaacagcagaaggaggtagagaaggttaaaccccagtgtaaggaagttcatcagaccctgattctggacccagcacaaaggaagagactccagcagcagatgcagcagcatgttcagctcttgacacaaatccaccttcttgccacctgcaaccccaatctcaatccggaggccagtagcaccaggatatgtcttaaagagctgggaacctttgctcaaagctccatcgcccttcaccatcagtacaaccccaagtttcagaccctgttccaaccctgtaacttgatgggagctatgcagctgattgaagacttcagcacacatgtcagcattgactgcagccctcataaaactgtcaagaagactgccaatgaatttccctgtttgccaaagcaagtggcttggatcctggccacaagcaaggttttcatgtatccagagttacttccagtgtgttccctgaaggcaaagaatccccaggataagatcctcttcaccaaggctgaggacaatttgttagctttaggactgaagcattttgaagggactgagtttcttaaccctctaatcagcaagtaccttctaacctgcaagactgcccgccaactgacagtgagaatcaagaacctcaacatgaacagagctcctgacaacatcattaaattttataagaagaccaaacagctgccagtcctaggaaaatgctgtgaagagatccagccacatcagtggaagccacctatagagagagaagaacaccggctcccattctggttaaaggccagtctgccatccatccaggaagaactgcggcacatggctgatggtgctagagaggtaggaaatatgactggaaccactgagatcaactcagatcaaggcctagaaaaagacaactcagagttggggagtgaaactcggtacccactgctattgcctaagggtgtagtcctgaaactgaagccagttgccgaccgtttccccaagaaggcttggagacagaagcgttcatcagtcctgaaacccctccttatccaacccagcccctctctccagcccagcttcaaccctgggaaaacaccagcccaatcaactcattcagaagcccctccgagcaaaatggtgctccggattcctcacccaatacagccagccactgttttacagacagttccaggtgtccctccactgggggtcagtggaggtgagagttttgagtctcctgcagcactgcctgctatgccccctgaggccaggacaagcttccctctgtctgagtcccagactttgctctcttctgcccctgtgcccaaggtaatgatgccctcccctgcctcttccatgtttcgaaagccatatgtgagacggagaccctcaaaaagaaggggagccagggcctttcgctgtatcaaacctgcccctgttatccaccctgcatctgttatcttcactgttcctgctaccactgtgaagattgtgagccttggcggtggctgtaacatgatccagcctgtcaatgcggctgtggcccagagtccccagactattcccatcgccaccctcttggttaaccctacttccttcccctgtccattgaaccagccccttgtggcctcctctgtctcacccttaattgtttctggcaattctgtgaatcttcctataccatccacccctgaagataaggcccacatgaatgtggacattgcttgtgctgtggctgatggggaaaatgcctttcagggcctagaacccaaattagagccccaggaactatctcctctctctgctactgttttccccaaagtggaacatagcccagggcctccaccagtcgataaacagtgccaagaaggattgtcagagaacagtgcctatcgctggaccgttgtgaaaacagaggagggaaggcaagctctggagccgctccctcagggcatccaggagtctctaaacaactcttcccctggggatttagaggaagttgtcaagatggaacctgaagatgctacagaggaaatcagtggatttctttgagctaggagaataagagtctggagactgggagccttcacttcggcctccgattggtggcgcatagggtgtaaccaataggaaacccctaaagggtacttaaaccccagattttgcaactggggctcttgagcagcttgctttagcctgctcccactctgtggaatatacttttgcttcaataaatctgtgcttttattgcttcattgtttca

SEQ ID NO: 14998 - DNA, 29214 bp, Homo sapiens
acgcgtgagggcctgcgctggagccggcttgacagggtctgagggggagtggagaactgggcgaggaggttcccgtgggtgagcgcgtacgggatggctggctcgcaggacggccgaaggtggtggttggtgggagcagccagcgacgagcccgtagacactcgtacgcgtgcgggctgacgtgcgcgctacatggccggagtcgggcgaagcgggggaccgtggggaagaacgcgaggagggaggagtgggaggttgggggtgtcgctaggcgcccttagctccctccctctggaggagctgccgcggccactctgctgccgccgctgccgccgccattttgggttcgctttgcgaggggaaacgatcccagtgtcggttgcgggatccgcctcctctcagtttgcccctttagccctccacctttcccttctcctctctcgcatttccgccagtcggcttacccgctggccgcctcctgacaagcgggagggatccgcggtggacccagggaagcggaggagcctggcggccaccccctcttcctcacttccctgtactctcatcgctctcggcctccgacacggtgagtagaacgatttgggccggcattcgggcctaagcactctctcagcgattgaatcctgggctttctgggagccactgtcatctcccggacctggacctctgggagagcagtggtgaagatgggggaggggagagcagggagggggatcctgagcctaccgggaagtccctccaggcggggtgaaggggtgtccctgacaggcagactcccggagggggctgggaagtaagcgagtggaggcggagtcggctgtgcccctgacaggttagtttgtgtttgtaggcatgatcggagcctcccccatagtccagtttgtgtgtgtttaattaagggataagagtggtcgaggacacgatcttgagaggggattttacctgtgtgacaaggtctgtggtgtccctgccgcgttgaacggtatgtgggaacgacaggatgatctcagtgttgtacgtttaataaatgtcactggttagtttgtacatggaaagagatgtttttggtctagcagacagatggtctgttggtgtgtagcggctgtgttggtgtgtgtatgtgaggatggcaagtgtttccgtaagagtttgcctttatttgtgtaagtgtaatggagttccccttataagttagcttatttcttgaataaatgttgggaggttccttgcaggttgatatgtgtgtgtattttagggattgggagcccctagttacttgttgggaaagagcggcaatggtagtgttctgtacagcatgtgtctgtgaggtcagggaggggagaaacttggcatagccagttgtggtcttaagaatagtttgtgcctttggttagagtgagttgtgtaaatgtgaagggccaaaatatctttaacagaatcattgctacaaagctgtaaagaatgggtggccttatttgttgtcgcgggtttatagtaatagtttacaatacaataagaaagctctttcagtttctttgtgatactgaatctctgtgaaaatggtaggatgctttcttccattttacaaaataggaaatttaggcataaggagagaacttctccaaggccgcatgttaaattggtgacaaagttggaactgtaactcccatattttcactactactgcagcagtatattcagcataccatggtgcctcaggaagtctttgtcggcaaatctgagtatgctggaaagataggagcacataagactggttggcttgtatttgggggagaccgattgtgtcagatatgtatgtggaacgtagctgtccttgccgagtctgacctgtatgaaatgcatatccatggctatattattttggatttatggaggaagcagagcatttctgacacttaaggttgtatgcgtgagggagaaggctttcacagcttaacttgtaccagagcagctgcatgggtgctgacagcttaacttgaaatctgtgggaggaaggatcctttttcactcattcaacaaatataaccattcaatgaatggtccatgccttgaggtgaggatcatcaaggtgtctctgtaaatagcctggatgcaatctgaggggagttgttttgacggtggtaggtattaagttgagggaggcagtgtggaattaaaaccagagaactgtttttgggtactggtaattgttaatatatgtgcctgtggatgttggaacttcttggctgggctgaaggaatcctttgaaagactgatttcggcagggcgcggtggctcacacctgtaatcccagcactttgggaggccgaggtgggcggatcacgaggtcaggagatcgaatcacgaggtcaggagatcgagactatcctggctaacaggatgaaaccccgtctctactaaaaatacaaaaaattagccgggcgtggtggcgggcgcctgtagtcccagctactcggggaggctgaggcaggagaatggcgtgaacccgggaggcagagcttgcagtgagctgagattgcgccactgcactccagcctgggccacagaggagactccatctccaaaaaaaaaaaaaaaaaaaaaaaaaagactgatttcatgtagtaaggatcccgtctatgaactctatgaatatgaggtaagaatgcatgaactaagccaacttagctgtattcttctggaaaatgggatgtttcttgataggctagattagtggttcttaaaagttttttggggtcacttatccttcagagaatcggatgaaagacactgggccctcaagttagaagatgagcataagcgcaatcacatgatttatatatatgattttaggaacttaaactgtaatgaaatagagccaatttatatttagatctcatttgaaaacctttcattttcattgttcgggtgtgtggatgttagtatgagtttaaggtgaaggagtctatgttagtatttgaacatgttgacaggatccatatttttaatttattctttttatcgtctgcaaacatttctgcagtattagtaaatgactctgtatttggtaaaaagggaagctaatgtcgcacaagtatctatggctttgttctttgtcagtatctttttgttctcaaactctgagaagcgtctttttttcagttttggattgggcctgaggtgatttgaagctcctgtcttggagtttaacttagttataacaaacactgagttaatcctatgcaggagacacaaagataattaatatatggtctctgtgcttgaagagacgctaattttctgtggttgaagagatgctgtgaattgtgtgatagtggcagctctcaaaaggacaaggaagagggaaacatattcctagaagctgaaattttattacccaattgcaaagactttttgtcactacttattcttaggaataaccataaagtgtttattttattctgtatggaactttgtactttaaaaaaatatgttttgtatcatctggtgtttttgtataaaggaactgttggtttgaaaagaaggtaaacatcatttatattccttaccttgttttgggatgtatctctacagtgagtttatgtaaaaaggtcttaatgtcatttttgggtatacatacatgtagaaagccctcctgatataaaatccagtagctatttgacagactacccattaatttattactggaacttaaaaataattactgtacttttaaaagaacaagaaattggtcaggtggggtggctcacgcctgtaatcctagcactttgggaggacgaggcggatggattgtcagagctcagaagatcgagaccagcctgggcaacacggtgaaaccccgtctctactaaaatacaaaaaattagctgcatgtgttggagtgcacctgtagtcccagctactcgggaagctgaggcacgagaattgcttgaaccaagaattgcttgaactgggagggggaagttgcagtgagctgaaatcatgccactgcactctagcctcggcatcagagcaacactctgtctcacaaaaaaaaaaaaaaaagcaagaaatgtaaaaaggtgttttaataggacagattataggattcagtgagataatggagaagttttaggaaaaattgtctgatagtcctttctttctattgacatggcccctgtataagaatgctatgtaaatttgtgaaaagtttaatattttctctaatttttaacgggtagtaggttcatggtgttatttttctcaaaacgtacatgtgatatgtgtgtgtagtgtgcatatatgtgcatgtatgtgtatacaatttctttatttttttaattgagattaggtctcgctatggttttttgtttttgtttttgtttttgagagagagtttcgctctcctcgcccaggctggagtacaatggcacaatcttgcctcactgcaacctctgcctcccaggttcaagtgattctctttcctcagcttcccaaatagctgggattacaggcgcgtgccaacacgccctgctgatttttgtatttttagttgagacagggtttccccacgttggccaggctggtcacgaactcctaacctcaagttctccagccgtctcggccttccaaagtgctgggattataggagtgagccactgcacctggcccaggtcttgctatgtagatcaatctggtcttgaactcctggcctcaagccatcctcctgtcttggcctcccagtttgctgggattacagatgtgagccagcatgcccagctctttttacctgcttaccaaatccaagattttctccaaaatgaactggaatagccttcttactgtgttaattttgccttggtggggaagcctaagtcttggaactaaattggggtggttatgacagttctctttttaaagctgatcagtatttcagtatttcacttgttgttgttttttttgttttgttttgttttttttgagatggagtcttgctctgtagcccagtttggaatgcagtggcaggattttgactcactgtagcctctgccacccggattcaagtgattctcctgcctcaatgtcctgagcagctgggtttacaggcacgcaccactacacctggctaatttttgtattgttagtagagacagggtttcaccatgttagccagtagccaagctgttctcatactcctgacctcaagtgatccacctgcctcagcctcccaaagtgctgggattacaggtgtgagccaccacgcctagccaaacccatctctttcattaaaccacctcattttggttcagaaacaagactgccatgtatgtatttaatgcttattatgtgccaagcactattccaggtactaagatacagtgatggacaaaacaagatcccttctcctctatctcaggacttattaatttgggcattttcattttccaatataggatcttttagtactggtataggattcctgaaggaattcctgaaatataattatttttctgctagagcaaatcaattttgttttttgttttttttttgagatggagtttcgctcttgtcgcccaggctggagtgcaatggcgcaatctcggctcactgcaacctccgactcccgggttcaagcgattctcctgcctcagcctcccaagtagctgggattacaggcattagccaccacgctaggctaatttttgtatttttagtagagacagggtttcaccaggttggccaggctggtctcgaactcctgacctcaggtgatcctccaggctcagcctcccaaagtgctaggattacaggcaggagccaccacgcccagaagagcaaaattcttctgttgacaaaaatttctttcctctgaggaagagacactgtgtgcctgtgttttatccaggaattccattggatagtttgtcctttgggatgtcagtggattaaatcctccattaagaatcaaagtacttggctgggtgcagtggctcatgcctgtaatccctgcactttgggaggctgaggcaggtggatcacctgaggtcaggagttggagaccaacctggccaacatgatgaaaccccatctctactaaaaatacaaaaaattatccaggtgttgtggcaggtgcctgtaatcccagctactctcgaaaaaacagaaacaaaaactctgacatgtagagtatgtagatgtagagaaaaaagtaaaatgattgttgaaaaaaatgtctattttttatcttctaaatagctttgtgtgtcagagatcagaacgctcattttacatgatatcaagaaccagaatgctagatagctagaatggttgttaacttcctagataaccattgtagaggaacacataaggtaaaacaaatgaataaaaattaaaaaaaaatgagatagccaaagatttgaagctctttacccattaacatgataatcatttcgactttgaatatttgtagaacaagagtcagaactcagaacaaagatctctgaggaaataaaaaaaaatcaagctgcctcctaatttctcatttagtctgtcattgggcattgtcaaactgtcaaactatatttagagattctggttttcatctggagacttagtgagttgtgtaatatcttgaatacacatataagatcttgccaggtggggtggctcatgtctgtaatcccagcactttgggaggatgaggtgggaggatcgctggagcccaggagttcaagaccagcctgggcaacatagcaagtccctggctctatttaaaaaaaaaaaaaaaaaaaaatcctcaatgtagaactttaaatttatccttacgtgttacatccagttgatttgagaaaatatgattctgaattttccatcaattggattggcagtccctttcagctttacagctttacatcatctacagatttgttaagtatgttctcttggtcttctaattcactgatggagtttttgaataggtcgggtccaaagatagagtcctatgaaacactgttggaaacttgtctctgtctgtctcttttttttttggagacagtgtcttgctctgtcgttcaggctggaatgcagtgggacggtctcagctcactacagcctctgcttcttggactcaaagagattctctcacctcagcctctcaagtatatgggactatatgcatgtgcgaccaagcccagataaatttttttttagagatatgttgacattttgcccaggttgggagacttgtctcttgattccattcagtattgtgtgggtttggataggccatctaattataaaatcattgggctggtcatggtggctcatgcctgtaatcccagcactttgggaggctgaggtgggcggatcacctgaggtcaggagtttgagaccagcctgaccaatatggagaaaccccatctctactaaaaacacaaaattagctgggcgtggtggtgcatgcctgtaatcccagctacttgggaggctgaggcaggagaatagcttgaacctgggaggcggaggttgcagtgagccaaaatcgtgtcatcgcactccagcctgggcaacaagagcgaaactccgtctcaaaaaaaaaaaaaaatcatctagctcacattttctccttgtcttcttcctattagaatttaagttcaatgagattagaactctctctctctctcattctctcatatatcccaagcatctaaaacagggattgaaacatagtaagtactcaataaatgtttttgaataaatgaatgaaggatagctgggcgtggtggctcatgcctgtaaccccagcactttgggaagccaaggtgggtggatcactggagctcaggagttcaagaccagcttgggcaacatggggaaaacccatctctacaaaatatggaagaattagccgggcatgacagcacactcctgttgccccagctacttggagggctgaagtgggaggatcgcttgagcctgggaagcagagattgcagtgagccgagatcaagccactgccctccagcccgggtgacagagtgagaccctgtctcaggaataaggatagatatgaagaattcgtcagatgccttgttgaaaacatcatacattgtctacatggaattcctccatattgtaaaatgaatctaatttataccaacaacgtttggcttttttgcagaaaaggaagcaaatgagctgatggaagatctgtttgaaactgtgagtaatgatcctcaagtgagaacatgggattgtaagttggttctccaacaaaatgtgtcctttgatctctgtgatgctccttctagaagagggactgaaccaattctccttttagtctacctgggaaagaatataatgacaaaagaaatttgctaactgctagactcttgattatccacatgtaggttattcttactaaaattttccttgaagctttttttttttttttttgaggcaaagtcttgctctgtcacccaggctctggagaatacagtggtgaaatctcagctcacagcagcctcgacctccagggctcaaaacaattctctcatctaagcctcctgagtagctgggactacaggcacacacctacaggcccggctaattattttatttttttgtagagacagggtcttgccatgttctggaactcataggctcaagtaatcttcctgcctcaacctcccaaagtgctggaattacaggtgtgagccagcacatcttgccccttgaaaacttttgatggcttcccctactgtcatttggtgtgtccttaaagattgccaactagttttaaagtattttgcacacaaataattaccttttccataaatttgtctaaaaagatatttctgtttaagaaattgatcattttgagttatcctagctctgtgcttactgatacaagttgactggttgagcaacttctttcctggcataatagtcattccatatgtgggtttgtaggagtcctgaagtgagaaaggttctgatgtaggctctttctgggtgccagcattattaaagtattgtttatagttttcacttttccttcccaacactggagcaacattcaaaagcccattccccaggaaaaccctccctttcctttgcccacagttccaagatgagatgggattctccaacatggaagatgatggcccagaagaggaggagcgtgtggctgagcctcaagctaactttaacacccctcaagctctacggtaggctagttgaagaccttgagatttggaatagaggaagagtttatttctgaaaaggttttcagaagttgcagttaacaatttttcatccccagccagcttctgttactgatgtaaggatgcagagtcctgtcaggagttaggtgtcaagtgaagtctccttgttatggggcagtgcagctgtaggccaagctgtatctgtttgggaagggagaaaaaacagtagctggcatccatatccacttctccgggtgagtggtgctggagaggtatgtaggactcaatgtggccagccacacaaactaccctatattgtaatatccagtctgtcccttttgttctttttatgtgccattaatatctgctaaatgtgactgaaaatttgttagtcacctaggcattagtggagcaaaccctgaagcacctgcagtaaggagtctgaaacatacgtgctgacctttttgcctaaagttggcacttgtgttacagcatccagaaagtagaggctttaattttttcctcattttgtggtggatttgcatctgcactttattctgttgtagcagcatataatcattaggtcgatggcgagaggtcaggatgcagtttgtgccataagtggaacaaagcaaagagaatagtccctgtaattagtcctgtgtttgaacttaacagcactactaagcagagagcttgggttccatctgaaagctagacctttagggattttccaatttagtgaaaaaagataagataggccaaccaatgtcttaaaaactagaactactagtcattctccattacaacaaatatcacaatacaactacatcaaaaatctcaagattgctaagtcagtatttgacccattattttaatttatagttcatagaacaaaattctggtatagcagaatggaaccattcatcctgggaacgtataataggatctgattaataaatattttggttttgctgatcaactctttataacttcttaaaatttggaaaatatagaactaatttaaaattcctgttagaatccagttaccttctggtattcaatggaatatagtcatatatcatctcatggtcataccctctgtgaaatctatcattaaacgattcatcattgtgtaaacatcgtagaatgtacttacataaacctaaatggtttagcctactgcatacctattgctcccaggctacaaaacctgtacagtgtgttactgtactgtactgaatactgtaggcagttgtaacacaatggtaagtacatatgtatgtaaacatagaaaaggtacagtaatcttatggagccacctctgactatgtggttcgttattgactgaaacattctgtggcgcatgactgtacttgggcagcttctgcttctctttcgattgcaaatacaaacctgtttttgttttaatctttgactaaataaaaatccctctgtaagtccatagagagtaagcacatcttaaaacacaataaggaagagagaggagaaaaagacagtcaaaacaaaaactctggggcttcccttatcaattacctaaataatccttgttaaaactaagtgcaggctatgtttccattttctacttttttatgcttcttctcttctgttccttcagtggtggtagcgcggatgttcaaattttcagttctcagtaaagattgtatagacagtcccacggtcttcaggtttttactctgtgctacccaaacctacagtaaatactataaaagaaaacttattcaaacgtaatctttatctgcaaaaactattgaaaaacgttaccatttaactattgctgtaatatagggggttccttgaaatatgataacctgcttgttatagctacttcagcagatcttatcctgttgcatagggtatcagcatatgcttaatcatttaggtatattattctccctttatttctttctatgtaaacatagaaaaggtatagtaatcatacatagaactgacatgctaggtattggaatttttgcttcagccctgcaaacaatctttcaggagggtatggatgggaagttagggttaggaaccttggaagaggaatttaaagggctaaaagaagatagccttcatggataatattttaactaacttctccgttctgttcatttgaactaccatgtacttcagttattttggtatatccttttcctgcttcatgctagaaagtctttgacttgttaagaaagcagggcagtgcagcctgagtagataggataatgggacaagctggacctgggatgggagtaacatcccagggagtaacaagtaatgagagaagaaatgagaatgatgagttcccaccagctccttggctgctttcttacccatatatttctctgtccctagttttttgtttaattttttcttcatttgtatattatttggaagaggaattgtagaggaatgggatggggtgtaatacagaatcatttgatgcatgctaactactttgggaaaagatttgtgtaaggctgggagtttgactgttggctaaagtgaaaaggggggattagtagggaatgaaaattgttcaggctctttgctcatcattgcaaagaattggatgtgttgtggacctaggaaaacactcaaattcagtcatccccgtttgggataggtttgaggaactactggccaacctactaaatgaacaacatcagatagcgaaggaactatttgaacagctgaagatgaagaaaccttcagccaaacagcagaaggaggtagagaaggttaaaccccagtgtaaggaagttcatcagaccctgattctggacccagcacaaaggaagagactccagcagcagatgcagcaggtaacactttccttggtcatattaatattgaattataccaaggcctaactctgaggctttggtataatctaaaattagcagctttgtaaatgtcagagatagttaccttactacgtattaaaaccgtagtatcttcacatcagttaggagcttgagaagtcatcatgttcatgtcctgtggctcagggaagacagcacataaggaccctaatggtattcggaattacagatttcaaagagtcctcagtaatctattctgaaatttaaccttcactgtgacaagtagttttttttcccttttcccttttcttttttcttttttttttgagacgtagtctcgctctgtcacccaggctggagtgcagtggctcaatctcagctcactgcaagctctgcctcccgggttcacgccattctcctgcctcagcctcccgagtagctgtgactacagggactcgccaccacacccagctaattttttgtatttttagtagagacagggttcactgtgttagccaggatggtctcgatctcctaacctcgtgatccacccgcctcggcctcccagagtgctgggattacacgcgtgagtcactgcgcccggccttttccttttctaatctcagttcctcctctgtttagaggttaaacttcctctggttctgtcattttgttcaagggaacatgtctgagaaatttatgccaagatcctacgttgttctcacactctttgcagaaagcaaaatttgtgtcataaagttgcaaacatcttagttaatgactctctggtggctgggtgcagtggctcacacatgtaatcccagcactttgggaggctgaggtgggaggattgcttgagcaggggagttcaaaagcagcctggacaacatagtgagactctgtctctacaaaaaataaaaataaggctgggcacagtggctcacacctgtaatcccagcactttgggaggccaaggcgggtgaatcatgaggtcaggagtttgaggcaagcctggccaacatggtgaaaccccgtctctacgaaaacaaaaaattagctgggtgtggcggcgggcacctgtaatcccagctactcgggaggttgaggcaagagaatcacttgaacctgggaggcagaggttacagtgagccgagatcacgccattgcactccagcccaaaagtcagtgcgagactctgtctaaaaataataataataataataataaaataaattagccaggcattgtggtcacagctacttgggaggctgaggtgggaagattgcttgagcacaggtggttgagagggcattgagtcatggttgcaccactgcactccaagctgtgtgacagagcaagaccctgtctccagggggaaaaaaaaatatctctgggctcctgaaatggcagtgtcataacatatcactgcattattttctttctctccccagcatgttcagctcttgacacaaatccaccttcttgccacctgcaaccccaatctcaatccggaggccagtagcaccaggatatgtcttgtaagtttccaaattgccgtaattctatagactagaatataaaattagcttggcaggttatttctcacagttattctctcaggtatttttgattgctgtggcttcctatgtttgctgagtgaacataagccactgattcacatgaaaggacaaagagtgtattcaattttttcttttcttttttgagacagggtcttgctctttcacccaggatggagtgcggtggaacaatttcagttcactgcaacccctgcctcccgggttcaagtgattctcctgcctcagcctcccaagtagctgggactacaggcgggcaccaccacgggtaattttttttgtatttttagtagagacagggttttgccatgttggccaggctggtctcgaattcctgacttcaagtgatctgcccacctctacctcccaaagtactgggattacagccatgagccactgcgcctggcctgtccttctgatatttttattgggtcctcctcctcatctttagattcaccctgacttcttaggtttttggtaccgctattcatttcatagatgttgaggctgggcatagtggctcacacctgtaattccagcactttgggaggctgaggtgataggatcacttgagcccagtggtcaagaacagcctgggcaacatagtaagacccggtctgtgttttttttgttttgttttgttttaatttaaataatgaagtaaatatacatgtagatgttgaattcattatccattcatgaagctcaatattagtgttttatgtgtagagctagttttgctcatgacgttttgaggtattttgagctttttttttttttttttttttttttgagacggagtctcgctctgtcgcccaggctggagtgcagtggcgggatctcggctcactgcaagctccgcctcccgggttcacgccattctcttgcctcagcctcccaagtagctgggactacaggcacccgccactatgcccggctaattttttgtatttttagtagagacggggtttcaccgttttagccgggatggtctcgatctcctgacctcgtgatccgcccacctcggcctcccaaagtgctgggattacaggcgtgagccaccgcgcccggcctattttgagattttaaatttgaaatttggccaggtatggtggctcatgcctgtagtcccagcactttggtaggtcaaggtgggaggattgcttgagcccaggagtttgagaccagcctgggcaacatagtaagaccccatccctaccaaaaaaataaaaaataaaaaaattagctggggatggtgccgagtgcctgtagtcccagcaacttgggagactgaggtaggaggatcacttgagcctgggacgttgagactgtagggagccgtgcttatatatcactccagcctgggtgacagagtgagaacctgtctcacaaaaacaaaaccatactttacctcataaaaattgcctcaaacttttggacaggtaatgataatactctcagcttcttcagtaagtcttctttggattttgaagagtacatttgctagtattctaaaacttccttggtgatcaacaggatgtcttcatctcttactgtattcagaggaggatgaggagtacttggttgtaggcattattctgagaccaaaagacaaaacaattttaaaagtaatggtcctggtcgggtgaggtgactcatccctgtaatcccagcactatgagaggccgaggcaggcggattgtgagcccaggagttcgagatcagcctggccaagatgggaaaacgctgtctctgcaaaaaatacaaaaatcagctaggtttggaggtgtatgcctatagtcccagcttctcaggaggcagtgggaggatggcttgagcctgggagggggagtttgcagtgagctgagatcatgccactgcagtccagcctgagcggcagagtgagaccatgtctcaaaataaattaattaattaaattaaagtaatagtccccattcttgagactcttaattctagctcgggagctagaccatgtattccttagtgagaaacagtttaaaaataaaacaagaatataatccctgaatatctgagaactcaggcataatcttaacagtagtttattgtgaaagactttatgattatttttacctgtttttatcctgtagtaggaaggtcagcttctcatttagattctgaaggctattggtattaattgtctggaattgtcttagatcttccttgtgtcgtgttttcccagaaagagctgggaacctttgctcaaagctccatcgcccttcaccatcagtacaaccccaagtttcagaccctgttccaaccctgtaacttgatgggagctatgcagctgattgaagacttcagcacacatgtcagcattgactgcagccctcataaaactgtcaagaagactggtaggagacagatgtgtcagctttaagtttttacttgcggtgagaggtggtgggaatcttatcccatagataacttcctaggatacttgcctaggaatggaggacacaggacatttgtaatttcttccttctctcttttatcctccctttgtactcattatccaagttctagaattacatgataatctccgggcctgggtaaggcatggaggcagtggacagtataggaatatgggaggtagagatctgaggctcagtgctaagaattggactacagcaatatgaggggtaagtattaggaatcagatcaagataaactggggcctggtaaagatgaaagtcaggtggtaaagttcggtcatgtttagctttttattctcttcattaagatcaactaactttatttaccataatgattgtagcataggtgatatctccattctgaatgaaatgttgacttgcaagttaggcgtaaattagagattgtacatttgccgtgttcagtattttaaagaaatttgccggtttagattctaccttgcattggtttagtattttttgagaaaatatttgctatttacttaagccaaatatttacttctgatttgtttgctgacttagcaaattagttgtggtttgttctggatttgggtttgtctttggattctattttaaatccctaagtcttatcattacattgaatgtagttgaatttaagtgtactatatcatagacacagatcccaaactactttaatagctatattatatgaaatggtaatgaaaacgtgatttaataccaaattatagtattatcttacacatctagtgtcctgtgtttttcttctggagatataaaaatgacacttatggaaggagaaatatggatatagtagttttgtctctagaaatgcagaggtgcctaaaattgagaggctgagagagggagacagaaatgaatgagactgaattgtctcattccttttatggttcttttgttcccaacctcaggaggaatctgggagaacttaatgaaagttaagaaagaatgaaataaaagtaaaatttggaataccaggtttgtgagggagattaaagaagttggaatcttttttcttttttttttttttaagatggagtctcgctctgtcacctaggctggagtgcagtggggtgatctcggctcactgcaacctccgcctcccaggttcaaacaattctcctgcctcagcctcccaagtagctggaattacaggtgcgtgccaccatgcctggctaatttttacatttttggtagagatggggtttcactatgttggccaggctggtcttgaactcctgacctcaggtgatccacctgcctcggcctcccaaagtgctgggattacaggcgtgagccagcacgcctggcctggaatcttatcctggaagaaaaaagcattgttgaaggtctgttatccttcagagatttaaaggggaaaggaggtaaaacatttttgagcatacactatgtgacaggtattactaggtactttttaagtgtttgttttactttgtgaataaagtgttacacgtaagaaagagtaagagaggccgggcgccgtggcttacgcctgtaatccaacactttaggaggccgaggctgtcggatgacaaggtcaggagatcaagaccatcctgtctacagtgaaaccccgtctctactaaaaatacaaaaaatcagccaggcgtggtggcaggcgcctgtagtcccagctactcaggaggctgaggcaggagaatggcctgaacccgggaggcggagcttgcagtgagccaagattgcgccacgcactccagtctgggcgacagagccagactccgtctaaaaaaaaaaaaaaaaaaagtcaacttttattgccagtgaatgggactccctttagacctaatgttagttgaggaaagactgtggaaactctttggggagtggtaggcagatgggagggaatcaagttagataaggacagctctacctaaatgcaaaaatgcattcacaggctttttgaagccctcttttttcctagaagttgatttatcagagatttattttcttatagccaatgaatttccctgtttgccaaagcaagtggcttggatcctggccacaagcaaggttttcatgtatccagagttacttccagtgtgttccctgaaggcaaagaatccccaggataagatcctcttcaccaaggctgaggacaagtaagtgtttactctgggggatcaaatatcccaaggagaagatgtagttcctttgaggagtttaggggaagtaagacttgtataataagacatggacacaaaaggaaaagcagtatagatgagcagagtcctctagaacgtgcttgttctagcagtgccaaatactgctttttggggggatgttacacacatttttaaaatgttttagactggacatggcggctcccacctgtaatcccagcactttgaaaggccaaggcaggaggttggcttttctaatgttattatttatttagagacaggatcttactctgtcacccaggctggagtacagtgttgcaatcacagctcactgcagccttgaactcctgggatcaagtgatcctcctgcctcagcctccatggagtagctgggaccacaagcgtgtgccaccatacatggctgattttttttgtacaggtgagggtatctctgtgttgcccaggctgctcttgaattcctgacctcaaatgatcctcccactcctggcctcccaaagtgctgggactataggcataagccaccacacccagctagattatgaacatttttatggccctttgtgtgtattgccacactgttaacagcaaatatgtatatatgtaaccatgattatatatgttatgttagagggtagtattggtgccagtttaatttgtctgacggggtacctattattcattttatatttgttttattagaatcattctccttcccatgtattctctttgaacttcctttgtgttgttaatatacagctcatcatgatctgacatttattgatgatttatgactagtttctcttgctcctacttaattgtgaactatttgattcttattcatagtacttaatcactactcactaaatacctgaaattttctactgagtagtcaccaacttgtagtagtcactacaagaattagttgtagaaaaagtagattggccagccatggtggctcacacctgtaatgacgacactttgggaggccgaggcaggaggatcacttgaggccagaagttcaagatcagcctaggcaacaaagtgagaactggtctctacaaataatgaaataaaacattagttaggcatggtagcaaacgtttatagccacagatactcaggaggctgaagtgcgggaatcgattgaacccaggcattcaagactgcagtgcactgtaatcatgccactgctctccagcctggacaacagagcaaaaccctgtctgaaaaaaatgaaaaagtagattgggccacacgccatgggctcatgcctgtaatctcagcactttgggaggctgagactggagaatcgcttcagcttaggaagtagcagctgcagtgggctgcgatcacgccactgcactccagcccaggtgacagagtgagaccttgttttaagaacaagtaagaaaaagtagattgtaaaatgtgttagtctggggaggccctttagaaggaaggactgtgaagtgagatttagtgttattgctcctttctcagtttgttagctttaggactgaagcattttgaagggactgagtttcttaaccctctaatcagcaagtaccttctaacctgcaagactgcccgccaactgacagtgagaatcaagaacctcaacatgaacagagctcctgacaacatcattaaagtgagtgtttcctgcatgcactatccaggcacctcaccaacacatatctgttcttttctcttgttattctcaaagaaaagaagaaccttcttttatctaaagctaatttctcctacttatatactagattaattcccctgttgccttttcagggacattgattcattcattacgttcctctggagtatcttcatcctcttaaaagattccacaaatccatgtttccctgtaataattctctttcttgaactttctagaaatgatatgcagtattccacttacatgctttgggtttttgttttgttttgtttttttggtcagacataatcttgcactgtcacccaggctggagtgcaggagtatagtggcatgatcttggctcactgcagcttccgcctcccgggttcaagtgattctcctgcctcagcctcccaaatagctgagattacaggcgtgcccaccacgctcagctaattttttgtatttttagtagatacgggtttcaccatgttggccaggctggtcttgaacttctgacctcaagtgatccaccagttttggcttcccagaggctaggattgcaggcataagccaccgtgcccagcctatatactttttctcaattttgtgtttgtatgtatgcatgtatgtgtgtgtgtgtgtgtgtgtgtgtttgtgtgtgtctgtgtctgtatgtatgtatgtatgtatgtatgtatgtattgagatggagtttcgctcttgtcgcccaggcccagcctatatactttttctcaactctttttacttattgattgattgattgagatggagtctcgctcttgacccccaggctggagtgcaatggtgcgatcttggctgactgcaacctctgcctcctgggttcaagtgattctcctgcctcagcctcccttgtagctgggattacaggcccctgccaccatgcccagctgatttttgtatttagtagagtcggggtttcaccatgttggccaggctggtctcgaactcctgacctcaggtgatccatctgcctcggcctccctaagtgctgggattacaaatgtgagccattgcccccagccttcttttttatttagatatttatttatgtttttttttttttttagagacaggttctcactctgtcatcctggctggagtgcatgggcacaatcataggtcactgcaacctcaaattcctgggtgatccttccacttcagccttccaagtagcttggactacaggtgcatgccaccaaggctagccgattattttattttgtgtgaagacagggtgtcattttgtttcccaggctggtcttgaagtcctgacctcaagcagtcctcttgcctcagctcggcctcccagagtgttgggattacaggcgtgagccatgatgcccagcctttggtttcattgtgtttttgtatttttcttgagacaaggtcttactctcctgcctaggctggagtacagtggtatagtcatagctcactgcagccttgaactcctaggctcaagcattcttccaacgtcagcctcccaaggagctgggattatatgcattagccactgtgcttggccattaaatttatttatttatttattttattttatttttttgagacagaatctgtctctgtcacccaggctggagtgcagtggcacaattttagctcactgcaacctccacctaccgggttcaagcaattttcatgccttagcctcctaagtagctgggactacaggcatgcgccaccacacctggctaatttttatatttttagtagaaacataatttcaccatgttggtcagtctgatcttgaactcctgatctcaggtgatctgcccacctcggcctcccaaagtgctggaattataggcgtgagcctctgtgcctggcaaaaaactttttttttttagggatggggtgtccctatattgcccaggctggtcttcaatttttggccttaggcaattctcctgtctcagcctctaattggtactgcctggtgtattggatttaggccttacttattaaccataaaccacggaagccgaagatttacctctctcctcactcccttactcccaccacaaacatgcacattttctgctctccaaactcctcactagtagttatggtagaattttggttagattgtattcagggtttacattgtaagattttaaggactgttggctgggcgcggtggctcacgcctgtaatcccagcactttgggaggccaaggcaggtggataacgaggtcaggaaatcgagaccatcctggctaacatggtgaaaccccagctctactaaaaatacaaaaaactggctgggcgtggtggcgggcgcctgtagtcccagctactcgggaggctgaggcaggagaatggtgtgaacccgggaggtggagcttgcagtgagccgagatcgcgccactgcactccagtcttgccagagcaagactccgtctcaaaaaaaaaaaatagattttaaggactgtataaatgctcttcacagctcagctatgttactgtgttaccttgcctttcctgctgaacattttgtttcccagatcatcttctttcagtgtgttcaggtattctagatattctgtcactttcatcttgaagaaattgctccctgagccctctgacattattccactttaagcgtgttgctctccatgttgctgcactgatgtcttcttgggctttttcttcaccatcatcccaggaattccttttgcctcatactgtgttagatcctcttatttcctgaattccacatctttgcttttgcattactttttttttttttttttttttttttgagacacagagtcttgctctgtcccccaggctggatctcggctcactgcaacctgcaaccttggtcttggtcttgaactcctgacctcaggggatccacccacctcagcctcccagagtgcggggattacaggcgtgagacaccacgcctggccttgttttttgttttgttttgcttttttttgagaccgagtctcgctttgttgcccaggctggagtccaaaggcgcgatgatcttggctcactgcaacgtccgcctcccgggttcaagcaattctcctgcctcagcctcccgagtagctgggattataggcacatgccactacgcctggctaattttttgtatttttagtagagacagggtttcaccatgttagccaggatggttttgatctcctgacctcttgatccacccgtttcggtctcccaaagtgctgggattacaggcgtgagtattacttctttactttagtggaacacattctagtagcttttttttaaaaaaaatttttttctgaattttaaaaaattgaggtgggggggtctcagttttttgcccaggctggtctcagactcctgggttcaagtgatcctcctgcttcagcatcccaaagtgctgagattataggcatgagccaccctgcatggccccattccagtagcatcctgagggagagtgcttgggaagggaattttcacatttaaaccatctccggggccgggcgcagtggctcacgcctgtaatcccagcactttgggaggctgaggcgggtggatcacgaggtcgggaaatcgagaccatcctggctaatgtggtgaaaccccgtctctactaaaagtacaaaaaaattagccgggtgtggtggcgggcgtctgtagtcccaggtactctggaggctgaggcaggagaatggcgtgaacctgggaggtggagcttgcagtgagccgagatctcgccactacactccagcctgggtgacagagcgagactccgtattaaaaaaaaaaaaaaaaaaatctccattcatggtcttttgattgtatcgatgtcagtttcctcgtttttgtttttgttttattttttttctttttttgagacagagtctcactgttgctcactgcagcctctgcctcctgggttcaagcgattctcctgcctcagcctcctgagtagctgggattagccaccacacccagctaatttttgtatttttagtagagatggggttttgccatgttggccaggtgatctcgaacccctgacctcaagtgatctgcccaccttggcctcccatagtgctgggattacaggcatgagccaccacatcctccatgtctggccagtttcctggtagtaatattgtactgtgtaccttgtttatatgtatagctcttgtttctatgtaacataaaaacattatattgggagaaactggttgaagggtacatgggacctcttggtactattttttgcaatttcctatgaatataattatttcaaaataaaaggaaaaaataatactctcctctgtcactgtatctagaattctagataggaaataatttttttaagaagcttttaagggcctcacttcattttcttctaactcctagtgtggtgttaagaaatttcatgccatttaactttttttttttttttccgagacagggtcccaccctgttgcccagtttggagcgtggctaaatcatggctcactggtgtctccaacccggtgtgcaccactatgcccagctaattttttttttttttttttttaagacatggtctcgttatgttggccaggctggtctcaaactcctggcctcaagtgctcgtcctgtcttggcctcccaaagtaatgggattataggcatgagccatggccccatttaactcttgagtctttgtgtaacacctgtttttctcaacctctgacagcatgcaggatttttcctttggcttcaatattttgaaaatgcatgataatatgccttagtatttgtctatttttatccatggttttttaaaaagtactttctttttgtttttgtttgtttgtttgttttgagacagagtctcgctccattgcccaggctggagtgcaatggcgtgatcttggctcactggaacctctgcctcccaggttcaagcaattgtcctgtttcagcgtcccgaggagctgggactacaggcgctcaccaccacaccctgctaatttttgtatttttagtagagacggggtttcaccttgttggtcaggctggtctcaaactcctgacctcgtgacccacccacctcagcctcccagagtgctgggattacaggtgtgggccaccatgcctggcgtatccatggttttaaggcacacgtgataaaccttattcttctgcagaaataatttttttttttttttttgagatggagtctcactctgttgccaggctggagtgcagtggcgtgatgtcggcccactgcactctccacctcctgggttcaagtgattctcgtgcctcagcctcccgagtagctgagattacaggcacgcgccaccacacttagctaatttttgtatttttagtagagatggggtttcaccatgttggccaggatggtcttgatctcctgaccttgtgatctgcctgcctcggcctcccaaagtgctgggattacaggcataagccaccacgcctggccagaagtaatttgtgtttaagttttagttttgtgtcatttttcgtgcacacctttgtacttttgttgggggatggggcggggtgtcggggttggagtcttgctctgttgcccaggctggagtgcagtggtgcagtcttggctcactgcaacctcttaattcctcagttcaagtgattctcctgcctcagcctgccaagtagctaggatcacaggcgtgcaccaccacacccagctaatttttttttgtactttattagagacagggtttcgccatgttggccaggctggtcatgaactcctgacctccagtgatccatcctcctcgttctcccaaagtgctggcattacaggcatgagccaccatgcccagccctttgtacattttttaatgtaggatgccatttgtccacttgactctcccactagtctgtaagctccatgagagcaggaattgcttcccttatgtgtgtgcttagcttttagcacagtgcctaggatatagaaaacatcttatgttcatcatgttggatgaacagatgcttattgtcatggtttaagttcagttcttatcttctttttttttttttgagatggagtctcaccctgttaccaacgctggagtgcagtggcatgatcttggctcactgcaatctccaccctaccacccccactgccaggttcaagcgattcttttgccccagcctcccaagtaactgggattacaggcacccaccaccacacccagctaatttttgtatttttagtagagatggagtttcaccatgttggccaggctggtctcaaactctcaatctcaagtgatctgcccgcctcagcctcacaaagtgctgggtttacagatgtgagccaccaaggccagcctatttactcttaaaactgaactgcctcggtctttttttttttccttcccttctgatgcccttcacaccatcatttgcttaaagtctttgatgtgtccattttatagattacgatgctgtctttgcagctgttgagcaggaacaaatcttacataagattgctcttagcatctgcttccttttctctctgtgacctaaactctccccttcctggcaaccagaatggagatcatcagttagaaaatattgaatagggctgggcgcggtggctgacgcctgtaatcctagcactttgggaggccgaggcgggtggatcacgaggtcaggagatcgagaccatcctggctaacacagtgaaaccctgtctctactaaaaatacaaaaaaatcagccgggtgtggtggcgggcacctgtagtcccagctactccggaggctgaggcaggagaatggcgtgaacctgggaggtggagcttgcagtgagcggagatcgcgccattgcactccatcctgggcgacagagcaagactccgtctcaaaaagaaaatactgaataactataaaatctttaaatagagattagtttaatttgaaatgtacaagtattcagcatatgctattcgtatatgtgtgttcatggatgtttgtgtatgtggtcttgtgtgtgtgtgtgtgtgtgtgtgtgtgtgtgtgtttctcttgatccaccaccaccccattcaccagcctgacagaagacagtgtttccagaaggaatgtaattcatgcgcatttttttcatgttaagttttataagaagaccaaacagctgccagtcctaggaaaatgctgtgaagagatccagccacatcagtggaagccacctatagagagagaagaacaccggctcccattctggttaaaggtacagccctcttcctcgaagtctgtaggaggcagaaggtcactgaaagttctgagagaatatcaaggacttccttaatcgtctaatgctttagttgtagaactaggacttcaggaatcttcctgattcacctttcttcccttacttttctgcccttctccgggtgattctacaacattttcaaaataatgggtaaaatggtaatttgctaaaggaaattcagagaagagtttctaaagtgtataattggactgtggtctttgtagaaatttcatatgcagagtcccttggaaagatgccttgagcttgtctcaggtccctaaacttagaaagtcctattctttttcccaaattctgacatgtgctggatcagagtgttctcatttccaataggccagtctgccatccatccaggaagaactgcggcacatggctgatggtgctagagaggtaggaaatatgactggaaccactgagatcaactcagatcaaggcctagaaaaagacaactcagagttggggagtgaaactcggtacccactgctattgcctaagggtgtagtcctgaaactgaagccagttgccgaccgtttccccaagaaggcttggagacagaagcgttcatcagtcctgaaacccctccttatccaacccagcccctctctccagcccagcttcaaccctgggaaaacaccagcccaatcaactcattcagaagcccctccgagcaaaatggtgctccggattcctcacccaatacagccagccactgttttacagacagttccaggtgtccctccactgggggtcagtggaggtgagagttttgagtctcctgcagcactgcctgctatgccccctgaggccaggacaagcttccctctgtctgagtcccagactttgctctcttctgcccctgtgcccaaggtaatgatgccctcccctgcctcttccatgtttcgaaagccatatgtgagacggagaccctcaaaaagaaggggagccagggcctttcgctgtatcaaacctgcccctgttatccaccctgcatctgttatcttcactgttcctgctaccactgtgaagattgtgagccttggcggtggctgtaacatgatccagcctgtcaatgcggctgtggcccagagtccccagactattcccatcgccaccctcttggttaaccctacttccttcccctgtccattgaaccagccccttgtggcctcctctgtctcacccttaattgtttctggcaattctgtgaatcttcctataccatccacccctgaagataaggcccacatgaatgtggacattgcttgtgctgtggctgatggggaaaatgcctttcagggcctagaacccaaattagagccccaggaactatctcctctctctgctactgttttccccaaagtggaacatagcccagggcctccaccagtcgataaacagtgccaagaaggattgtcagagaacagtgcctatcgctggaccgttgtgaaaacagaggagggaaggcaagctctggagccgctccctcagggcatccaggagtctctaaacaactcttcccctggggatttagaggaagttgtcaagatggaacctgaagatgctacagaggaaatcagtggatttctttgagctaggagaataagagtctggagactgggagccttcacttcggcctccgattggtggcgcatagggtgtaaccaataggaaacccctaaagggtacttaaaccccagattttgcaactggggctcttgagcagcttgctttagcctgctcccactctgtggaatatacttttgcttcaataaatctgtgcttttattgcttcattgtttcattg

SEQ ID NO: 14999 - DNA, 3073 bp, Homo sapiens
acgcgtgagggcctgcgctggagccggcttgacagggtctgagggggagtggagaactgggcgaggaggttcccgtgggtgagcgcgtacgggatggctggctcgcaggacggccgaaggtggtggttggtgggagcagccagcgacgagcccgtagacactcgtacgcgtgcgggctgacgtgcgcgctacatggccggagtcgggcgaagcgggggaccgtggggaagaacgcgaggagggaggagtgggaggttgggggtgtcgctaggcgcccttagctccctccctctggaggagctgccgcggccactctgctgccgccgctgccgccgccattttgggttcgctttgcgaggggaaacgatcccagtgtcggttgcgggatccgcctcctctcagtttgcccctttagccctccacctttcccttctcctctctcgcatttccgccagtcggcttacccgctggccgcctcctgacaagcgggagggatccgcggtggacccagggaagcggaggagcctggcggccaccccctcttcctcacttccctgtactctcatcgctctcggcctccgacacgaaaaggaagcaaatgagctgatggaagatctgtttgaaactttccaagatgagatgggattctccaacatggaagatgatggcccagaagaggaggagcgtgtggctgagcctcaagctaactttaacacccctcaagctctacggtttgaggaactactggccaacctactaaatgaacaacatcagatagcgaaggaactatttgaacagctgaagatgaagaaaccttcagccaaacagcagaaggaggtagagaaggttaaaccccagtgtaaggaagttcatcagaccctgattctggacccagcacaaaggaagagactccagcagcagatgcagcagcatgttcagctcttgacacaaatccaccttcttgccacctgcaaccccaatctcaatccggaggccagtagcaccaggatatgtcttaaagagctgggaacctttgctcaaagctccatcgcccttcaccatcagtacaaccccaagtttcagaccctgttccaaccctgtaacttgatgggagctatgcagctgattgaagacttcagcacacatgtcagcattgactgcagccctcataaaactgtcaagaagactgccaatgaatttccctgtttgccaaagcaagtggcttggatcctggccacaagcaaggttttcatgtatccagagttacttccagtgtgttccctgaaggcaaagaatccccaggataagatcctcttcaccaaggctgaggacaatttgttagctttaggactgaagcattttgaagggactgagtttcttaaccctctaatcagcaagtaccttctaacctgcaagactgcccgccaactgacagtgagaatcaagaacctcaacatgaacagagctcctgacaacatcattaaattttataagaagaccaaacagctgccagtcctaggaaaatgctgtgaagagatccagccacatcagtggaagccacctatagagagagaagaacaccggctcccattctggttaaaggccagtctgccatccatccaggaagaactgcggcacatggctgatggtgctagagaggtaggaaatatgactggaaccactgagatcaactcagatcaaggcctagaaaaagacaactcagagttggggagtgaaactcggtacccactgctattgcctaagggtgtagtcctgaaactgaagccagttgccgaccgtttccccaagaaggcttggagacagaagcgttcatcagtcctgaaacccctccttatccaacccagcccctctctccagcccagcttcaaccctgggaaaacaccagcccaatcaactcattcagaagcccctccgagcaaaatggtgctccggattcctcacccaatacagccagccactgttttacagacagttccaggtgtccctccactgggggtcagtggaggtgagagttttgagtctcctgcagcactgcctgctatgccccctgaggccaggacaagcttccctctgtctgagtcccagactttgctctcttctgcccctgtgcccaaggtaatgatgccctcccctgcctcttccatgtttcgaaagccatatgtgagacggagaccctcaaaaagaaggggagccagggcctttcgctgtatcaaacctgcccctgttatccaccctgcatctgttatcttcactgttcctgctaccactgtgaagattgtgagccttggcggtggctgtaacatgatccagcctgtcaatgcggctgtggcccagagtccccagactattcccatcgccaccctcttggttaaccctacttccttcccctgtccattgaaccagccccttgtggcctcctctgtctcacccttaattgtttctggcaattctgtgaatcttcctataccatccacccctgaagataaggcccacatgaatgtggacattgcttgtgctgtggctgatggggaaaatgcctttcagggcctagaacccaaattagagccccaggaactatctcctctctctgctactgttttccccaaagtggaacatagcccagggcctccaccagtcgataaacagtgccaagaaggattgtcagagaacagtgcctatcgctggaccgttgtgaaaacagaggagggaaggcaagctctggagccgctccctcagggcatccaggagtctctaaacaactcttcccctggggatttagaggaagttgtcaagatggaacctgaagatgctacagaggaaatcagtggatttctttgagctaggagaataagagtctggagactgggagccttcacttcggcctccgattggtggcgcatagggtgtaaccaataggaaacccctaaagggtacttaaaccccagattttgcaactggggctcttgagcagcttgctttagcctgctcccactctgtggaatatacttttgcttcaataaatctgtgcttttattgcttcattgtttcattg

SEQ ID NO: 15000 - DNA, 29128 bp, Homo sapiens
cgcgtacgggatggctggctcgcaggacggccgaaggtggtggttggtgggagcagccagcgacgagcccgtagacactcgtacgcgtgcgggctgacgtgcgcgctacatggccggagtcgggcgaagcgggggaccgtggggaagaacgcgaggagggaggagtgggaggttgggggtgtcgctaggcgcccttagctccctccctctggaggagctgccgcggccactctgctgccgccgctgccgccgccattttgggttcgctttgcgaggggaaacgatcccagtgtcggttgcgggatccgcctcctctcagtttgcccctttagccctccacctttcccttctcctctctcgcatttccgccagtcggcttacccgctggccgcctcctgacaagcgggagggatccgcggtggacccagggaagcggaggagcctggcggccaccccctcttcctcacttccctgtactctcatcgctctcggcctccgacacggtgagtagaacgatttgggccggcattcgggcctaagcactctctcagcgattgaatcctgggctttctgggagccactgtcatctcccggacctggacctctgggagagcagtggtgaagatgggggaggggagagcagggagggggatcctgagcctaccgggaagtccctccaggcggggtgaaggggtgtccctgacaggcagactcccggagggggctgggaagtaagcgagtggaggcggagtcggctgtgcccctgacaggttagtttgtgtttgtaggcatgatcggagcctcccccatagtccagtttgtgtgtgtttaattaagggataagagtggtcgaggacacgatcttgagaggggattttacctgtgtgacaaggtctgtggtgtccctgccgcgttgaacggtatgtgggaacgacaggatgatctcagtgttgtacgtttaataaatgtcactggttagtttgtacatggaaagagatgtttttggtctagcagacagatggtctgttggtgtgtagcggctgtgttggtgtgtgtatgtgaggatggcaagtgtttccgtaagagtttgcctttatttgtgtaagtgtaatggagttccccttataagttagcttatttcttgaataaatgttgggaggttccttgcaggttgatatgtgtgtgtattttagggattgggagcccctagttacttgttgggaaagagcggcaatggtagtgttctgtacagcatgtgtctgtgaggtcagggaggggagaaacttggcatagccagttgtggtcttaagaatagtttgtgcctttggttagagtgagttgtgtaaatgtgaagggccaaaatatctttaacagaatcattgctacaaagctgtaaagaatgggtggccttatttgttgtcgcgggtttatagtaatagtttacaatacaataagaaagctctttcagtttctttgtgatactgaatctctgtgaaaatggtaggatgctttcttccattttacaaaataggaaatttaggcataaggagagaacttctccaaggccgcatgttaaattggtgacaaagttggaactgtaactcccatattttcactactactgcagcagtatattcagcataccatggtgcctcaggaagtctttgtcggcaaatctgagtatgctggaaagataggagcacataagactggttggcttgtatttgggggagaccgattgtgtcagatatgtatgtggaacgtagctgtccttgccgagtctgacctgtatgaaatgcatatccatggctatattattttggatttatggaggaagcagagcatttctgacacttaaggttgtatgcgtgagggagaaggctttcacagcttaacttgtaccagagcagctgcatgggtgctgacagcttaacttgaaatctgtgggaggaaggatcctttttcactcattcaacaaatataaccattcaatgaatggtccatgccttgaggtgaggatcatcaaggtgtctctgtaaatagcctggatgcaatctgaggggagttgttttgacggtggtaggtattaagttgagggaggcagtgtggaattaaaaccagagaactgtttttgggtactggtaattgttaatatatgtgcctgtggatgttggaacttcttggctgggctgaaggaatcctttgaaagactgatttcggcagggcgcggtggctcacacctgtaatcccagcactttgggaggccgaggtgggcggatcacgaggtcaggagatcgaatcacgaggtcaggagatcgagactatcctggctaacaggatgaaaccccgtctctactaaaaatacaaaaaattagccgggcgtggtggcgggcgcctgtagtcccagctactcggggaggctgaggcaggagaatggcgtgaacccgggaggcagagcttgcagtgagctgagattgcgccactgcactccagcctgggccacagaggagactccatctccaaaaaaaaaaaaaaaaaaaaaaaaaagactgatttcatgtagtaaggatcccgtctatgaactctatgaatatgaggtaagaatgcatgaactaagccaacttagctgtattcttctggaaaatgggatgtttcttgataggctagattagtggttcttaaaagttttttggggtcacttatccttcagagaatcggatgaaagacactgggccctcaagttagaagatgagcataagcgcaatcacatgatttatatatatgattttaggaacttaaactgtaatgaaatagagccaatttatatttagatctcatttgaaaacctttcattttcattgttcgggtgtgtggatgttagtatgagtttaaggtgaaggagtctatgttagtatttgaacatgttgacaggatccatatttttaatttattctttttatcgtctgcaaacatttctgcagtattagtaaatgactctgtatttggtaaaaagggaagctaatgtcgcacaagtatctatggctttgttctttgtcagtatctttttgttctcaaactctgagaagcgtctttttttcagttttggattgggcctgaggtgatttgaagctcctgtcttggagtttaacttagttataacaaacactgagttaatcctatgcaggagacacaaagataattaatatatggtctctgtgcttgaagagacgctaattttctgtggttgaagagatgctgtgaattgtgtgatagtggcagctctcaaaaggacaaggaagagggaaacatattcctagaagctgaaattttattacccaattgcaaagactttttgtcactacttattcttaggaataaccataaagtgtttattttattctgtatggaactttgtactttaaaaaaatatgttttgtatcatctggtgtttttgtataaaggaactgttggtttgaaaagaaggtaaacatcatttatattccttaccttgttttgggatgtatctctacagtgagtttatgtaaaaaggtcttaatgtcatttttgggtatacatacatgtagaaagccctcctgatataaaatccagtagctatttgacagactacccattaatttattactggaacttaaaaataattactgtacttttaaaagaacaagaaattggtcaggtggggtggctcacgcctgtaatcctagcactttgggaggacgaggcggatggattgtcagagctcagaagatcgagaccagcctgggcaacacggtgaaaccccgtctctactaaaatacaaaaaattagctgcatgtgttggagtgcacctgtagtcccagctactcgggaagctgaggcacgagaattgcttgaaccaagaattgcttgaactgggagggggaagttgcagtgagctgaaatcatgccactgcactctagcctcggcatcagagcaacactctgtctcacaaaaaaaaaaaaaaaagcaagaaatgtaaaaaggtgttttaataggacagattataggattcagtgagataatggagaagttttaggaaaaattgtctgatagtcctttctttctattgacatggcccctgtataagaatgctatgtaaatttgtgaaaagtttaatattttctctaatttttaacgggtagtaggttcatggtgttatttttctcaaaacgtacatgtgatatgtgtgtgtagtgtgcatatatgtgcatgtatgtgtatacaatttctttatttttttaattgagattaggtctcgctatggttttttgtttttgtttttgtttttgagagagagtttcgctctcctcgcccaggctggagtacaatggcacaatcttgcctcactgcaacctctgcctcccaggttcaagtgattctctttcctcagcttcccaaatagctgggattacaggcgcgtgccaacacgccctgctgatttttgtatttttagttgagacagggtttccccacgttggccaggctggtcacgaactcctaacctcaagttctccagccgtctcggccttccaaagtgctgggattataggagtgagccactgcacctggcccaggtcttgctatgtagatcaatctggtcttgaactcctggcctcaagccatcctcctgtcttggcctcccagtttgctgggattacagatgtgagccagcatgcccagctctttttacctgcttaccaaatccaagattttctccaaaatgaactggaatagccttcttactgtgttaattttgccttggtggggaagcctaagtcttggaactaaattggggtggttatgacagttctctttttaaagctgatcagtatttcagtatttcacttgttgttgttttttttgttttgttttgttttttttgagatggagtcttgctctgtagcccagtttggaatgcagtggcaggattttgactcactgtagcctctgccacccggattcaagtgattctcctgcctcaatgtcctgagcagctgggtttacaggcacgcaccactacacctggctaatttttgtattgttagtagagacagggtttcaccatgttagccagtagccaagctgttctcatactcctgacctcaagtgatccacctgcctcagcctcccaaagtgctgggattacaggtgtgagccaccacgcctagccaaacccatctctttcattaaaccacctcattttggttcagaaacaagactgccatgtatgtatttaatgcttattatgtgccaagcactattccaggtactaagatacagtgatggacaaaacaagatcccttctcctctatctcaggacttattaatttgggcattttcattttccaatataggatcttttagtactggtataggattcctgaaggaattcctgaaatataattatttttctgctagagcaaatcaattttgttttttgttttttttttgagatggagtttcgctcttgtcgcccaggctggagtgcaatggcgcaatctcggctcactgcaacctccgactcccgggttcaagcgattctcctgcctcagcctcccaagtagctgggattacaggcattagccaccacgctaggctaatttttgtatttttagtagagacagggtttcaccaggttggccaggctggtctcgaactcctgacctcaggtgatcctccaggctcagcctcccaaagtgctaggattacaggcaggagccaccacgcccagaagagcaaaattcttctgttgacaaaaatttctttcctctgaggaagagacactgtgtgcctgtgttttatccaggaattccattggatagtttgtcctttgggatgtcagtggattaaatcctccattaagaatcaaagtacttggctgggtgcagtggctcatgcctgtaatccctgcactttgggaggctgaggcaggtggatcacctgaggtcaggagttggagaccaacctggccaacatgatgaaaccccatctctactaaaaatacaaaaaattatccaggtgttgtggcaggtgcctgtaatcccagctactctcgaaaaaacagaaacaaaaactctgacatgtagagtatgtagatgtagagaaaaaagtaaaatgattgttgaaaaaaatgtctattttttatcttctaaatagctttgtgtgtcagagatcagaacgctcattttacatgatatcaagaaccagaatgctagatagctagaatggttgttaacttcctagataaccattgtagaggaacacataaggtaaaacaaatgaataaaaattaaaaaaaaatgagatagccaaagatttgaagctctttacccattaacatgataatcatttcgactttgaatatttgtagaacaagagtcagaactcagaacaaagatctctgaggaaataaaaaaaaatcaagctgcctcctaatttctcatttagtctgtcattgggcattgtcaaactgtcaaactatatttagagattctggttttcatctggagacttagtgagttgtgtaatatcttgaatacacatataagatcttgccaggtggggtggctcatgtctgtaatcccagcactttgggaggatgaggtgggaggatcgctggagcccaggagttcaagaccagcctgggcaacatagcaagtccctggctctatttaaaaaaaaaaaaaaaaaaaaatcctcaatgtagaactttaaatttatccttacgtgttacatccagttgatttgagaaaatatgattctgaattttccatcaattggattggcagtccctttcagctttacagctttacatcatctacagatttgttaagtatgttctcttggtcttctaattcactgatggagtttttgaataggtcgggtccaaagatagagtcctatgaaacactgttggaaacttgtctctgtctgtctcttttttttttggagacagtgtcttgctctgtcgttcaggctggaatgcagtgggacggtctcagctcactacagcctctgcttcttggactcaaagagattctctcacctcagcctctcaagtatatgggactatatgcatgtgcgaccaagcccagataaatttttttttagagatatgttgacattttgcccaggttgggagacttgtctcttgattccattcagtattgtgtgggtttggataggccatctaattataaaatcattgggctggtcatggtggctcatgcctgtaatcccagcactttgggaggctgaggtgggcggatcacctgaggtcaggagtttgagaccagcctgaccaatatggagaaaccccatctctactaaaaacacaaaattagctgggcgtggtggtgcatgcctgtaatcccagctacttgggaggctgaggcaggagaatagcttgaacctgggaggcggaggttgcagtgagccaaaatcgtgtcatcgcactccagcctgggcaacaagagcgaaactccgtctcaaaaaaaaaaaaaaatcatctagctcacattttctccttgtcttcttcctattagaatttaagttcaatgagattagaactctctctctctctcattctctcatatatcccaagcatctaaaacagggattgaaacatagtaagtactcaataaatgtttttgaataaatgaatgaaggatagctgggcgtggtggctcatgcctgtaaccccagcactttgggaagccaaggtgggtggatcactggagctcaggagttcaagaccagcttgggcaacatggggaaaacccatctctacaaaatatggaagaattagccgggcatgacagcacactcctgttgccccagctacttggagggctgaagtgggaggatcgcttgagcctgggaagcagagattgcagtgagccgagatcaagccactgccctccagcccgggtgacagagtgagaccctgtctcaggaataaggatagatatgaagaattcgtcagatgccttgttgaaaacatcatacattgtctacatggaattcctccatattgtaaaatgaatctaatttataccaacaacgtttggcttttttgcagaaaaggaagcaaatgagctgatggaagatctgtttgaaactgtgagtaatgatcctcaagtgagaacatgggattgtaagttggttctccaacaaaatgtgtcctttgatctctgtgatgctccttctagaagagggactgaaccaattctccttttagtctacctgggaaagaatataatgacaaaagaaatttgctaactgctagactcttgattatccacatgtaggttattcttactaaaattttccttgaagctttttttttttttttttgaggcaaagtcttgctctgtcacccaggctctggagaatacagtggtgaaatctcagctcacagcagcctcgacctccagggctcaaaacaattctctcatctaagcctcctgagtagctgggactacaggcacacacctacaggcccggctaattattttatttttttgtagagacagggtcttgccatgttctggaactcataggctcaagtaatcttcctgcctcaacctcccaaagtgctggaattacaggtgtgagccagcacatcttgccccttgaaaacttttgatggcttcccctactgtcatttggtgtgtccttaaagattgccaactagttttaaagtattttgcacacaaataattaccttttccataaatttgtctaaaaagatatttctgtttaagaaattgatcattttgagttatcctagctctgtgcttactgatacaagttgactggttgagcaacttctttcctggcataatagtcattccatatgtgggtttgtaggagtcctgaagtgagaaaggttctgatgtaggctctttctgggtgccagcattattaaagtattgtttatagttttcacttttccttcccaacactggagcaacattcaaaagcccattccccaggaaaaccctccctttcctttgcccacagttccaagatgagatgggattctccaacatggaagatgatggcccagaagaggaggagcgtgtggctgagcctcaagctaactttaacacccctcaagctctacggtaggctagttgaagaccttgagatttggaatagaggaagagtttatttctgaaaaggttttcagaagttgcagttaacaatttttcatccccagccagcttctgttactgatgtaaggatgcagagtcctgtcaggagttaggtgtcaagtgaagtctccttgttatggggcagtgcagctgtaggccaagctgtatctgtttgggaagggagaaaaaacagtagctggcatccatatccacttctccgggtgagtggtgctggagaggtatgtaggactcaatgtggccagccacacaaactaccctatattgtaatatccagtctgtcccttttgttctttttatgtgccattaatatctgctaaatgtgactgaaaatttgttagtcacctaggcattagtggagcaaaccctgaagcacctgcagtaaggagtctgaaacatacgtgctgacctttttgcctaaagttggcacttgtgttacagcatccagaaagtagaggctttaattttttcctcattttgtggtggatttgcatctgcactttattctgttgtagcagcatataatcattaggtcgatggcgagaggtcaggatgcagtttgtgccataagtggaacaaagcaaagagaatagtccctgtaattagtcctgtgtttgaacttaacagcactactaagcagagagcttgggttccatctgaaagctagacctttagggattttccaatttagtgaaaaaagataagataggccaaccaatgtcttaaaaactagaactactagtcattctccattacaacaaatatcacaatacaactacatcaaaaatctcaagattgctaagtcagtatttgacccattattttaatttatagttcatagaacaaaattctggtatagcagaatggaaccattcatcctgggaacgtataataggatctgattaataaatattttggttttgctgatcaactctttataacttcttaaaatttggaaaatatagaactaatttaaaattcctgttagaatccagttaccttctggtattcaatggaatatagtcatatatcatctcatggtcataccctctgtgaaatctatcattaaacgattcatcattgtgtaaacatcgtagaatgtacttacataaacctaaatggtttagcctactgcatacctattgctcccaggctacaaaacctgtacagtgtgttactgtactgtactgaatactgtaggcagttgtaacacaatggtaagtacatatgtatgtaaacatagaaaaggtacagtaatcttatggagccacctctgactatgtggttcgttattgactgaaacattctgtggcgcatgactgtacttgggcagcttctgcttctctttcgattgcaaatacaaacctgtttttgttttaatctttgactaaataaaaatccctctgtaagtccatagagagtaagcacatcttaaaacacaataaggaagagagaggagaaaaagacagtcaaaacaaaaactctggggcttcccttatcaattacctaaataatccttgttaaaactaagtgcaggctatgtttccattttctacttttttatgcttcttctcttctgttccttcagtggtggtagcgcggatgttcaaattttcagttctcagtaaagattgtatagacagtcccacggtcttcaggtttttactctgtgctacccaaacctacagtaaatactataaaagaaaacttattcaaacgtaatctttatctgcaaaaactattgaaaaacgttaccatttaactattgctgtaatatagggggttccttgaaatatgataacctgcttgttatagctacttcagcagatcttatcctgttgcatagggtatcagcatatgcttaatcatttaggtatattattctccctttatttctttctatgtaaacatagaaaaggtatagtaatcatacatagaactgacatgctaggtattggaatttttgcttcagccctgcaaacaatctttcaggagggtatggatgggaagttagggttaggaaccttggaagaggaatttaaagggctaaaagaagatagccttcatggataatattttaactaacttctccgttctgttcatttgaactaccatgtacttcagttattttggtatatccttttcctgcttcatgctagaaagtctttgacttgttaagaaagcagggcagtgcagcctgagtagataggataatgggacaagctggacctgggatgggagtaacatcccagggagtaacaagtaatgagagaagaaatgagaatgatgagttcccaccagctccttggctgctttcttacccatatatttctctgtccctagttttttgtttaattttttcttcatttgtatattatttggaagaggaattgtagaggaatgggatggggtgtaatacagaatcatttgatgcatgctaactactttgggaaaagatttgtgtaaggctgggagtttgactgttggctaaagtgaaaaggggggattagtagggaatgaaaattgttcaggctctttgctcatcattgcaaagaattggatgtgttgtggacctaggaaaacactcaaattcagtcatccccgtttgggataggtttgaggaactactggccaacctactaaatgaacaacatcagatagcgaaggaactatttgaacagctgaagatgaagaaaccttcagccaaacagcagaaggaggtagagaaggttaaaccccagtgtaaggaagttcatcagaccctgattctggacccagcacaaaggaagagactccagcagcagatgcagcaggtaacactttccttggtcatattaatattgaattataccaaggcctaactctgaggctttggtataatctaaaattagcagctttgtaaatgtcagagatagttaccttactacgtattaaaaccgtagtatcttcacatcagttaggagcttgagaagtcatcatgttcatgtcctgtggctcagggaagacagcacataaggaccctaatggtattcggaattacagatttcaaagagtcctcagtaatctattctgaaatttaaccttcactgtgacaagtagttttttttcccttttcccttttcttttttcttttttttttgagacgtagtctcgctctgtcacccaggctggagtgcagtggctcaatctcagctcactgcaagctctgcctcccgggttcacgccattctcctgcctcagcctcccgagtagctgtgactacagggactcgccaccacacccagctaattttttgtatttttagtagagacagggttcactgtgttagccaggatggtctcgatctcctaacctcgtgatccacccgcctcggcctcccagagtgctgggattacacgcgtgagtcactgcgcccggccttttccttttctaatctcagttcctcctctgtttagaggttaaacttcctctggttctgtcattttgttcaagggaacatgtctgagaaatttatgccaagatcctacgttgttctcacactctttgcagaaagcaaaatttgtgtcataaagttgcaaacatcttagttaatgactctctggtggctgggtgcagtggctcacacatgtaatcccagcactttgggaggctgaggtgggaggattgcttgagcaggggagttcaaaagcagcctggacaacatagtgagactctgtctctacaaaaaataaaaataaggctgggcacagtggctcacacctgtaatcccagcactttgggaggccaaggcgggtgaatcatgaggtcaggagtttgaggcaagcctggccaacatggtgaaaccccgtctctacgaaaacaaaaaattagctgggtgtggcggcgggcacctgtaatcccagctactcgggaggttgaggcaagagaatcacttgaacctgggaggcagaggttacagtgagccgagatcacgccattgcactccagcccaaaagtcagtgcgagactctgtctaaaaataataataataataataataaaataaattagccaggcattgtggtcacagctacttgggaggctgaggtgggaagattgcttgagcacaggtggttgagagggcattgagtcatggttgcaccactgcactccaagctgtgtgacagagcaagaccctgtctccagggggaaaaaaaaatatctctgggctcctgaaatggcagtgtcataacatatcactgcattattttctttctctccccagcatgttcagctcttgacacaaatccaccttcttgccacctgcaaccccaatctcaatccggaggccagtagcaccaggatatgtcttgtaagtttccaaattgccgtaattctatagactagaatataaaattagcttggcaggttatttctcacagttattctctcaggtatttttgattgctgtggcttcctatgtttgctgagtgaacataagccactgattcacatgaaaggacaaagagtgtattcaattttttcttttcttttttgagacagggtcttgctctttcacccaggatggagtgcggtggaacaatttcagttcactgcaacccctgcctcccgggttcaagtgattctcctgcctcagcctcccaagtagctgggactacaggcgggcaccaccacgggtaattttttttgtatttttagtagagacagggttttgccatgttggccaggctggtctcgaattcctgacttcaagtgatctgcccacctctacctcccaaagtactgggattacagccatgagccactgcgcctggcctgtccttctgatatttttattgggtcctcctcctcatctttagattcaccctgacttcttaggtttttggtaccgctattcatttcatagatgttgaggctgggcatagtggctcacacctgtaattccagcactttgggaggctgaggtgataggatcacttgagcccagtggtcaagaacagcctgggcaacatagtaagacccggtctgtgttttttttgttttgttttgttttaatttaaataatgaagtaaatatacatgtagatgttgaattcattatccattcatgaagctcaatattagtgttttatgtgtagagctagttttgctcatgacgttttgaggtattttgagctttttttttttttttttttttttttgagacggagtctcgctctgtcgcccaggctggagtgcagtggcgggatctcggctcactgcaagctccgcctcccgggttcacgccattctcttgcctcagcctcccaagtagctgggactacaggcacccgccactatgcccggctaattttttgtatttttagtagagacggggtttcaccgttttagccgggatggtctcgatctcctgacctcgtgatccgcccacctcggcctcccaaagtgctgggattacaggcgtgagccaccgcgcccggcctattttgagattttaaatttgaaatttggccaggtatggtggctcatgcctgtagtcccagcactttggtaggtcaaggtgggaggattgcttgagcccaggagtttgagaccagcctgggcaacatagtaagaccccatccctaccaaaaaaataaaaaataaaaaaattagctggggatggtgccgagtgcctgtagtcccagcaacttgggagactgaggtaggaggatcacttgagcctgggacgttgagactgtagggagccgtgcttatatatcactccagcctgggtgacagagtgagaacctgtctcacaaaaacaaaaccatactttacctcataaaaattgcctcaaacttttggacaggtaatgataatactctcagcttcttcagtaagtcttctttggattttgaagagtacatttgctagtattctaaaacttccttggtgatcaacaggatgtcttcatctcttactgtattcagaggaggatgaggagtacttggttgtaggcattattctgagaccaaaagacaaaacaattttaaaagtaatggtcctggtcgggtgaggtgactcatccctgtaatcccagcactatgagaggccgaggcaggcggattgtgagcccaggagttcgagatcagcctggccaagatgggaaaacgctgtctctgcaaaaaatacaaaaatcagctaggtttggaggtgtatgcctatagtcccagcttctcaggaggcagtgggaggatggcttgagcctgggagggggagtttgcagtgagctgagatcatgccactgcagtccagcctgagcggcagagtgagaccatgtctcaaaataaattaattaattaaattaaagtaatagtccccattcttgagactcttaattctagctcgggagctagaccatgtattccttagtgagaaacagtttaaaaataaaacaagaatataatccctgaatatctgagaactcaggcataatcttaacagtagtttattgtgaaagactttatgattatttttacctgtttttatcctgtagtaggaaggtcagcttctcatttagattctgaaggctattggtattaattgtctggaattgtcttagatcttccttgtgtcgtgttttcccagaaagagctgggaacctttgctcaaagctccatcgcccttcaccatcagtacaaccccaagtttcagaccctgttccaaccctgtaacttgatgggagctatgcagctgattgaagacttcagcacacatgtcagcattgactgcagccctcataaaactgtcaagaagactggtaggagacagatgtgtcagctttaagtttttacttgcggtgagaggtggtgggaatcttatcccatagataacttcctaggatacttgcctaggaatggaggacacaggacatttgtaatttcttccttctctcttttatcctccctttgtactcattatccaagttctagaattacatgataatctccgggcctgggtaaggcatggaggcagtggacagtataggaatatgggaggtagagatctgaggctcagtgctaagaattggactacagcaatatgaggggtaagtattaggaatcagatcaagataaactggggcctggtaaagatgaaagtcaggtggtaaagttcggtcatgtttagctttttattctcttcattaagatcaactaactttatttaccataatgattgtagcataggtgatatctccattctgaatgaaatgttgacttgcaagttaggcgtaaattagagattgtacatttgccgtgttcagtattttaaagaaatttgccggtttagattctaccttgcattggtttagtattttttgagaaaatatttgctatttacttaagccaaatatttacttctgatttgtttgctgacttagcaaattagttgtggtttgttctggatttgggtttgtctttggattctattttaaatccctaagtcttatcattacattgaatgtagttgaatttaagtgtactatatcatagacacagatcccaaactactttaatagctatattatatgaaatggtaatgaaaacgtgatttaataccaaattatagtattatcttacacatctagtgtcctgtgtttttcttctggagatataaaaatgacacttatggaaggagaaatatggatatagtagttttgtctctagaaatgcagaggtgcctaaaattgagaggctgagagagggagacagaaatgaatgagactgaattgtctcattccttttatggttcttttgttcccaacctcaggaggaatctgggagaacttaatgaaagttaagaaagaatgaaataaaagtaaaatttggaataccaggtttgtgagggagattaaagaagttggaatcttttttcttttttttttttttaagatggagtctcgctctgtcacctaggctggagtgcagtggggtgatctcggctcactgcaacctccgcctcccaggttcaaacaattctcctgcctcagcctcccaagtagctggaattacaggtgcgtgccaccatgcctggctaatttttacatttttggtagagatggggtttcactatgttggccaggctggtcttgaactcctgacctcaggtgatccacctgcctcggcctcccaaagtgctgggattacaggcgtgagccagcacgcctggcctggaatcttatcctggaagaaaaaagcattgttgaaggtctgttatccttcagagatttaaaggggaaaggaggtaaaacatttttgagcatacactatgtgacaggtattactaggtactttttaagtgtttgttttactttgtgaataaagtgttacacgtaagaaagagtaagagaggccgggcgccgtggcttacgcctgtaatccaacactttaggaggccgaggctgtcggatgacaaggtcaggagatcaagaccatcctgtctacagtgaaaccccgtctctactaaaaatacaaaaaatcagccaggcgtggtggcaggcgcctgtagtcccagctactcaggaggctgaggcaggagaatggcctgaacccgggaggcggagcttgcagtgagccaagattgcgccacgcactccagtctgggcgacagagccagactccgtctaaaaaaaaaaaaaaaaaaagtcaacttttattgccagtgaatgggactccctttagacctaatgttagttgaggaaagactgtggaaactctttggggagtggtaggcagatgggagggaatcaagttagataaggacagctctacctaaatgcaaaaatgcattcacaggctttttgaagccctcttttttcctagaagttgatttatcagagatttattttcttatagccaatgaatttccctgtttgccaaagcaagtggcttggatcctggccacaagcaaggttttcatgtatccagagttacttccagtgtgttccctgaaggcaaagaatccccaggataagatcctcttcaccaaggctgaggacaagtaagtgtttactctgggggatcaaatatcccaaggagaagatgtagttcctttgaggagtttaggggaagtaagacttgtataataagacatggacacaaaaggaaaagcagtatagatgagcagagtcctctagaacgtgcttgttctagcagtgccaaatactgctttttggggggatgttacacacatttttaaaatgttttagactggacatggcggctcccacctgtaatcccagcactttgaaaggccaaggcaggaggttggcttttctaatgttattatttatttagagacaggatcttactctgtcacccaggctggagtacagtgttgcaatcacagctcactgcagccttgaactcctgggatcaagtgatcctcctgcctcagcctccatggagtagctgggaccacaagcgtgtgccaccatacatggctgattttttttgtacaggtgagggtatctctgtgttgcccaggctgctcttgaattcctgacctcaaatgatcctcccactcctggcctcccaaagtgctgggactataggcataagccaccacacccagctagattatgaacatttttatggccctttgtgtgtattgccacactgttaacagcaaatatgtatatatgtaaccatgattatatatgttatgttagagggtagtattggtgccagtttaatttgtctgacggggtacctattattcattttatatttgttttattagaatcattctccttcccatgtattctctttgaacttcctttgtgttgttaatatacagctcatcatgatctgacatttattgatgatttatgactagtttctcttgctcctacttaattgtgaactatttgattcttattcatagtacttaatcactactcactaaatacctgaaattttctactgagtagtcaccaacttgtagtagtcactacaagaattagttgtagaaaaagtagattggccagccatggtggctcacacctgtaatgacgacactttgggaggccgaggcaggaggatcacttgaggccagaagttcaagatcagcctaggcaacaaagtgagaactggtctctacaaataatgaaataaaacattagttaggcatggtagcaaacgtttatagccacagatactcaggaggctgaagtgcgggaatcgattgaacccaggcattcaagactgcagtgcactgtaatcatgccactgctctccagcctggacaacagagcaaaaccctgtctgaaaaaaatgaaaaagtagattgggccacacgccatgggctcatgcctgtaatctcagcactttgggaggctgagactggagaatcgcttcagcttaggaagtagcagctgcagtgggctgcgatcacgccactgcactccagcccaggtgacagagtgagaccttgttttaagaacaagtaagaaaaagtagattgtaaaatgtgttagtctggggaggccctttagaaggaaggactgtgaagtgagatttagtgttattgctcctttctcagtttgttagctttaggactgaagcattttgaagggactgagtttcttaaccctctaatcagcaagtaccttctaacctgcaagactgcccgccaactgacagtgagaatcaagaacctcaacatgaacagagctcctgacaacatcattaaagtgagtgtttcctgcatgcactatccaggcacctcaccaacacatatctgttcttttctcttgttattctcaaagaaaagaagaaccttcttttatctaaagctaatttctcctacttatatactagattaattcccctgttgccttttcagggacattgattcattcattacgttcctctggagtatcttcatcctcttaaaagattccacaaatccatgtttccctgtaataattctctttcttgaactttctagaaatgatatgcagtattccacttacatgctttgggtttttgttttgttttgtttttttggtcagacataatcttgcactgtcacccaggctggagtgcaggagtatagtggcatgatcttggctcactgcagcttccgcctcccgggttcaagtgattctcctgcctcagcctcccaaatagctgagattacaggcgtgcccaccacgctcagctaattttttgtatttttagtagatacgggtttcaccatgttggccaggctggtcttgaacttctgacctcaagtgatccaccagttttggcttcccagaggctaggattgcaggcataagccaccgtgcccagcctatatactttttctcaattttgtgtttgtatgtatgcatgtatgtgtgtgtgtgtgtgtgtgtgtgtttgtgtgtgtctgtgtctgtatgtatgtatgtatgtatgtatgtatgtattgagatggagtttcgctcttgtcgcccaggcccagcctatatactttttctcaactctttttacttattgattgattgattgagatggagtctcgctcttgacccccaggctggagtgcaatggtgcgatcttggctgactgcaacctctgcctcctgggttcaagtgattctcctgcctcagcctcccttgtagctgggattacaggcccctgccaccatgcccagctgatttttgtatttagtagagtcggggtttcaccatgttggccaggctggtctcgaactcctgacctcaggtgatccatctgcctcggcctccctaagtgctgggattacaaatgtgagccattgcccccagccttcttttttatttagatatttatttatgtttttttttttttttagagacaggttctcactctgtcatcctggctggagtgcatgggcacaatcataggtcactgcaacctcaaattcctgggtgatccttccacttcagccttccaagtagcttggactacaggtgcatgccaccaaggctagccgattattttattttgtgtgaagacagggtgtcattttgtttcccaggctggtcttgaagtcctgacctcaagcagtcctcttgcctcagctcggcctcccagagtgttgggattacaggcgtgagccatgatgcccagcctttggtttcattgtgtttttgtatttttcttgagacaaggtcttactctcctgcctaggctggagtacagtggtatagtcatagctcactgcagccttgaactcctaggctcaagcattcttccaacgtcagcctcccaaggagctgggattatatgcattagccactgtgcttggccattaaatttatttatttatttattttattttatttttttgagacagaatctgtctctgtcacccaggctggagtgcagtggcacaattttagctcactgcaacctccacctaccgggttcaagcaattttcatgccttagcctcctaagtagctgggactacaggcatgcgccaccacacctggctaatttttatatttttagtagaaacataatttcaccatgttggtcagtctgatcttgaactcctgatctcaggtgatctgcccacctcggcctcccaaagtgctggaattataggcgtgagcctctgtgcctggcaaaaaactttttttttttagggatggggtgtccctatattgcccaggctggtcttcaatttttggccttaggcaattctcctgtctcagcctctaattggtactgcctggtgtattggatttaggccttacttattaaccataaaccacggaagccgaagatttacctctctcctcactcccttactcccaccacaaacatgcacattttctgctctccaaactcctcactagtagttatggtagaattttggttagattgtattcagggtttacattgtaagattttaaggactgttggctgggcgcggtggctcacgcctgtaatcccagcactttgggaggccaaggcaggtggataacgaggtcaggaaatcgagaccatcctggctaacatggtgaaaccccagctctactaaaaatacaaaaaactggctgggcgtggtggcgggcgcctgtagtcccagctactcgggaggctgaggcaggagaatggtgtgaacccgggaggtggagcttgcagtgagccgagatcgcgccactgcactccagtcttgccagagcaagactccgtctcaaaaaaaaaaaatagattttaaggactgtataaatgctcttcacagctcagctatgttactgtgttaccttgcctttcctgctgaacattttgtttcccagatcatcttctttcagtgtgttcaggtattctagatattctgtcactttcatcttgaagaaattgctccctgagccctctgacattattccactttaagcgtgttgctctccatgttgctgcactgatgtcttcttgggctttttcttcaccatcatcccaggaattccttttgcctcatactgtgttagatcctcttatttcctgaattccacatctttgcttttgcattactttttttttttttttttttttttttgagacacagagtcttgctctgtcccccaggctggatctcggctcactgcaacctgcaaccttggtcttggtcttgaactcctgacctcaggggatccacccacctcagcctcccagagtgcggggattacaggcgtgagacaccacgcctggccttgttttttgttttgttttgcttttttttgagaccgagtctcgctttgttgcccaggctggagtccaaaggcgcgatgatcttggctcactgcaacgtccgcctcccgggttcaagcaattctcctgcctcagcctcccgagtagctgggattataggcacatgccactacgcctggctaattttttgtatttttagtagagacagggtttcaccatgttagccaggatggttttgatctcctgacctcttgatccacccgtttcggtctcccaaagtgctgggattacaggcgtgagtattacttctttactttagtggaacacattctagtagcttttttttaaaaaaaatttttttctgaattttaaaaaattgaggtgggggggtctcagttttttgcccaggctggtctcagactcctgggttcaagtgatcctcctgcttcagcatcccaaagtgctgagattataggcatgagccaccctgcatggccccattccagtagcatcctgagggagagtgcttgggaagggaattttcacatttaaaccatctccggggccgggcgcagtggctcacgcctgtaatcccagcactttgggaggctgaggcgggtggatcacgaggtcgggaaatcgagaccatcctggctaatgtggtgaaaccccgtctctactaaaagtacaaaaaaattagccgggtgtggtggcgggcgtctgtagtcccaggtactctggaggctgaggcaggagaatggcgtgaacctgggaggtggagcttgcagtgagccgagatctcgccactacactccagcctgggtgacagagcgagactccgtattaaaaaaaaaaaaaaaaaaatctccattcatggtcttttgattgtatcgatgtcagtttcctcgtttttgtttttgttttattttttttctttttttgagacagagtctcactgttgctcactgcagcctctgcctcctgggttcaagcgattctcctgcctcagcctcctgagtagctgggattagccaccacacccagctaatttttgtatttttagtagagatggggttttgccatgttggccaggtgatctcgaacccctgacctcaagtgatctgcccaccttggcctcccatagtgctgggattacaggcatgagccaccacatcctccatgtctggccagtttcctggtagtaatattgtactgtgtaccttgtttatatgtatagctcttgtttctatgtaacataaaaacattatattgggagaaactggttgaagggtacatgggacctcttggtactattttttgcaatttcctatgaatataattatttcaaaataaaaggaaaaaataatactctcctctgtcactgtatctagaattctagataggaaataatttttttaagaagcttttaagggcctcacttcattttcttctaactcctagtgtggtgttaagaaatttcatgccatttaactttttttttttttttccgagacagggtcccaccctgttgcccagtttggagcgtggctaaatcatggctcactggtgtctccaacccggtgtgcaccactatgcccagctaattttttttttttttttttttaagacatggtctcgttatgttggccaggctggtctcaaactcctggcctcaagtgctcgtcctgtcttggcctcccaaagtaatgggattataggcatgagccatggccccatttaactcttgagtctttgtgtaacacctgtttttctcaacctctgacagcatgcaggatttttcctttggcttcaatattttgaaaatgcatgataatatgccttagtatttgtctatttttatccatggttttttaaaaagtactttctttttgtttttgtttgtttgtttgttttgagacagagtctcgctccattgcccaggctggagtgcaatggcgtgatcttggctcactggaacctctgcctcccaggttcaagcaattgtcctgtttcagcgtcccgaggagctgggactacaggcgctcaccaccacaccctgctaatttttgtatttttagtagagacggggtttcaccttgttggtcaggctggtctcaaactcctgacctcgtgacccacccacctcagcctcccagagtgctgggattacaggtgtgggccaccatgcctggcgtatccatggttttaaggcacacgtgataaaccttattcttctgcagaaataatttttttttttttttttgagatggagtctcactctgttgccaggctggagtgcagtggcgtgatgtcggcccactgcactctccacctcctgggttcaagtgattctcgtgcctcagcctcccgagtagctgagattacaggcacgcgccaccacacttagctaatttttgtatttttagtagagatggggtttcaccatgttggccaggatggtcttgatctcctgaccttgtgatctgcctgcctcggcctcccaaagtgctgggattacaggcataagccaccacgcctggccagaagtaatttgtgtttaagttttagttttgtgtcatttttcgtgcacacctttgtacttttgttgggggatggggcggggtgtcggggttggagtcttgctctgttgcccaggctggagtgcagtggtgcagtcttggctcactgcaacctcttaattcctcagttcaagtgattctcctgcctcagcctgccaagtagctaggatcacaggcgtgcaccaccacacccagctaatttttttttgtactttattagagacagggtttcgccatgttggccaggctggtcatgaactcctgacctccagtgatccatcctcctcgttctcccaaagtgctggcattacaggcatgagccaccatgcccagccctttgtacattttttaatgtaggatgccatttgtccacttgactctcccactagtctgtaagctccatgagagcaggaattgcttcccttatgtgtgtgcttagcttttagcacagtgcctaggatatagaaaacatcttatgttcatcatgttggatgaacagatgcttattgtcatggtttaagttcagttcttatcttctttttttttttttgagatggagtctcaccctgttaccaacgctggagtgcagtggcatgatcttggctcactgcaatctccaccctaccacccccactgccaggttcaagcgattcttttgccccagcctcccaagtaactgggattacaggcacccaccaccacacccagctaatttttgtatttttagtagagatggagtttcaccatgttggccaggctggtctcaaactctcaatctcaagtgatctgcccgcctcagcctcacaaagtgctgggtttacagatgtgagccaccaaggccagcctatttactcttaaaactgaactgcctcggtctttttttttttccttcccttctgatgcccttcacaccatcatttgcttaaagtctttgatgtgtccattttatagattacgatgctgtctttgcagctgttgagcaggaacaaatcttacataagattgctcttagcatctgcttccttttctctctgtgacctaaactctccccttcctggcaaccagaatggagatcatcagttagaaaatattgaatagggctgggcgcggtggctgacgcctgtaatcctagcactttgggaggccgaggcgggtggatcacgaggtcaggagatcgagaccatcctggctaacacagtgaaaccctgtctctactaaaaatacaaaaaaatcagccgggtgtggtggcgggcacctgtagtcccagctactccggaggctgaggcaggagaatggcgtgaacctgggaggtggagcttgcagtgagcggagatcgcgccattgcactccatcctgggcgacagagcaagactccgtctcaaaaagaaaatactgaataactataaaatctttaaatagagattagtttaatttgaaatgtacaagtattcagcatatgctattcgtatatgtgtgttcatggatgtttgtgtatgtggtcttgtgtgtgtgtgtgtgtgtgtgtgtgtgtgtgtgtttctcttgatccaccaccaccccattcaccagcctgacagaagacagtgtttccagaaggaatgtaattcatgcgcatttttttcatgttaagttttataagaagaccaaacagctgccagtcctaggaaaatgctgtgaagagatccagccacatcagtggaagccacctatagagagagaagaacaccggctcccattctggttaaaggtacagccctcttcctcgaagtctgtaggaggcagaaggtcactgaaagttctgagagaatatcaaggacttccttaatcgtctaatgctttagttgtagaactaggacttcaggaatcttcctgattcacctttcttcccttacttttctgcccttctccgggtgattctacaacattttcaaaataatgggtaaaatggtaatttgctaaaggaaattcagagaagagtttctaaagtgtataattggactgtggtctttgtagaaatttcatatgcagagtcccttggaaagatgccttgagcttgtctcaggtccctaaacttagaaagtcctattctttttcccaaattctgacatgtgctggatcagagtgttctcatttccaataggccagtctgccatccatccaggaagaactgcggcacatggctgatggtgctagagaggtaggaaatatgactggaaccactgagatcaactcagatcaaggcctagaaaaagacaactcagagttggggagtgaaactcggtacccactgctattgcctaagggtgtagtcctgaaactgaagccagttgccgaccgtttccccaagaaggcttggagacagaagcgttcatcagtcctgaaacccctccttatccaacccagcccctctctccagcccagcttcaaccctgggaaaacaccagcccaatcaactcattcagaagcccctccgagcaaaatggtgctccggattcctcacccaatacagccagccactgttttacagacagttccaggtgtccctccactgggggtcagtggaggtgagagttttgagtctcctgcagcactgcctgctatgccccctgaggccaggacaagcttccctctgtctgagtcccagactttgctctcttctgcccctgtgcccaaggtaatgatgccctcccctgcctcttccatgtttcgaaagccatatgtgagacggagaccctcaaaaagaaggggagccagggcctttcgctgtatcaaacctgcccctgttatccaccctgcatctgttatcttcactgttcctgctaccactgtgaagattgtgagccttggcggtggctgtaacatgatccagcctgtcaatgcggctgtggcccagagtccccagactattcccatcgccaccctcttggttaaccctacttccttcccctgtccattgaaccagccccttgtggcctcctctgtctcacccttaattgtttctggcaattctgtgaatcttcctataccatccacccctgaagataaggcccacatgaatgtggacattgcttgtgctgtggctgatggggaaaatgcctttcagggcctagaacccaaattagagccccaggaactatctcctctctctgctactgttttccccaaagtggaacatagcccagggcctccaccagtcgataaacagtgccaagaaggattgtcagagaacagtgcctatcgctggaccgttgtgaaaacagaggagggaaggcaagctctggagccgctccctcagggcatccaggagtctctaaacaactcttcccctggggatttagaggaagttgtcaagatggaacctgaagatgctacagaggaaatcagtggatttctttgagctaggagaataagagtctggagactgggagccttcacttcggcctccgattggtggcgcatagggtgtaaccaataggaaacccctaaagggtacttaaaccccagattttgcaactggggctcttgagcagcttgctttagcctgctcccactctgtggaatatacttttgcttcaataaatctgtgcttttattgcttcattgtttca

SEQ ID NO: 15001 - DNA, 2927 bp, Homo sapiens
cgcgtacgggatggctggctcgcaggacggccgaaggtggtggttggtgggagcagccagcgacgagcccgtagacactcgtacgcgtgcgggctgacgtgcgcgctacatggccggagtcgggcgaagcgggggaccgtggggaagaacgcgaggagggaggagtgggaggttgggggtgtcgctaggcgcccttagctccctccctctggaggagctgccgcggccactctgctgccgccgctgccgccgccattttgggttcgctttgcgaggggaaacgatcccagtgtcggttgcgggatccgcctcctctcagtttgcccctttagccctccacctttcccttctcctctctcgcatttccgccagtcggcttacccgctggccgcctcctgacaagcgggagggatccgcggtggacccagggaagcggaggagcctggcggccaccccctcttcctcacttccctgtactctcatcgctctcggcctccgacacgaaaaggaagcaaatgagctgatggaagatctgtttgaaactttccaagatgagatgggattctccaacatggaagatgatggcccagaagaggaggagcgtgtggctgagcctcaagctaactttaacacccctcaagctctacggtttgaggaactactggccaacctactaaatgaacaacatcagatagcgaaggaactatttgaacagctgaagatgaagaaaccttcagccaaacagcagaaggaggtagagaaggttaaaccccagtgtaaggaagttcatcagaccctgattctggacccagcacaaaggaagagactccagcagcagatgcagcagcatgttcagctcttgacacaaatccaccttcttgccacctgcaaccccaatctcaatccggaggccagtagcaccaggatatgtcttaaagagctgggaacctttgctcaaagctccatcgcccttcaccatcagtacaaccccaagtttcagaccctgttccaaccctgtaacttgatgggagctatgcagctgattgaagacttcagcacacatgtcagcattgactgcagccctcataaaactgtcaagaagactgccaatgaatttccctgtttgccaaagcaagtggcttggatcctggccacaagcaaggttttcatgtatccagagttacttccagtgtgttccctgaaggcaaagaatccccaggataagatcctcttcaccaaggctgaggacaacaagtaccttctaacctgcaagactgcccgccaactgacagtgagaatcaagaacctcaacatgaacagagctcctgacaacatcattaaattttataagaagaccaaacagctgccagtcctaggaaaatgctgtgaagagatccagccacatcagtggaagccacctatagagagagaagaacaccggctcccattctggttaaaggccagtctgccatccatccaggaagaactgcggcacatggctgatggtgctagagaggtaggaaatatgactggaaccactgagatcaactcagatcaaggcctagaaaaagacaactcagagttggggagtgaaactcggtacccactgctattgcctaagggtgtagtcctgaaactgaagccagttgccgaccgtttccccaagaaggcttggagacagaagcgttcatcagtcctgaaacccctccttatccaacccagcccctctctccagcccagcttcaaccctgggaaaacaccagcccaatcaactcattcagaagcccctccgagcaaaatggtgctccggattcctcacccaatacagccagccactgttttacagacagttccaggtgtccctccactgggggtcagtggaggtgagagttttgagtctcctgcagcactgcctgctatgccccctgaggccaggacaagcttccctctgtctgagtcccagactttgctctcttctgcccctgtgcccaaggtaatgatgccctcccctgcctcttccatgtttcgaaagccatatgtgagacggagaccctcaaaaagaaggggagccagggcctttcgctgtatcaaacctgcccctgttatccaccctgcatctgttatcttcactgttcctgctaccactgtgaagattgtgagccttggcggtggctgtaacatgatccagcctgtcaatgcggctgtggcccagagtccccagactattcccatcgccaccctcttggttaaccctacttccttcccctgtccattgaaccagccccttgtggcctcctctgtctcacccttaattgtttctggcaattctgtgaatcttcctataccatccacccctgaagataaggcccacatgaatgtggacattgcttgtgctgtggctgatggggaaaatgcctttcagggcctagaacccaaattagagccccaggaactatctcctctctctgctactgttttccccaaagtggaacatagcccagggcctccaccagtcgataaacagtgccaagaaggattgtcagagaacagtgcctatcgctggaccgttgtgaaaacagaggagggaaggcaagctctggagccgctccctcagggcatccaggagtctctaaacaactcttcccctggggatttagaggaagttgtcaagatggaacctgaagatgctacagaggaaatcagtggatttctttgagctaggagaataagagtctggagactgggagccttcacttcggcctccgattggtggcgcatagggtgtaaccaataggaaacccctaaagggtacttaaaccccagattttgcaactggggctcttgagcagcttgctttagcctgctcccactctgtggaatatacttttgcttcaataaatctgtgcttttattgcttcattgtttca

SEQ ID NO: 15002 - DNA, 29312 bp, Homo sapiens
gcggcggctgctttggcggcggttggtggccgtgcgggcggggagggagggggaggagagaagaggaggtggagaaggcttgggctcgcgccgctgaaggtacgcgtgagggcctgcgctggagccggcttgacagggtctgagggggagtggagaactgggcgaggaggttcccgtgggtgagcgcgtacgggatggctggctcgcaggacggccgaaggtggtggttggtgggagcagccagcgacgagcccgtagacactcgtacgcgtgcgggctgacgtgcgcgctacatggccggagtcgggcgaagcgggggaccgtggggaagaacgcgaggagggaggagtgggaggttgggggtgtcgctaggcgcccttagctccctccctctggaggagctgccgcggccactctgctgccgccgctgccgccgccattttgggttcgctttgcgaggggaaacgatcccagtgtcggttgcgggatccgcctcctctcagtttgcccctttagccctccacctttcccttctcctctctcgcatttccgccagtcggcttacccgctggccgcctcctgacaagcgggagggatccgcggtggacccagggaagcggaggagcctggcggccaccccctcttcctcacttccctgtactctcatcgctctcggcctccgacacggtgagtagaacgatttgggccggcattcgggcctaagcactctctcagcgattgaatcctgggctttctgggagccactgtcatctcccggacctggacctctgggagagcagtggtgaagatgggggaggggagagcagggagggggatcctgagcctaccgggaagtccctccaggcggggtgaaggggtgtccctgacaggcagactcccggagggggctgggaagtaagcgagtggaggcggagtcggctgtgcccctgacaggttagtttgtgtttgtaggcatgatcggagcctcccccatagtccagtttgtgtgtgtttaattaagggataagagtggtcgaggacacgatcttgagaggggattttacctgtgtgacaaggtctgtggtgtccctgccgcgttgaacggtatgtgggaacgacaggatgatctcagtgttgtacgtttaataaatgtcactggttagtttgtacatggaaagagatgtttttggtctagcagacagatggtctgttggtgtgtagcggctgtgttggtgtgtgtatgtgaggatggcaagtgtttccgtaagagtttgcctttatttgtgtaagtgtaatggagttccccttataagttagcttatttcttgaataaatgttgggaggttccttgcaggttgatatgtgtgtgtattttagggattgggagcccctagttacttgttgggaaagagcggcaatggtagtgttctgtacagcatgtgtctgtgaggtcagggaggggagaaacttggcatagccagttgtggtcttaagaatagtttgtgcctttggttagagtgagttgtgtaaatgtgaagggccaaaatatctttaacagaatcattgctacaaagctgtaaagaatgggtggccttatttgttgtcgcgggtttatagtaatagtttacaatacaataagaaagctctttcagtttctttgtgatactgaatctctgtgaaaatggtaggatgctttcttccattttacaaaataggaaatttaggcataaggagagaacttctccaaggccgcatgttaaattggtgacaaagttggaactgtaactcccatattttcactactactgcagcagtatattcagcataccatggtgcctcaggaagtctttgtcggcaaatctgagtatgctggaaagataggagcacataagactggttggcttgtatttgggggagaccgattgtgtcagatatgtatgtggaacgtagctgtccttgccgagtctgacctgtatgaaatgcatatccatggctatattattttggatttatggaggaagcagagcatttctgacacttaaggttgtatgcgtgagggagaaggctttcacagcttaacttgtaccagagcagctgcatgggtgctgacagcttaacttgaaatctgtgggaggaaggatcctttttcactcattcaacaaatataaccattcaatgaatggtccatgccttgaggtgaggatcatcaaggtgtctctgtaaatagcctggatgcaatctgaggggagttgttttgacggtggtaggtattaagttgagggaggcagtgtggaattaaaaccagagaactgtttttgggtactggtaattgttaatatatgtgcctgtggatgttggaacttcttggctgggctgaaggaatcctttgaaagactgatttcggcagggcgcggtggctcacacctgtaatcccagcactttgggaggccgaggtgggcggatcacgaggtcaggagatcgaatcacgaggtcaggagatcgagactatcctggctaacaggatgaaaccccgtctctactaaaaatacaaaaaattagccgggcgtggtggcgggcgcctgtagtcccagctactcggggaggctgaggcaggagaatggcgtgaacccgggaggcagagcttgcagtgagctgagattgcgccactgcactccagcctgggccacagaggagactccatctccaaaaaaaaaaaaaaaaaaaaaaaaaagactgatttcatgtagtaaggatcccgtctatgaactctatgaatatgaggtaagaatgcatgaactaagccaacttagctgtattcttctggaaaatgggatgtttcttgataggctagattagtggttcttaaaagttttttggggtcacttatccttcagagaatcggatgaaagacactgggccctcaagttagaagatgagcataagcgcaatcacatgatttatatatatgattttaggaacttaaactgtaatgaaatagagccaatttatatttagatctcatttgaaaacctttcattttcattgttcgggtgtgtggatgttagtatgagtttaaggtgaaggagtctatgttagtatttgaacatgttgacaggatccatatttttaatttattctttttatcgtctgcaaacatttctgcagtattagtaaatgactctgtatttggtaaaaagggaagctaatgtcgcacaagtatctatggctttgttctttgtcagtatctttttgttctcaaactctgagaagcgtctttttttcagttttggattgggcctgaggtgatttgaagctcctgtcttggagtttaacttagttataacaaacactgagttaatcctatgcaggagacacaaagataattaatatatggtctctgtgcttgaagagacgctaattttctgtggttgaagagatgctgtgaattgtgtgatagtggcagctctcaaaaggacaaggaagagggaaacatattcctagaagctgaaattttattacccaattgcaaagactttttgtcactacttattcttaggaataaccataaagtgtttattttattctgtatggaactttgtactttaaaaaaatatgttttgtatcatctggtgtttttgtataaaggaactgttggtttgaaaagaaggtaaacatcatttatattccttaccttgttttgggatgtatctctacagtgagtttatgtaaaaaggtcttaatgtcatttttgggtatacatacatgtagaaagccctcctgatataaaatccagtagctatttgacagactacccattaatttattactggaacttaaaaataattactgtacttttaaaagaacaagaaattggtcaggtggggtggctcacgcctgtaatcctagcactttgggaggacgaggcggatggattgtcagagctcagaagatcgagaccagcctgggcaacacggtgaaaccccgtctctactaaaatacaaaaaattagctgcatgtgttggagtgcacctgtagtcccagctactcgggaagctgaggcacgagaattgcttgaaccaagaattgcttgaactgggagggggaagttgcagtgagctgaaatcatgccactgcactctagcctcggcatcagagcaacactctgtctcacaaaaaaaaaaaaaaaagcaagaaatgtaaaaaggtgttttaataggacagattataggattcagtgagataatggagaagttttaggaaaaattgtctgatagtcctttctttctattgacatggcccctgtataagaatgctatgtaaatttgtgaaaagtttaatattttctctaatttttaacgggtagtaggttcatggtgttatttttctcaaaacgtacatgtgatatgtgtgtgtagtgtgcatatatgtgcatgtatgtgtatacaatttctttatttttttaattgagattaggtctcgctatggttttttgtttttgtttttgtttttgagagagagtttcgctctcctcgcccaggctggagtacaatggcacaatcttgcctcactgcaacctctgcctcccaggttcaagtgattctctttcctcagcttcccaaatagctgggattacaggcgcgtgccaacacgccctgctgatttttgtatttttagttgagacagggtttccccacgttggccaggctggtcacgaactcctaacctcaagttctccagccgtctcggccttccaaagtgctgggattataggagtgagccactgcacctggcccaggtcttgctatgtagatcaatctggtcttgaactcctggcctcaagccatcctcctgtcttggcctcccagtttgctgggattacagatgtgagccagcatgcccagctctttttacctgcttaccaaatccaagattttctccaaaatgaactggaatagccttcttactgtgttaattttgccttggtggggaagcctaagtcttggaactaaattggggtggttatgacagttctctttttaaagctgatcagtatttcagtatttcacttgttgttgttttttttgttttgttttgttttttttgagatggagtcttgctctgtagcccagtttggaatgcagtggcaggattttgactcactgtagcctctgccacccggattcaagtgattctcctgcctcaatgtcctgagcagctgggtttacaggcacgcaccactacacctggctaatttttgtattgttagtagagacagggtttcaccatgttagccagtagccaagctgttctcatactcctgacctcaagtgatccacctgcctcagcctcccaaagtgctgggattacaggtgtgagccaccacgcctagccaaacccatctctttcattaaaccacctcattttggttcagaaacaagactgccatgtatgtatttaatgcttattatgtgccaagcactattccaggtactaagatacagtgatggacaaaacaagatcccttctcctctatctcaggacttattaatttgggcattttcattttccaatataggatcttttagtactggtataggattcctgaaggaattcctgaaatataattatttttctgctagagcaaatcaattttgttttttgttttttttttgagatggagtttcgctcttgtcgcccaggctggagtgcaatggcgcaatctcggctcactgcaacctccgactcccgggttcaagcgattctcctgcctcagcctcccaagtagctgggattacaggcattagccaccacgctaggctaatttttgtatttttagtagagacagggtttcaccaggttggccaggctggtctcgaactcctgacctcaggtgatcctccaggctcagcctcccaaagtgctaggattacaggcaggagccaccacgcccagaagagcaaaattcttctgttgacaaaaatttctttcctctgaggaagagacactgtgtgcctgtgttttatccaggaattccattggatagtttgtcctttgggatgtcagtggattaaatcctccattaagaatcaaagtacttggctgggtgcagtggctcatgcctgtaatccctgcactttgggaggctgaggcaggtggatcacctgaggtcaggagttggagaccaacctggccaacatgatgaaaccccatctctactaaaaatacaaaaaattatccaggtgttgtggcaggtgcctgtaatcccagctactctcgaaaaaacagaaacaaaaactctgacatgtagagtatgtagatgtagagaaaaaagtaaaatgattgttgaaaaaaatgtctattttttatcttctaaatagctttgtgtgtcagagatcagaacgctcattttacatgatatcaagaaccagaatgctagatagctagaatggttgttaacttcctagataaccattgtagaggaacacataaggtaaaacaaatgaataaaaattaaaaaaaaatgagatagccaaagatttgaagctctttacccattaacatgataatcatttcgactttgaatatttgtagaacaagagtcagaactcagaacaaagatctctgaggaaataaaaaaaaatcaagctgcctcctaatttctcatttagtctgtcattgggcattgtcaaactgtcaaactatatttagagattctggttttcatctggagacttagtgagttgtgtaatatcttgaatacacatataagatcttgccaggtggggtggctcatgtctgtaatcccagcactttgggaggatgaggtgggaggatcgctggagcccaggagttcaagaccagcctgggcaacatagcaagtccctggctctatttaaaaaaaaaaaaaaaaaaaaatcctcaatgtagaactttaaatttatccttacgtgttacatccagttgatttgagaaaatatgattctgaattttccatcaattggattggcagtccctttcagctttacagctttacatcatctacagatttgttaagtatgttctcttggtcttctaattcactgatggagtttttgaataggtcgggtccaaagatagagtcctatgaaacactgttggaaacttgtctctgtctgtctcttttttttttggagacagtgtcttgctctgtcgttcaggctggaatgcagtgggacggtctcagctcactacagcctctgcttcttggactcaaagagattctctcacctcagcctctcaagtatatgggactatatgcatgtgcgaccaagcccagataaatttttttttagagatatgttgacattttgcccaggttgggagacttgtctcttgattccattcagtattgtgtgggtttggataggccatctaattataaaatcattgggctggtcatggtggctcatgcctgtaatcccagcactttgggaggctgaggtgggcggatcacctgaggtcaggagtttgagaccagcctgaccaatatggagaaaccccatctctactaaaaacacaaaattagctgggcgtggtggtgcatgcctgtaatcccagctacttgggaggctgaggcaggagaatagcttgaacctgggaggcggaggttgcagtgagccaaaatcgtgtcatcgcactccagcctgggcaacaagagcgaaactccgtctcaaaaaaaaaaaaaaatcatctagctcacattttctccttgtcttcttcctattagaatttaagttcaatgagattagaactctctctctctctcattctctcatatatcccaagcatctaaaacagggattgaaacatagtaagtactcaataaatgtttttgaataaatgaatgaaggatagctgggcgtggtggctcatgcctgtaaccccagcactttgggaagccaaggtgggtggatcactggagctcaggagttcaagaccagcttgggcaacatggggaaaacccatctctacaaaatatggaagaattagccgggcatgacagcacactcctgttgccccagctacttggagggctgaagtgggaggatcgcttgagcctgggaagcagagattgcagtgagccgagatcaagccactgccctccagcccgggtgacagagtgagaccctgtctcaggaataaggatagatatgaagaattcgtcagatgccttgttgaaaacatcatacattgtctacatggaattcctccatattgtaaaatgaatctaatttataccaacaacgtttggcttttttgcagaaaaggaagcaaatgagctgatggaagatctgtttgaaactgtgagtaatgatcctcaagtgagaacatgggattgtaagttggttctccaacaaaatgtgtcctttgatctctgtgatgctccttctagaagagggactgaaccaattctccttttagtctacctgggaaagaatataatgacaaaagaaatttgctaactgctagactcttgattatccacatgtaggttattcttactaaaattttccttgaagctttttttttttttttttgaggcaaagtcttgctctgtcacccaggctctggagaatacagtggtgaaatctcagctcacagcagcctcgacctccagggctcaaaacaattctctcatctaagcctcctgagtagctgggactacaggcacacacctacaggcccggctaattattttatttttttgtagagacagggtcttgccatgttctggaactcataggctcaagtaatcttcctgcctcaacctcccaaagtgctggaattacaggtgtgagccagcacatcttgccccttgaaaacttttgatggcttcccctactgtcatttggtgtgtccttaaagattgccaactagttttaaagtattttgcacacaaataattaccttttccataaatttgtctaaaaagatatttctgtttaagaaattgatcattttgagttatcctagctctgtgcttactgatacaagttgactggttgagcaacttctttcctggcataatagtcattccatatgtgggtttgtaggagtcctgaagtgagaaaggttctgatgtaggctctttctgggtgccagcattattaaagtattgtttatagttttcacttttccttcccaacactggagcaacattcaaaagcccattccccaggaaaaccctccctttcctttgcccacagttccaagatgagatgggattctccaacatggaagatgatggcccagaagaggaggagcgtgtggctgagcctcaagctaactttaacacccctcaagctctacggtaggctagttgaagaccttgagatttggaatagaggaagagtttatttctgaaaaggttttcagaagttgcagttaacaatttttcatccccagccagcttctgttactgatgtaaggatgcagagtcctgtcaggagttaggtgtcaagtgaagtctccttgttatggggcagtgcagctgtaggccaagctgtatctgtttgggaagggagaaaaaacagtagctggcatccatatccacttctccgggtgagtggtgctggagaggtatgtaggactcaatgtggccagccacacaaactaccctatattgtaatatccagtctgtcccttttgttctttttatgtgccattaatatctgctaaatgtgactgaaaatttgttagtcacctaggcattagtggagcaaaccctgaagcacctgcagtaaggagtctgaaacatacgtgctgacctttttgcctaaagttggcacttgtgttacagcatccagaaagtagaggctttaattttttcctcattttgtggtggatttgcatctgcactttattctgttgtagcagcatataatcattaggtcgatggcgagaggtcaggatgcagtttgtgccataagtggaacaaagcaaagagaatagtccctgtaattagtcctgtgtttgaacttaacagcactactaagcagagagcttgggttccatctgaaagctagacctttagggattttccaatttagtgaaaaaagataagataggccaaccaatgtcttaaaaactagaactactagtcattctccattacaacaaatatcacaatacaactacatcaaaaatctcaagattgctaagtcagtatttgacccattattttaatttatagttcatagaacaaaattctggtatagcagaatggaaccattcatcctgggaacgtataataggatctgattaataaatattttggttttgctgatcaactctttataacttcttaaaatttggaaaatatagaactaatttaaaattcctgttagaatccagttaccttctggtattcaatggaatatagtcatatatcatctcatggtcataccctctgtgaaatctatcattaaacgattcatcattgtgtaaacatcgtagaatgtacttacataaacctaaatggtttagcctactgcatacctattgctcccaggctacaaaacctgtacagtgtgttactgtactgtactgaatactgtaggcagttgtaacacaatggtaagtacatatgtatgtaaacatagaaaaggtacagtaatcttatggagccacctctgactatgtggttcgttattgactgaaacattctgtggcgcatgactgtacttgggcagcttctgcttctctttcgattgcaaatacaaacctgtttttgttttaatctttgactaaataaaaatccctctgtaagtccatagagagtaagcacatcttaaaacacaataaggaagagagaggagaaaaagacagtcaaaacaaaaactctggggcttcccttatcaattacctaaataatccttgttaaaactaagtgcaggctatgtttccattttctacttttttatgcttcttctcttctgttccttcagtggtggtagcgcggatgttcaaattttcagttctcagtaaagattgtatagacagtcccacggtcttcaggtttttactctgtgctacccaaacctacagtaaatactataaaagaaaacttattcaaacgtaatctttatctgcaaaaactattgaaaaacgttaccatttaactattgctgtaatatagggggttccttgaaatatgataacctgcttgttatagctacttcagcagatcttatcctgttgcatagggtatcagcatatgcttaatcatttaggtatattattctccctttatttctttctatgtaaacatagaaaaggtatagtaatcatacatagaactgacatgctaggtattggaatttttgcttcagccctgcaaacaatctttcaggagggtatggatgggaagttagggttaggaaccttggaagaggaatttaaagggctaaaagaagatagccttcatggataatattttaactaacttctccgttctgttcatttgaactaccatgtacttcagttattttggtatatccttttcctgcttcatgctagaaagtctttgacttgttaagaaagcagggcagtgcagcctgagtagataggataatgggacaagctggacctgggatgggagtaacatcccagggagtaacaagtaatgagagaagaaatgagaatgatgagttcccaccagctccttggctgctttcttacccatatatttctctgtccctagttttttgtttaattttttcttcatttgtatattatttggaagaggaattgtagaggaatgggatggggtgtaatacagaatcatttgatgcatgctaactactttgggaaaagatttgtgtaaggctgggagtttgactgttggctaaagtgaaaaggggggattagtagggaatgaaaattgttcaggctctttgctcatcattgcaaagaattggatgtgttgtggacctaggaaaacactcaaattcagtcatccccgtttgggataggtttgaggaactactggccaacctactaaatgaacaacatcagatagcgaaggaactatttgaacagctgaagatgaagaaaccttcagccaaacagcagaaggaggtagagaaggttaaaccccagtgtaaggaagttcatcagaccctgattctggacccagcacaaaggaagagactccagcagcagatgcagcaggtaacactttccttggtcatattaatattgaattataccaaggcctaactctgaggctttggtataatctaaaattagcagctttgtaaatgtcagagatagttaccttactacgtattaaaaccgtagtatcttcacatcagttaggagcttgagaagtcatcatgttcatgtcctgtggctcagggaagacagcacataaggaccctaatggtattcggaattacagatttcaaagagtcctcagtaatctattctgaaatttaaccttcactgtgacaagtagttttttttcccttttcccttttcttttttcttttttttttgagacgtagtctcgctctgtcacccaggctggagtgcagtggctcaatctcagctcactgcaagctctgcctcccgggttcacgccattctcctgcctcagcctcccgagtagctgtgactacagggactcgccaccacacccagctaattttttgtatttttagtagagacagggttcactgtgttagccaggatggtctcgatctcctaacctcgtgatccacccgcctcggcctcccagagtgctgggattacacgcgtgagtcactgcgcccggccttttccttttctaatctcagttcctcctctgtttagaggttaaacttcctctggttctgtcattttgttcaagggaacatgtctgagaaatttatgccaagatcctacgttgttctcacactctttgcagaaagcaaaatttgtgtcataaagttgcaaacatcttagttaatgactctctggtggctgggtgcagtggctcacacatgtaatcccagcactttgggaggctgaggtgggaggattgcttgagcaggggagttcaaaagcagcctggacaacatagtgagactctgtctctacaaaaaataaaaataaggctgggcacagtggctcacacctgtaatcccagcactttgggaggccaaggcgggtgaatcatgaggtcaggagtttgaggcaagcctggccaacatggtgaaaccccgtctctacgaaaacaaaaaattagctgggtgtggcggcgggcacctgtaatcccagctactcgggaggttgaggcaagagaatcacttgaacctgggaggcagaggttacagtgagccgagatcacgccattgcactccagcccaaaagtcagtgcgagactctgtctaaaaataataataataataataataaaataaattagccaggcattgtggtcacagctacttgggaggctgaggtgggaagattgcttgagcacaggtggttgagagggcattgagtcatggttgcaccactgcactccaagctgtgtgacagagcaagaccctgtctccagggggaaaaaaaaatatctctgggctcctgaaatggcagtgtcataacatatcactgcattattttctttctctccccagcatgttcagctcttgacacaaatccaccttcttgccacctgcaaccccaatctcaatccggaggccagtagcaccaggatatgtcttgtaagtttccaaattgccgtaattctatagactagaatataaaattagcttggcaggttatttctcacagttattctctcaggtatttttgattgctgtggcttcctatgtttgctgagtgaacataagccactgattcacatgaaaggacaaagagtgtattcaattttttcttttcttttttgagacagggtcttgctctttcacccaggatggagtgcggtggaacaatttcagttcactgcaacccctgcctcccgggttcaagtgattctcctgcctcagcctcccaagtagctgggactacaggcgggcaccaccacgggtaattttttttgtatttttagtagagacagggttttgccatgttggccaggctggtctcgaattcctgacttcaagtgatctgcccacctctacctcccaaagtactgggattacagccatgagccactgcgcctggcctgtccttctgatatttttattgggtcctcctcctcatctttagattcaccctgacttcttaggtttttggtaccgctattcatttcatagatgttgaggctgggcatagtggctcacacctgtaattccagcactttgggaggctgaggtgataggatcacttgagcccagtggtcaagaacagcctgggcaacatagtaagacccggtctgtgttttttttgttttgttttgttttaatttaaataatgaagtaaatatacatgtagatgttgaattcattatccattcatgaagctcaatattagtgttttatgtgtagagctagttttgctcatgacgttttgaggtattttgagctttttttttttttttttttttttttgagacggagtctcgctctgtcgcccaggctggagtgcagtggcgggatctcggctcactgcaagctccgcctcccgggttcacgccattctcttgcctcagcctcccaagtagctgggactacaggcacccgccactatgcccggctaattttttgtatttttagtagagacggggtttcaccgttttagccgggatggtctcgatctcctgacctcgtgatccgcccacctcggcctcccaaagtgctgggattacaggcgtgagccaccgcgcccggcctattttgagattttaaatttgaaatttggccaggtatggtggctcatgcctgtagtcccagcactttggtaggtcaaggtgggaggattgcttgagcccaggagtttgagaccagcctgggcaacatagtaagaccccatccctaccaaaaaaataaaaaataaaaaaattagctggggatggtgccgagtgcctgtagtcccagcaacttgggagactgaggtaggaggatcacttgagcctgggacgttgagactgtagggagccgtgcttatatatcactccagcctgggtgacagagtgagaacctgtctcacaaaaacaaaaccatactttacctcataaaaattgcctcaaacttttggacaggtaatgataatactctcagcttcttcagtaagtcttctttggattttgaagagtacatttgctagtattctaaaacttccttggtgatcaacaggatgtcttcatctcttactgtattcagaggaggatgaggagtacttggttgtaggcattattctgagaccaaaagacaaaacaattttaaaagtaatggtcctggtcgggtgaggtgactcatccctgtaatcccagcactatgagaggccgaggcaggcggattgtgagcccaggagttcgagatcagcctggccaagatgggaaaacgctgtctctgcaaaaaatacaaaaatcagctaggtttggaggtgtatgcctatagtcccagcttctcaggaggcagtgggaggatggcttgagcctgggagggggagtttgcagtgagctgagatcatgccactgcagtccagcctgagcggcagagtgagaccatgtctcaaaataaattaattaattaaattaaagtaatagtccccattcttgagactcttaattctagctcgggagctagaccatgtattccttagtgagaaacagtttaaaaataaaacaagaatataatccctgaatatctgagaactcaggcataatcttaacagtagtttattgtgaaagactttatgattatttttacctgtttttatcctgtagtaggaaggtcagcttctcatttagattctgaaggctattggtattaattgtctggaattgtcttagatcttccttgtgtcgtgttttcccagaaagagctgggaacctttgctcaaagctccatcgcccttcaccatcagtacaaccccaagtttcagaccctgttccaaccctgtaacttgatgggagctatgcagctgattgaagacttcagcacacatgtcagcattgactgcagccctcataaaactgtcaagaagactggtaggagacagatgtgtcagctttaagtttttacttgcggtgagaggtggtgggaatcttatcccatagataacttcctaggatacttgcctaggaatggaggacacaggacatttgtaatttcttccttctctcttttatcctccctttgtactcattatccaagttctagaattacatgataatctccgggcctgggtaaggcatggaggcagtggacagtataggaatatgggaggtagagatctgaggctcagtgctaagaattggactacagcaatatgaggggtaagtattaggaatcagatcaagataaactggggcctggtaaagatgaaagtcaggtggtaaagttcggtcatgtttagctttttattctcttcattaagatcaactaactttatttaccataatgattgtagcataggtgatatctccattctgaatgaaatgttgacttgcaagttaggcgtaaattagagattgtacatttgccgtgttcagtattttaaagaaatttgccggtttagattctaccttgcattggtttagtattttttgagaaaatatttgctatttacttaagccaaatatttacttctgatttgtttgctgacttagcaaattagttgtggtttgttctggatttgggtttgtctttggattctattttaaatccctaagtcttatcattacattgaatgtagttgaatttaagtgtactatatcatagacacagatcccaaactactttaatagctatattatatgaaatggtaatgaaaacgtgatttaataccaaattatagtattatcttacacatctagtgtcctgtgtttttcttctggagatataaaaatgacacttatggaaggagaaatatggatatagtagttttgtctctagaaatgcagaggtgcctaaaattgagaggctgagagagggagacagaaatgaatgagactgaattgtctcattccttttatggttcttttgttcccaacctcaggaggaatctgggagaacttaatgaaagttaagaaagaatgaaataaaagtaaaatttggaataccaggtttgtgagggagattaaagaagttggaatcttttttcttttttttttttttaagatggagtctcgctctgtcacctaggctggagtgcagtggggtgatctcggctcactgcaacctccgcctcccaggttcaaacaattctcctgcctcagcctcccaagtagctggaattacaggtgcgtgccaccatgcctggctaatttttacatttttggtagagatggggtttcactatgttggccaggctggtcttgaactcctgacctcaggtgatccacctgcctcggcctcccaaagtgctgggattacaggcgtgagccagcacgcctggcctggaatcttatcctggaagaaaaaagcattgttgaaggtctgttatccttcagagatttaaaggggaaaggaggtaaaacatttttgagcatacactatgtgacaggtattactaggtactttttaagtgtttgttttactttgtgaataaagtgttacacgtaagaaagagtaagagaggccgggcgccgtggcttacgcctgtaatccaacactttaggaggccgaggctgtcggatgacaaggtcaggagatcaagaccatcctgtctacagtgaaaccccgtctctactaaaaatacaaaaaatcagccaggcgtggtggcaggcgcctgtagtcccagctactcaggaggctgaggcaggagaatggcctgaacccgggaggcggagcttgcagtgagccaagattgcgccacgcactccagtctgggcgacagagccagactccgtctaaaaaaaaaaaaaaaaaaagtcaacttttattgccagtgaatgggactccctttagacctaatgttagttgaggaaagactgtggaaactctttggggagtggtaggcagatgggagggaatcaagttagataaggacagctctacctaaatgcaaaaatgcattcacaggctttttgaagccctcttttttcctagaagttgatttatcagagatttattttcttatagccaatgaatttccctgtttgccaaagcaagtggcttggatcctggccacaagcaaggttttcatgtatccagagttacttccagtgtgttccctgaaggcaaagaatccccaggataagatcctcttcaccaaggctgaggacaagtaagtgtttactctgggggatcaaatatcccaaggagaagatgtagttcctttgaggagtttaggggaagtaagacttgtataataagacatggacacaaaaggaaaagcagtatagatgagcagagtcctctagaacgtgcttgttctagcagtgccaaatactgctttttggggggatgttacacacatttttaaaatgttttagactggacatggcggctcccacctgtaatcccagcactttgaaaggccaaggcaggaggttggcttttctaatgttattatttatttagagacaggatcttactctgtcacccaggctggagtacagtgttgcaatcacagctcactgcagccttgaactcctgggatcaagtgatcctcctgcctcagcctccatggagtagctgggaccacaagcgtgtgccaccatacatggctgattttttttgtacaggtgagggtatctctgtgttgcccaggctgctcttgaattcctgacctcaaatgatcctcccactcctggcctcccaaagtgctgggactataggcataagccaccacacccagctagattatgaacatttttatggccctttgtgtgtattgccacactgttaacagcaaatatgtatatatgtaaccatgattatatatgttatgttagagggtagtattggtgccagtttaatttgtctgacggggtacctattattcattttatatttgttttattagaatcattctccttcccatgtattctctttgaacttcctttgtgttgttaatatacagctcatcatgatctgacatttattgatgatttatgactagtttctcttgctcctacttaattgtgaactatttgattcttattcatagtacttaatcactactcactaaatacctgaaattttctactgagtagtcaccaacttgtagtagtcactacaagaattagttgtagaaaaagtagattggccagccatggtggctcacacctgtaatgacgacactttgggaggccgaggcaggaggatcacttgaggccagaagttcaagatcagcctaggcaacaaagtgagaactggtctctacaaataatgaaataaaacattagttaggcatggtagcaaacgtttatagccacagatactcaggaggctgaagtgcgggaatcgattgaacccaggcattcaagactgcagtgcactgtaatcatgccactgctctccagcctggacaacagagcaaaaccctgtctgaaaaaaatgaaaaagtagattgggccacacgccatgggctcatgcctgtaatctcagcactttgggaggctgagactggagaatcgcttcagcttaggaagtagcagctgcagtgggctgcgatcacgccactgcactccagcccaggtgacagagtgagaccttgttttaagaacaagtaagaaaaagtagattgtaaaatgtgttagtctggggaggccctttagaaggaaggactgtgaagtgagatttagtgttattgctcctttctcagtttgttagctttaggactgaagcattttgaagggactgagtttcttaaccctctaatcagcaagtaccttctaacctgcaagactgcccgccaactgacagtgagaatcaagaacctcaacatgaacagagctcctgacaacatcattaaagtgagtgtttcctgcatgcactatccaggcacctcaccaacacatatctgttcttttctcttgttattctcaaagaaaagaagaaccttcttttatctaaagctaatttctcctacttatatactagattaattcccctgttgccttttcagggacattgattcattcattacgttcctctggagtatcttcatcctcttaaaagattccacaaatccatgtttccctgtaataattctctttcttgaactttctagaaatgatatgcagtattccacttacatgctttgggtttttgttttgttttgtttttttggtcagacataatcttgcactgtcacccaggctggagtgcaggagtatagtggcatgatcttggctcactgcagcttccgcctcccgggttcaagtgattctcctgcctcagcctcccaaatagctgagattacaggcgtgcccaccacgctcagctaattttttgtatttttagtagatacgggtttcaccatgttggccaggctggtcttgaacttctgacctcaagtgatccaccagttttggcttcccagaggctaggattgcaggcataagccaccgtgcccagcctatatactttttctcaattttgtgtttgtatgtatgcatgtatgtgtgtgtgtgtgtgtgtgtgtgtttgtgtgtgtctgtgtctgtatgtatgtatgtatgtatgtatgtatgtattgagatggagtttcgctcttgtcgcccaggcccagcctatatactttttctcaactctttttacttattgattgattgattgagatggagtctcgctcttgacccccaggctggagtgcaatggtgcgatcttggctgactgcaacctctgcctcctgggttcaagtgattctcctgcctcagcctcccttgtagctgggattacaggcccctgccaccatgcccagctgatttttgtatttagtagagtcggggtttcaccatgttggccaggctggtctcgaactcctgacctcaggtgatccatctgcctcggcctccctaagtgctgggattacaaatgtgagccattgcccccagccttcttttttatttagatatttatttatgtttttttttttttttagagacaggttctcactctgtcatcctggctggagtgcatgggcacaatcataggtcactgcaacctcaaattcctgggtgatccttccacttcagccttccaagtagcttggactacaggtgcatgccaccaaggctagccgattattttattttgtgtgaagacagggtgtcattttgtttcccaggctggtcttgaagtcctgacctcaagcagtcctcttgcctcagctcggcctcccagagtgttgggattacaggcgtgagccatgatgcccagcctttggtttcattgtgtttttgtatttttcttgagacaaggtcttactctcctgcctaggctggagtacagtggtatagtcatagctcactgcagccttgaactcctaggctcaagcattcttccaacgtcagcctcccaaggagctgggattatatgcattagccactgtgcttggccattaaatttatttatttatttattttattttatttttttgagacagaatctgtctctgtcacccaggctggagtgcagtggcacaattttagctcactgcaacctccacctaccgggttcaagcaattttcatgccttagcctcctaagtagctgggactacaggcatgcgccaccacacctggctaatttttatatttttagtagaaacataatttcaccatgttggtcagtctgatcttgaactcctgatctcaggtgatctgcccacctcggcctcccaaagtgctggaattataggcgtgagcctctgtgcctggcaaaaaactttttttttttagggatggggtgtccctatattgcccaggctggtcttcaatttttggccttaggcaattctcctgtctcagcctctaattggtactgcctggtgtattggatttaggccttacttattaaccataaaccacggaagccgaagatttacctctctcctcactcccttactcccaccacaaacatgcacattttctgctctccaaactcctcactagtagttatggtagaattttggttagattgtattcagggtttacattgtaagattttaaggactgttggctgggcgcggtggctcacgcctgtaatcccagcactttgggaggccaaggcaggtggataacgaggtcaggaaatcgagaccatcctggctaacatggtgaaaccccagctctactaaaaatacaaaaaactggctgggcgtggtggcgggcgcctgtagtcccagctactcgggaggctgaggcaggagaatggtgtgaacccgggaggtggagcttgcagtgagccgagatcgcgccactgcactccagtcttgccagagcaagactccgtctcaaaaaaaaaaaatagattttaaggactgtataaatgctcttcacagctcagctatgttactgtgttaccttgcctttcctgctgaacattttgtttcccagatcatcttctttcagtgtgttcaggtattctagatattctgtcactttcatcttgaagaaattgctccctgagccctctgacattattccactttaagcgtgttgctctccatgttgctgcactgatgtcttcttgggctttttcttcaccatcatcccaggaattccttttgcctcatactgtgttagatcctcttatttcctgaattccacatctttgcttttgcattactttttttttttttttttttttttttgagacacagagtcttgctctgtcccccaggctggatctcggctcactgcaacctgcaaccttggtcttggtcttgaactcctgacctcaggggatccacccacctcagcctcccagagtgcggggattacaggcgtgagacaccacgcctggccttgttttttgttttgttttgcttttttttgagaccgagtctcgctttgttgcccaggctggagtccaaaggcgcgatgatcttggctcactgcaacgtccgcctcccgggttcaagcaattctcctgcctcagcctcccgagtagctgggattataggcacatgccactacgcctggctaattttttgtatttttagtagagacagggtttcaccatgttagccaggatggttttgatctcctgacctcttgatccacccgtttcggtctcccaaagtgctgggattacaggcgtgagtattacttctttactttagtggaacacattctagtagcttttttttaaaaaaaatttttttctgaattttaaaaaattgaggtgggggggtctcagttttttgcccaggctggtctcagactcctgggttcaagtgatcctcctgcttcagcatcccaaagtgctgagattataggcatgagccaccctgcatggccccattccagtagcatcctgagggagagtgcttgggaagggaattttcacatttaaaccatctccggggccgggcgcagtggctcacgcctgtaatcccagcactttgggaggctgaggcgggtggatcacgaggtcgggaaatcgagaccatcctggctaatgtggtgaaaccccgtctctactaaaagtacaaaaaaattagccgggtgtggtggcgggcgtctgtagtcccaggtactctggaggctgaggcaggagaatggcgtgaacctgggaggtggagcttgcagtgagccgagatctcgccactacactccagcctgggtgacagagcgagactccgtattaaaaaaaaaaaaaaaaaaatctccattcatggtcttttgattgtatcgatgtcagtttcctcgtttttgtttttgttttattttttttctttttttgagacagagtctcactgttgctcactgcagcctctgcctcctgggttcaagcgattctcctgcctcagcctcctgagtagctgggattagccaccacacccagctaatttttgtatttttagtagagatggggttttgccatgttggccaggtgatctcgaacccctgacctcaagtgatctgcccaccttggcctcccatagtgctgggattacaggcatgagccaccacatcctccatgtctggccagtttcctggtagtaatattgtactgtgtaccttgtttatatgtatagctcttgtttctatgtaacataaaaacattatattgggagaaactggttgaagggtacatgggacctcttggtactattttttgcaatttcctatgaatataattatttcaaaataaaaggaaaaaataatactctcctctgtcactgtatctagaattctagataggaaataatttttttaagaagcttttaagggcctcacttcattttcttctaactcctagtgtggtgttaagaaatttcatgccatttaactttttttttttttttccgagacagggtcccaccctgttgcccagtttggagcgtggctaaatcatggctcactggtgtctccaacccggtgtgcaccactatgcccagctaattttttttttttttttttttaagacatggtctcgttatgttggccaggctggtctcaaactcctggcctcaagtgctcgtcctgtcttggcctcccaaagtaatgggattataggcatgagccatggccccatttaactcttgagtctttgtgtaacacctgtttttctcaacctctgacagcatgcaggatttttcctttggcttcaatattttgaaaatgcatgataatatgccttagtatttgtctatttttatccatggttttttaaaaagtactttctttttgtttttgtttgtttgtttgttttgagacagagtctcgctccattgcccaggctggagtgcaatggcgtgatcttggctcactggaacctctgcctcccaggttcaagcaattgtcctgtttcagcgtcccgaggagctgggactacaggcgctcaccaccacaccctgctaatttttgtatttttagtagagacggggtttcaccttgttggtcaggctggtctcaaactcctgacctcgtgacccacccacctcagcctcccagagtgctgggattacaggtgtgggccaccatgcctggcgtatccatggttttaaggcacacgtgataaaccttattcttctgcagaaataatttttttttttttttttgagatggagtctcactctgttgccaggctggagtgcagtggcgtgatgtcggcccactgcactctccacctcctgggttcaagtgattctcgtgcctcagcctcccgagtagctgagattacaggcacgcgccaccacacttagctaatttttgtatttttagtagagatggggtttcaccatgttggccaggatggtcttgatctcctgaccttgtgatctgcctgcctcggcctcccaaagtgctgggattacaggcataagccaccacgcctggccagaagtaatttgtgtttaagttttagttttgtgtcatttttcgtgcacacctttgtacttttgttgggggatggggcggggtgtcggggttggagtcttgctctgttgcccaggctggagtgcagtggtgcagtcttggctcactgcaacctcttaattcctcagttcaagtgattctcctgcctcagcctgccaagtagctaggatcacaggcgtgcaccaccacacccagctaatttttttttgtactttattagagacagggtttcgccatgttggccaggctggtcatgaactcctgacctccagtgatccatcctcctcgttctcccaaagtgctggcattacaggcatgagccaccatgcccagccctttgtacattttttaatgtaggatgccatttgtccacttgactctcccactagtctgtaagctccatgagagcaggaattgcttcccttatgtgtgtgcttagcttttagcacagtgcctaggatatagaaaacatcttatgttcatcatgttggatgaacagatgcttattgtcatggtttaagttcagttcttatcttctttttttttttttgagatggagtctcaccctgttaccaacgctggagtgcagtggcatgatcttggctcactgcaatctccaccctaccacccccactgccaggttcaagcgattcttttgccccagcctcccaagtaactgggattacaggcacccaccaccacacccagctaatttttgtatttttagtagagatggagtttcaccatgttggccaggctggtctcaaactctcaatctcaagtgatctgcccgcctcagcctcacaaagtgctgggtttacagatgtgagccaccaaggccagcctatttactcttaaaactgaactgcctcggtctttttttttttccttcccttctgatgcccttcacaccatcatttgcttaaagtctttgatgtgtccattttatagattacgatgctgtctttgcagctgttgagcaggaacaaatcttacataagattgctcttagcatctgcttccttttctctctgtgacctaaactctccccttcctggcaaccagaatggagatcatcagttagaaaatattgaatagggctgggcgcggtggctgacgcctgtaatcctagcactttgggaggccgaggcgggtggatcacgaggtcaggagatcgagaccatcctggctaacacagtgaaaccctgtctctactaaaaatacaaaaaaatcagccgggtgtggtggcgggcacctgtagtcccagctactccggaggctgaggcaggagaatggcgtgaacctgggaggtggagcttgcagtgagcggagatcgcgccattgcactccatcctgggcgacagagcaagactccgtctcaaaaagaaaatactgaataactataaaatctttaaatagagattagtttaatttgaaatgtacaagtattcagcatatgctattcgtatatgtgtgttcatggatgtttgtgtatgtggtcttgtgtgtgtgtgtgtgtgtgtgtgtgtgtgtgtgtttctcttgatccaccaccaccccattcaccagcctgacagaagacagtgtttccagaaggaatgtaattcatgcgcatttttttcatgttaagttttataagaagaccaaacagctgccagtcctaggaaaatgctgtgaagagatccagccacatcagtggaagccacctatagagagagaagaacaccggctcccattctggttaaaggtacagccctcttcctcgaagtctgtaggaggcagaaggtcactgaaagttctgagagaatatcaaggacttccttaatcgtctaatgctttagttgtagaactaggacttcaggaatcttcctgattcacctttcttcccttacttttctgcccttctccgggtgattctacaacattttcaaaataatgggtaaaatggtaatttgctaaaggaaattcagagaagagtttctaaagtgtataattggactgtggtctttgtagaaatttcatatgcagagtcccttggaaagatgccttgagcttgtctcaggtccctaaacttagaaagtcctattctttttcccaaattctgacatgtgctggatcagagtgttctcatttccaataggccagtctgccatccatccaggaagaactgcggcacatggctgatggtgctagagaggtaggaaatatgactggaaccactgagatcaactcagatcaaggcctagaaaaagacaactcagagttggggagtgaaactcggtacccactgctattgcctaagggtgtagtcctgaaactgaagccagttgccgaccgtttccccaagaaggcttggagacagaagcgttcatcagtcctgaaacccctccttatccaacccagcccctctctccagcccagcttcaaccctgggaaaacaccagcccaatcaactcattcagaagcccctccgagcaaaatggtgctccggattcctcacccaatacagccagccactgttttacagacagttccaggtgtccctccactgggggtcagtggaggtgagagttttgagtctcctgcagcactgcctgctatgccccctgaggccaggacaagcttccctctgtctgagtcccagactttgctctcttctgcccctgtgcccaaggtaatgatgccctcccctgcctcttccatgtttcgaaagccatatgtgagacggagaccctcaaaaagaaggggagccagggcctttcgctgtatcaaacctgcccctgttatccaccctgcatctgttatcttcactgttcctgctaccactgtgaagattgtgagccttggcggtggctgtaacatgatccagcctgtcaatgcggctgtggcccagagtccccagactattcccatcgccaccctcttggttaaccctacttccttcccctgtccattgaaccagccccttgtggcctcctctgtctcacccttaattgtttctggcaattctgtgaatcttcctataccatccacccctgaagataaggcccacatgaatgtggacattgcttgtgctgtggctgatggggaaaatgcctttcagggcctagaacccaaattagagccccaggaactatctcctctctctgctactgttttccccaaagtggaacatagcccagggcctccaccagtcgataaacagtgccaagaaggattgtcagagaacagtgcctatcgctggaccgttgtgaaaacagaggagggaaggcaagctctggagccgctccctcagggcatccaggagtctctaaacaactcttcccctggggatttagaggaagttgtcaagatggaacctgaagatgctacagaggaaatcagtggatttctttgagctaggagaataagagtctggagactgggagccttcacttcggcctccgattggtggcgcatagggtgtaaccaataggaaacccctaaagggtacttaaaccccagattttgcaactggggctcttgagcagcttgctttagcctgctcccactctgtggaatatacttttgcttcaataaatctgtgcttttattgcttcattgtttca

SEQ ID NO: 15003 - DNA, 2654 bp, Homo sapiens
gcggcggctgctttggcggcggttggtggccgtgcgggcggggagggagggggaggagagaagaggaggtggagaaggcttgggctcgcgccgctgaagtcggcttacccgctggccgcctcctgacaagcgggagggatccgcggtggacccagggaagcggaggagcctggcggccaccccctcttcctcacttccctgtactctcatcgctctcggcctccgacacgaaaaggaagcaaatgagctgatggaagatctgtttgaaactttccaagatgagatgggattctccaacatggaagatgatggcccagaagaggaggagcgtgtggctgagcctcaagctaactttaacacccctcaagctctacggtttgaggaactactggccaacctactaaatgaacaacatcagatagcgaaggaactatttgaacagctgaagatgaagaaaccttcagccaaacagcagaaggaggtagagaaggttaaaccccagtgtaaggaagttcatcagaccctgattctggacccagcacaaaggaagagactccagcagcagatgcagcagcatgttcagctcttgacacaaatccaccttcttgccacctgcaaccccaatctcaatccggaggccagtagcaccaggatatgtcttaaagagctgggaacctttgctcaaagctccatcgcccttcaccatcagtacaaccccaagtttcagaccctgttccaaccctgtaacttgatgggagctatgcagctgattgaagacttcagcacacatgtcagcattgactgcagccctcataaaactgtcaagaagactgccaatgaatttccctgtttgccaaagcaagtggcttggatcctggccacaagcaaggttttcatgtatccagagttacttccagtgtgttccctgaaggcaaagaatccccaggataagatcctcttcaccaaggctgaggacaacaagtaccttctaacctgcaagactgcccgccaactgacagtgagaatcaagaacctcaacatgaacagagctcctgacaacatcattaaattttataagaagaccaaacagctgccagtcctaggaaaatgctgtgaagagatccagccacatcagtggaagccacctatagagagagaagaacaccggctcccattctggttaaaggccagtctgccatccatccaggaagaactgcggcacatggctgatggtgctagagaggtaggaaatatgactggaaccactgagatcaactcagatcaaggcctagaaaaagacaactcagagttggggagtgaaactcggtacccactgctattgcctaagggtgtagtcctgaaactgaagccagttgccgaccgtttccccaagaaggcttggagacagaagcgttcatcagtcctgaaacccctccttatccaacccagcccctctctccagcccagcttcaaccctgggaaaacaccagcccaatcaactcattcagaagcccctccgagcaaaatggtgctccggattcctcacccaatacagccagccactgttttacagacagttccaggtgtccctccactgggggtcagtggaggtgagagttttgagtctcctgcagcactgcctgctatgccccctgaggccaggacaagcttccctctgtctgagtcccagactttgctctcttctgcccctgtgcccaaggtaatgatgccctcccctgcctcttccatgtttcgaaagccatatgtgagacggagaccctcaaaaagaaggggagccagggcctttcgctgtatcaaacctgcccctgttatccaccctgcatctgttatcttcactgttcctgctaccactgtgaagattgtgagccttggcggtggctgtaacatgatccagcctgtcaatgcggctgtggcccagagtccccagactattcccatcgccaccctcttggttaaccctacttccttcccctgtccattgaaccagccccttgtggcctcctctgtctcacccttaattgtttctggcaattctgtgaatcttcctataccatccacccctgaagataaggcccacatgaatgtggacattgcttgtgctgtggctgatggggaaaatgcctttcagggcctagaacccaaattagagccccaggaactatctcctctctctgctactgttttccccaaagtggaacatagcccagggcctccaccagtcgataaacagtgccaagaaggattgtcagagaacagtgcctatcgctggaccgttgtgaaaacagaggagggaaggcaagctctggagccgctccctcagggcatccaggagtctctaaacaactcttcccctggggatttagaggaagttgtcaagatggaacctgaagatgctacagaggaaatcagtggatttctttgagctaggagaataagagtctggagactgggagccttcacttcggcctccgattggtggcgcatagggtgtaaccaataggaaacccctaaagggtacttaaaccccagattttgcaactggggctcttgagcagcttgctttagcctgctcccactctgtggaatatacttttgcttcaataaatctgtgcttttattgcttcattgtttca

SEQ ID NO: 15004 - DNA, 27759 bp, Homo sapiens
gtgcgcgctacatggccggagtcgggcgaagcgggggaccgtggggaagaacgcgaggagggaggagtgggaggttgggggtgtcgctaggcgcccttagctccctccctctggaggagctgccgcggccactctgctgccgccgctgccgccgccattttgggttcgctttgcgaggggaaacgatcccagtgtcggttgcgggatccgcctcctctcagtttgcccctttagccctccacctttcccttctcctctctcgcatttccgccagtcggcttacccgctggccgcctcctgacaagcgggagggatccgcggtggacccagggaagcggaggagcctggcggccaccccctcttcctcacttccctgtactctcatcgctctcggcctccgacacggtgagtagaacgatttgggccggcattcgggcctaagcactctctcagcgattgaatcctgggctttctgggagccactgtcatctcccggacctggacctctgggagagcagtggtgaagatgggggaggggagagcagggagggggatcctgagcctaccgggaagtccctccaggcggggtgaaggggtgtccctgacaggcagactcccggagggggctgggaagtaagcgagtggaggcggagtcggctgtgcccctgacaggttagtttgtgtttgtaggcatgatcggagcctcccccatagtccagtttgtgtgtgtttaattaagggataagagtggtcgaggacacgatcttgagaggggattttacctgtgtgacaaggtctgtggtgtccctgccgcgttgaacggtatgtgggaacgacaggatgatctcagtgttgtacgtttaataaatgtcactggttagtttgtacatggaaagagatgtttttggtctagcagacagatggtctgttggtgtgtagcggctgtgttggtgtgtgtatgtgaggatggcaagtgtttccgtaagagtttgcctttatttgtgtaagtgtaatggagttccccttataagttagcttatttcttgaataaatgttgggaggttccttgcaggttgatatgtgtgtgtattttagggattgggagcccctagttacttgttgggaaagagcggcaatggtagtgttctgtacagcatgtgtctgtgaggtcagggaggggagaaacttggcatagccagttgtggtcttaagaatagtttgtgcctttggttagagtgagttgtgtaaatgtgaagggccaaaatatctttaacagaatcattgctacaaagctgtaaagaatgggtggccttatttgttgtcgcgggtttatagtaatagtttacaatacaataagaaagctctttcagtttctttgtgatactgaatctctgtgaaaatggtaggatgctttcttccattttacaaaataggaaatttaggcataaggagagaacttctccaaggccgcatgttaaattggtgacaaagttggaactgtaactcccatattttcactactactgcagcagtatattcagcataccatggtgcctcaggaagtctttgtcggcaaatctgagtatgctggaaagataggagcacataagactggttggcttgtatttgggggagaccgattgtgtcagatatgtatgtggaacgtagctgtccttgccgagtctgacctgtatgaaatgcatatccatggctatattattttggatttatggaggaagcagagcatttctgacacttaaggttgtatgcgtgagggagaaggctttcacagcttaacttgtaccagagcagctgcatgggtgctgacagcttaacttgaaatctgtgggaggaaggatcctttttcactcattcaacaaatataaccattcaatgaatggtccatgccttgaggtgaggatcatcaaggtgtctctgtaaatagcctggatgcaatctgaggggagttgttttgacggtggtaggtattaagttgagggaggcagtgtggaattaaaaccagagaactgtttttgggtactggtaattgttaatatatgtgcctgtggatgttggaacttcttggctgggctgaaggaatcctttgaaagactgatttcggcagggcgcggtggctcacacctgtaatcccagcactttgggaggccgaggtgggcggatcacgaggtcaggagatcgaatcacgaggtcaggagatcgagactatcctggctaacaggatgaaaccccgtctctactaaaaatacaaaaaattagccgggcgtggtggcgggcgcctgtagtcccagctactcggggaggctgaggcaggagaatggcgtgaacccgggaggcagagcttgcagtgagctgagattgcgccactgcactccagcctgggccacagaggagactccatctccaaaaaaaaaaaaaaaaaaaaaaaaaagactgatttcatgtagtaaggatcccgtctatgaactctatgaatatgaggtaagaatgcatgaactaagccaacttagctgtattcttctggaaaatgggatgtttcttgataggctagattagtggttcttaaaagttttttggggtcacttatccttcagagaatcggatgaaagacactgggccctcaagttagaagatgagcataagcgcaatcacatgatttatatatatgattttaggaacttaaactgtaatgaaatagagccaatttatatttagatctcatttgaaaacctttcattttcattgttcgggtgtgtggatgttagtatgagtttaaggtgaaggagtctatgttagtatttgaacatgttgacaggatccatatttttaatttattctttttatcgtctgcaaacatttctgcagtattagtaaatgactctgtatttggtaaaaagggaagctaatgtcgcacaagtatctatggctttgttctttgtcagtatctttttgttctcaaactctgagaagcgtctttttttcagttttggattgggcctgaggtgatttgaagctcctgtcttggagtttaacttagttataacaaacactgagttaatcctatgcaggagacacaaagataattaatatatggtctctgtgcttgaagagacgctaattttctgtggttgaagagatgctgtgaattgtgtgatagtggcagctctcaaaaggacaaggaagagggaaacatattcctagaagctgaaattttattacccaattgcaaagactttttgtcactacttattcttaggaataaccataaagtgtttattttattctgtatggaactttgtactttaaaaaaatatgttttgtatcatctggtgtttttgtataaaggaactgttggtttgaaaagaaggtaaacatcatttatattccttaccttgttttgggatgtatctctacagtgagtttatgtaaaaaggtcttaatgtcatttttgggtatacatacatgtagaaagccctcctgatataaaatccagtagctatttgacagactacccattaatttattactggaacttaaaaataattactgtacttttaaaagaacaagaaattggtcaggtggggtggctcacgcctgtaatcctagcactttgggaggacgaggcggatggattgtcagagctcagaagatcgagaccagcctgggcaacacggtgaaaccccgtctctactaaaatacaaaaaattagctgcatgtgttggagtgcacctgtagtcccagctactcgggaagctgaggcacgagaattgcttgaaccaagaattgcttgaactgggagggggaagttgcagtgagctgaaatcatgccactgcactctagcctcggcatcagagcaacactctgtctcacaaaaaaaaaaaaaaaagcaagaaatgtaaaaaggtgttttaataggacagattataggattcagtgagataatggagaagttttaggaaaaattgtctgatagtcctttctttctattgacatggcccctgtataagaatgctatgtaaatttgtgaaaagtttaatattttctctaatttttaacgggtagtaggttcatggtgttatttttctcaaaacgtacatgtgatatgtgtgtgtagtgtgcatatatgtgcatgtatgtgtatacaatttctttatttttttaattgagattaggtctcgctatggttttttgtttttgtttttgtttttgagagagagtttcgctctcctcgcccaggctggagtacaatggcacaatcttgcctcactgcaacctctgcctcccaggttcaagtgattctctttcctcagcttcccaaatagctgggattacaggcgcgtgccaacacgccctgctgatttttgtatttttagttgagacagggtttccccacgttggccaggctggtcacgaactcctaacctcaagttctccagccgtctcggccttccaaagtgctgggattataggagtgagccactgcacctggcccaggtcttgctatgtagatcaatctggtcttgaactcctggcctcaagccatcctcctgtcttggcctcccagtttgctgggattacagatgtgagccagcatgcccagctctttttacctgcttaccaaatccaagattttctccaaaatgaactggaatagccttcttactgtgttaattttgccttggtggggaagcctaagtcttggaactaaattggggtggttatgacagttctctttttaaagctgatcagtatttcagtatttcacttgttgttgttttttttgttttgttttgttttttttgagatggagtcttgctctgtagcccagtttggaatgcagtggcaggattttgactcactgtagcctctgccacccggattcaagtgattctcctgcctcaatgtcctgagcagctgggtttacaggcacgcaccactacacctggctaatttttgtattgttagtagagacagggtttcaccatgttagccagtagccaagctgttctcatactcctgacctcaagtgatccacctgcctcagcctcccaaagtgctgggattacaggtgtgagccaccacgcctagccaaacccatctctttcattaaaccacctcattttggttcagaaacaagactgccatgtatgtatttaatgcttattatgtgccaagcactattccaggtactaagatacagtgatggacaaaacaagatcccttctcctctatctcaggacttattaatttgggcattttcattttccaatataggatcttttagtactggtataggattcctgaaggaattcctgaaatataattatttttctgctagagcaaatcaattttgttttttgttttttttttgagatggagtttcgctcttgtcgcccaggctggagtgcaatggcgcaatctcggctcactgcaacctccgactcccgggttcaagcgattctcctgcctcagcctcccaagtagctgggattacaggcattagccaccacgctaggctaatttttgtatttttagtagagacagggtttcaccaggttggccaggctggtctcgaactcctgacctcaggtgatcctccaggctcagcctcccaaagtgctaggattacaggcaggagccaccacgcccagaagagcaaaattcttctgttgacaaaaatttctttcctctgaggaagagacactgtgtgcctgtgttttatccaggaattccattggatagtttgtcctttgggatgtcagtggattaaatcctccattaagaatcaaagtacttggctgggtgcagtggctcatgcctgtaatccctgcactttgggaggctgaggcaggtggatcacctgaggtcaggagttggagaccaacctggccaacatgatgaaaccccatctctactaaaaatacaaaaaattatccaggtgttgtggcaggtgcctgtaatcccagctactctcgaaaaaacagaaacaaaaactctgacatgtagagtatgtagatgtagagaaaaaagtaaaatgattgttgaaaaaaatgtctattttttatcttctaaatagctttgtgtgtcagagatcagaacgctcattttacatgatatcaagaaccagaatgctagatagctagaatggttgttaacttcctagataaccattgtagaggaacacataaggtaaaacaaatgaataaaaattaaaaaaaaatgagatagccaaagatttgaagctctttacccattaacatgataatcatttcgactttgaatatttgtagaacaagagtcagaactcagaacaaagatctctgaggaaataaaaaaaaatcaagctgcctcctaatttctcatttagtctgtcattgggcattgtcaaactgtcaaactatatttagagattctggttttcatctggagacttagtgagttgtgtaatatcttgaatacacatataagatcttgccaggtggggtggctcatgtctgtaatcccagcactttgggaggatgaggtgggaggatcgctggagcccaggagttcaagaccagcctgggcaacatagcaagtccctggctctatttaaaaaaaaaaaaaaaaaaaaatcctcaatgtagaactttaaatttatccttacgtgttacatccagttgatttgagaaaatatgattctgaattttccatcaattggattggcagtccctttcagctttacagctttacatcatctacagatttgttaagtatgttctcttggtcttctaattcactgatggagtttttgaataggtcgggtccaaagatagagtcctatgaaacactgttggaaacttgtctctgtctgtctcttttttttttggagacagtgtcttgctctgtcgttcaggctggaatgcagtgggacggtctcagctcactacagcctctgcttcttggactcaaagagattctctcacctcagcctctcaagtatatgggactatatgcatgtgcgaccaagcccagataaatttttttttagagatatgttgacattttgcccaggttgggagacttgtctcttgattccattcagtattgtgtgggtttggataggccatctaattataaaatcattgggctggtcatggtggctcatgcctgtaatcccagcactttgggaggctgaggtgggcggatcacctgaggtcaggagtttgagaccagcctgaccaatatggagaaaccccatctctactaaaaacacaaaattagctgggcgtggtggtgcatgcctgtaatcccagctacttgggaggctgaggcaggagaatagcttgaacctgggaggcggaggttgcagtgagccaaaatcgtgtcatcgcactccagcctgggcaacaagagcgaaactccgtctcaaaaaaaaaaaaaaatcatctagctcacattttctccttgtcttcttcctattagaatttaagttcaatgagattagaactctctctctctctcattctctcatatatcccaagcatctaaaacagggattgaaacatagtaagtactcaataaatgtttttgaataaatgaatgaaggatagctgggcgtggtggctcatgcctgtaaccccagcactttgggaagccaaggtgggtggatcactggagctcaggagttcaagaccagcttgggcaacatggggaaaacccatctctacaaaatatggaagaattagccgggcatgacagcacactcctgttgccccagctacttggagggctgaagtgggaggatcgcttgagcctgggaagcagagattgcagtgagccgagatcaagccactgccctccagcccgggtgacagagtgagaccctgtctcaggaataaggatagatatgaagaattcgtcagatgccttgttgaaaacatcatacattgtctacatggaattcctccatattgtaaaatgaatctaatttataccaacaacgtttggcttttttgcagaaaaggaagcaaatgagctgatggaagatctgtttgaaactgtgagtaatgatcctcaagtgagaacatgggattgtaagttggttctccaacaaaatgtgtcctttgatctctgtgatgctccttctagaagagggactgaaccaattctccttttagtctacctgggaaagaatataatgacaaaagaaatttgctaactgctagactcttgattatccacatgtaggttattcttactaaaattttccttgaagctttttttttttttttttgaggcaaagtcttgctctgtcacccaggctctggagaatacagtggtgaaatctcagctcacagcagcctcgacctccagggctcaaaacaattctctcatctaagcctcctgagtagctgggactacaggcacacacctacaggcccggctaattattttatttttttgtagagacagggtcttgccatgttctggaactcataggctcaagtaatcttcctgcctcaacctcccaaagtgctggaattacaggtgtgagccagcacatcttgccccttgaaaacttttgatggcttcccctactgtcatttggtgtgtccttaaagattgccaactagttttaaagtattttgcacacaaataattaccttttccataaatttgtctaaaaagatatttctgtttaagaaattgatcattttgagttatcctagctctgtgcttactgatacaagttgactggttgagcaacttctttcctggcataatagtcattccatatgtgggtttgtaggagtcctgaagtgagaaaggttctgatgtaggctctttctgggtgccagcattattaaagtattgtttatagttttcacttttccttcccaacactggagcaacattcaaaagcccattccccaggaaaaccctccctttcctttgcccacagttccaagatgagatgggattctccaacatggaagatgatggcccagaagaggaggagcgtgtggctgagcctcaagctaactttaacacccctcaagctctacggtaggctagttgaagaccttgagatttggaatagaggaagagtttatttctgaaaaggttttcagaagttgcagttaacaatttttcatccccagccagcttctgttactgatgtaaggatgcagagtcctgtcaggagttaggtgtcaagtgaagtctccttgttatggggcagtgcagctgtaggccaagctgtatctgtttgggaagggagaaaaaacagtagctggcatccatatccacttctccgggtgagtggtgctggagaggtatgtaggactcaatgtggccagccacacaaactaccctatattgtaatatccagtctgtcccttttgttctttttatgtgccattaatatctgctaaatgtgactgaaaatttgttagtcacctaggcattagtggagcaaaccctgaagcacctgcagtaaggagtctgaaacatacgtgctgacctttttgcctaaagttggcacttgtgttacagcatccagaaagtagaggctttaattttttcctcattttgtggtggatttgcatctgcactttattctgttgtagcagcatataatcattaggtcgatggcgagaggtcaggatgcagtttgtgccataagtggaacaaagcaaagagaatagtccctgtaattagtcctgtgtttgaacttaacagcactactaagcagagagcttgggttccatctgaaagctagacctttagggattttccaatttagtgaaaaaagataagataggccaaccaatgtcttaaaaactagaactactagtcattctccattacaacaaatatcacaatacaactacatcaaaaatctcaagattgctaagtcagtatttgacccattattttaatttatagttcatagaacaaaattctggtatagcagaatggaaccattcatcctgggaacgtataataggatctgattaataaatattttggttttgctgatcaactctttataacttcttaaaatttggaaaatatagaactaatttaaaattcctgttagaatccagttaccttctggtattcaatggaatatagtcatatatcatctcatggtcataccctctgtgaaatctatcattaaacgattcatcattgtgtaaacatcgtagaatgtacttacataaacctaaatggtttagcctactgcatacctattgctcccaggctacaaaacctgtacagtgtgttactgtactgtactgaatactgtaggcagttgtaacacaatggtaagtacatatgtatgtaaacatagaaaaggtacagtaatcttatggagccacctctgactatgtggttcgttattgactgaaacattctgtggcgcatgactgtacttgggcagcttctgcttctctttcgattgcaaatacaaacctgtttttgttttaatctttgactaaataaaaatccctctgtaagtccatagagagtaagcacatcttaaaacacaataaggaagagagaggagaaaaagacagtcaaaacaaaaactctggggcttcccttatcaattacctaaataatccttgttaaaactaagtgcaggctatgtttccattttctacttttttatgcttcttctcttctgttccttcagtggtggtagcgcggatgttcaaattttcagttctcagtaaagattgtatagacagtcccacggtcttcaggtttttactctgtgctacccaaacctacagtaaatactataaaagaaaacttattcaaacgtaatctttatctgcaaaaactattgaaaaacgttaccatttaactattgctgtaatatagggggttccttgaaatatgataacctgcttgttatagctacttcagcagatcttatcctgttgcatagggtatcagcatatgcttaatcatttaggtatattattctccctttatttctttctatgtaaacatagaaaaggtatagtaatcatacatagaactgacatgctaggtattggaatttttgcttcagccctgcaaacaatctttcaggagggtatggatgggaagttagggttaggaaccttggaagaggaatttaaagggctaaaagaagatagccttcatggataatattttaactaacttctccgttctgttcatttgaactaccatgtacttcagttattttggtatatccttttcctgcttcatgctagaaagtctttgacttgttaagaaagcagggcagtgcagcctgagtagataggataatgggacaagctggacctgggatgggagtaacatcccagggagtaacaagtaatgagagaagaaatgagaatgatgagttcccaccagctccttggctgctttcttacccatatatttctctgtccctagttttttgtttaattttttcttcatttgtatattatttggaagaggaattgtagaggaatgggatggggtgtaatacagaatcatttgatgcatgctaactactttgggaaaagatttgtgtaaggctgggagtttgactgttggctaaagtgaaaaggggggattagtagggaatgaaaattgttcaggctctttgctcatcattgcaaagaattggatgtgttgtggacctaggaaaacactcaaattcagtcatccccgtttgggataggtttgaggaactactggccaacctactaaatgaacaacatcagatagcgaaggaactatttgaacagctgaagatgaagaaaccttcagccaaacagcagaaggaggtagagaaggttaaaccccagtgtaaggaagttcatcagaccctgattctggacccagcacaaaggaagagactccagcagcagatgcagcaggtaacactttccttggtcatattaatattgaattataccaaggcctaactctgaggctttggtataatctaaaattagcagctttgtaaatgtcagagatagttaccttactacgtattaaaaccgtagtatcttcacatcagttaggagcttgagaagtcatcatgttcatgtcctgtggctcagggaagacagcacataaggaccctaatggtattcggaattacagatttcaaagagtcctcagtaatctattctgaaatttaaccttcactgtgacaagtagttttttttcccttttcccttttcttttttcttttttttttgagacgtagtctcgctctgtcacccaggctggagtgcagtggctcaatctcagctcactgcaagctctgcctcccgggttcacgccattctcctgcctcagcctcccgagtagctgtgactacagggactcgccaccacacccagctaattttttgtatttttagtagagacagggttcactgtgttagccaggatggtctcgatctcctaacctcgtgatccacccgcctcggcctcccagagtgctgggattacacgcgtgagtcactgcgcccggccttttccttttctaatctcagttcctcctctgtttagaggttaaacttcctctggttctgtcattttgttcaagggaacatgtctgagaaatttatgccaagatcctacgttgttctcacactctttgcagaaagcaaaatttgtgtcataaagttgcaaacatcttagttaatgactctctggtggctgggtgcagtggctcacacatgtaatcccagcactttgggaggctgaggtgggaggattgcttgagcaggggagttcaaaagcagcctggacaacatagtgagactctgtctctacaaaaaataaaaataaggctgggcacagtggctcacacctgtaatcccagcactttgggaggccaaggcgggtgaatcatgaggtcaggagtttgaggcaagcctggccaacatggtgaaaccccgtctctacgaaaacaaaaaattagctgggtgtggcggcgggcacctgtaatcccagctactcgggaggttgaggcaagagaatcacttgaacctgggaggcagaggttacagtgagccgagatcacgccattgcactccagcccaaaagtcagtgcgagactctgtctaaaaataataataataataataataaaataaattagccaggcattgtggtcacagctacttgggaggctgaggtgggaagattgcttgagcacaggtggttgagagggcattgagtcatggttgcaccactgcactccaagctgtgtgacagagcaagaccctgtctccagggggaaaaaaaaatatctctgggctcctgaaatggcagtgtcataacatatcactgcattattttctttctctccccagcatgttcagctcttgacacaaatccaccttcttgccacctgcaaccccaatctcaatccggaggccagtagcaccaggatatgtcttgtaagtttccaaattgccgtaattctatagactagaatataaaattagcttggcaggttatttctcacagttattctctcaggtatttttgattgctgtggcttcctatgtttgctgagtgaacataagccactgattcacatgaaaggacaaagagtgtattcaattttttcttttcttttttgagacagggtcttgctctttcacccaggatggagtgcggtggaacaatttcagttcactgcaacccctgcctcccgggttcaagtgattctcctgcctcagcctcccaagtagctgggactacaggcgggcaccaccacgggtaattttttttgtatttttagtagagacagggttttgccatgttggccaggctggtctcgaattcctgacttcaagtgatctgcccacctctacctcccaaagtactgggattacagccatgagccactgcgcctggcctgtccttctgatatttttattgggtcctcctcctcatctttagattcaccctgacttcttaggtttttggtaccgctattcatttcatagatgttgaggctgggcatagtggctcacacctgtaattccagcactttgggaggctgaggtgataggatcacttgagcccagtggtcaagaacagcctgggcaacatagtaagacccggtctgtgttttttttgttttgttttgttttaatttaaataatgaagtaaatatacatgtagatgttgaattcattatccattcatgaagctcaatattagtgttttatgtgtagagctagttttgctcatgacgttttgaggtattttgagctttttttttttttttttttttttttgagacggagtctcgctctgtcgcccaggctggagtgcagtggcgggatctcggctcactgcaagctccgcctcccgggttcacgccattctcttgcctcagcctcccaagtagctgggactacaggcacccgccactatgcccggctaattttttgtatttttagtagagacggggtttcaccgttttagccgggatggtctcgatctcctgacctcgtgatccgcccacctcggcctcccaaagtgctgggattacaggcgtgagccaccgcgcccggcctattttgagattttaaatttgaaatttggccaggtatggtggctcatgcctgtagtcccagcactttggtaggtcaaggtgggaggattgcttgagcccaggagtttgagaccagcctgggcaacatagtaagaccccatccctaccaaaaaaataaaaaataaaaaaattagctggggatggtgccgagtgcctgtagtcccagcaacttgggagactgaggtaggaggatcacttgagcctgggacgttgagactgtagggagccgtgcttatatatcactccagcctgggtgacagagtgagaacctgtctcacaaaaacaaaaccatactttacctcataaaaattgcctcaaacttttggacaggtaatgataatactctcagcttcttcagtaagtcttctttggattttgaagagtacatttgctagtattctaaaacttccttggtgatcaacaggatgtcttcatctcttactgtattcagaggaggatgaggagtacttggttgtaggcattattctgagaccaaaagacaaaacaattttaaaagtaatggtcctggtcgggtgaggtgactcatccctgtaatcccagcactatgagaggccgaggcaggcggattgtgagcccaggagttcgagatcagcctggccaagatgggaaaacgctgtctctgcaaaaaatacaaaaatcagctaggtttggaggtgtatgcctatagtcccagcttctcaggaggcagtgggaggatggcttgagcctgggagggggagtttgcagtgagctgagatcatgccactgcagtccagcctgagcggcagagtgagaccatgtctcaaaataaattaattaattaaattaaagtaatagtccccattcttgagactcttaattctagctcgggagctagaccatgtattccttagtgagaaacagtttaaaaataaaacaagaatataatccctgaatatctgagaactcaggcataatcttaacagtagtttattgtgaaagactttatgattatttttacctgtttttatcctgtagtaggaaggtcagcttctcatttagattctgaaggctattggtattaattgtctggaattgtcttagatcttccttgtgtcgtgttttcccagaaagagctgggaacctttgctcaaagctccatcgcccttcaccatcagtacaaccccaagtttcagaccctgttccaaccctgtaacttgatgggagctatgcagctgattgaagacttcagcacacatgtcagcattgactgcagccctcataaaactgtcaagaagactggtaggagacagatgtgtcagctttaagtttttacttgcggtgagaggtggtgggaatcttatcccatagataacttcctaggatacttgcctaggaatggaggacacaggacatttgtaatttcttccttctctcttttatcctccctttgtactcattatccaagttctagaattacatgataatctccgggcctgggtaaggcatggaggcagtggacagtataggaatatgggaggtagagatctgaggctcagtgctaagaattggactacagcaatatgaggggtaagtattaggaatcagatcaagataaactggggcctggtaaagatgaaagtcaggtggtaaagttcggtcatgtttagctttttattctcttcattaagatcaactaactttatttaccataatgattgtagcataggtgatatctccattctgaatgaaatgttgacttgcaagttaggcgtaaattagagattgtacatttgccgtgttcagtattttaaagaaatttgccggtttagattctaccttgcattggtttagtattttttgagaaaatatttgctatttacttaagccaaatatttacttctgatttgtttgctgacttagcaaattagttgtggtttgttctggatttgggtttgtctttggattctattttaaatccctaagtcttatcattacattgaatgtagttgaatttaagtgtactatatcatagacacagatcccaaactactttaatagctatattatatgaaatggtaatgaaaacgtgatttaataccaaattatagtattatcttacacatctagtgtcctgtgtttttcttctggagatataaaaatgacacttatggaaggagaaatatggatatagtagttttgtctctagaaatgcagaggtgcctaaaattgagaggctgagagagggagacagaaatgaatgagactgaattgtctcattccttttatggttcttttgttcccaacctcaggaggaatctgggagaacttaatgaaagttaagaaagaatgaaataaaagtaaaatttggaataccaggtttgtgagggagattaaagaagttggaatcttttttcttttttttttttttaagatggagtctcgctctgtcacctaggctggagtgcagtggggtgatctcggctcactgcaacctccgcctcccaggttcaaacaattctcctgcctcagcctcccaagtagctggaattacaggtgcgtgccaccatgcctggctaatttttacatttttggtagagatggggtttcactatgttggccaggctggtcttgaactcctgacctcaggtgatccacctgcctcggcctcccaaagtgctgggattacaggcgtgagccagcacgcctggcctggaatcttatcctggaagaaaaaagcattgttgaaggtctgttatccttcagagatttaaaggggaaaggaggtaaaacatttttgagcatacactatgtgacaggtattactaggtactttttaagtgtttgttttactttgtgaataaagtgttacacgtaagaaagagtaagagaggccgggcgccgtggcttacgcctgtaatccaacactttaggaggccgaggctgtcggatgacaaggtcaggagatcaagaccatcctgtctacagtgaaaccccgtctctactaaaaatacaaaaaatcagccaggcgtggtggcaggcgcctgtagtcccagctactcaggaggctgaggcaggagaatggcctgaacccgggaggcggagcttgcagtgagccaagattgcgccacgcactccagtctgggcgacagagccagactccgtctaaaaaaaaaaaaaaaaaaagtcaacttttattgccagtgaatgggactccctttagacctaatgttagttgaggaaagactgtggaaactctttggggagtggtaggcagatgggagggaatcaagttagataaggacagctctacctaaatgcaaaaatgcattcacaggctttttgaagccctcttttttcctagaagttgatttatcagagatttattttcttatagccaatgaatttccctgtttgccaaagcaagtggcttggatcctggccacaagcaaggttttcatgtatccagagttacttccagtgtgttccctgaaggcaaagaatccccaggataagatcctcttcaccaaggctgaggacaagtaagtgtttactctgggggatcaaatatcccaaggagaagatgtagttcctttgaggagtttaggggaagtaagacttgtataataagacatggacacaaaaggaaaagcagtatagatgagcagagtcctctagaacgtgcttgttctagcagtgccaaatactgctttttggggggatgttacacacatttttaaaatgttttagactggacatggcggctcccacctgtaatcccagcactttgaaaggccaaggcaggaggttggcttttctaatgttattatttatttagagacaggatcttactctgtcacccaggctggagtacagtgttgcaatcacagctcactgcagccttgaactcctgggatcaagtgatcctcctgcctcagcctccatggagtagctgggaccacaagcgtgtgccaccatacatggctgattttttttgtacaggtgagggtatctctgtgttgcccaggctgctcttgaattcctgacctcaaatgatcctcccactcctggcctcccaaagtgctgggactataggcataagccaccacacccagctagattatgaacatttttatggccctttgtgtgtattgccacactgttaacagcaaatatgtatatatgtaaccatgattatatatgttatgttagagggtagtattggtgccagtttaatttgtctgacggggtacctattattcattttatatttgttttattagaatcattctccttcccatgtattctctttgaacttcctttgtgttgttaatatacagctcatcatgatctgacatttattgatgatttatgactagtttctcttgctcctacttaattgtgaactatttgattcttattcatagtacttaatcactactcactaaatacctgaaattttctactgagtagtcaccaacttgtagtagtcactacaagaattagttgtagaaaaagtagattggccagccatggtggctcacacctgtaatgacgacactttgggaggccgaggcaggaggatcacttgaggccagaagttcaagatcagcctaggcaacaaagtgagaactggtctctacaaataatgaaataaaacattagttaggcatggtagcaaacgtttatagccacagatactcaggaggctgaagtgcgggaatcgattgaacccaggcattcaagactgcagtgcactgtaatcatgccactgctctccagcctggacaacagagcaaaaccctgtctgaaaaaaatgaaaaagtagattgggccacacgccatgggctcatgcctgtaatctcagcactttgggaggctgagactggagaatcgcttcagcttaggaagtagcagctgcagtgggctgcgatcacgccactgcactccagcccaggtgacagagtgagaccttgttttaagaacaagtaagaaaaagtagattgtaaaatgtgttagtctggggaggccctttagaaggaaggactgtgaagtgagatttagtgttattgctcctttctcagtttgttagctttaggactgaagcattttgaagggactgagtttcttaaccctctaatcagcaagtaccttctaacctgcaagactgcccgccaactgacagtgagaatcaagaacctcaacatgaacagagctcctgacaacatcattaaagtgagtgtttcctgcatgcactatccaggcacctcaccaacacatatctgttcttttctcttgttattctcaaagaaaagaagaaccttcttttatctaaagctaatttctcctacttatatactagattaattcccctgttgccttttcagggacattgattcattcattacgttcctctggagtatcttcatcctcttaaaagattccacaaatccatgtttccctgtaataattctctttcttgaactttctagaaatgatatgcagtattccacttacatgctttgggtttttgttttgttttgtttttttggtcagacataatcttgcactgtcacccaggctggagtgcaggagtatagtggcatgatcttggctcactgcagcttccgcctcccgggttcaagtgattctcctgcctcagcctcccaaatagctgagattacaggcgtgcccaccacgctcagctaattttttgtatttttagtagatacgggtttcaccatgttggccaggctggtcttgaacttctgacctcaagtgatccaccagttttggcttcccagaggctaggattgcaggcataagccaccgtgcccagcctatatactttttctcaattttgtgtttgtatgtatgcatgtatgtgtgtgtgtgtgtgtgtgtgtgtttgtgtgtgtctgtgtctgtatgtatgtatgtatgtatgtatgtatgtattgagatggagtttcgctcttgtcgcccaggcccagcctatatactttttctcaactctttttacttattgattgattgattgagatggagtctcgctcttgacccccaggctggagtgcaatggtgcgatcttggctgactgcaacctctgcctcctgggttcaagtgattctcctgcctcagcctcccttgtagctgggattacaggcccctgccaccatgcccagctgatttttgtatttagtagagtcggggtttcaccatgttggccaggctggtctcgaactcctgacctcaggtgatccatctgcctcggcctccctaagtgctgggattacaaatgtgagccattgcccccagccttcttttttatttagatatttatttatgtttttttttttttttagagacaggttctcactctgtcatcctggctggagtgcatgggcacaatcataggtcactgcaacctcaaattcctgggtgatccttccacttcagccttccaagtagcttggactacaggtgcatgccaccaaggctagccgattattttattttgtgtgaagacagggtgtcattttgtttcccaggctggtcttgaagtcctgacctcaagcagtcctcttgcctcagctcggcctcccagagtgttgggattacaggcgtgagccatgatgcccagcctttggtttcattgtgtttttgtatttttcttgagacaaggtcttactctcctgcctaggctggagtacagtggtatagtcatagctcactgcagccttgaactcctaggctcaagcattcttccaacgtcagcctcccaaggagctgggattatatgcattagccactgtgcttggccattaaatttatttatttatttattttattttatttttttgagacagaatctgtctctgtcacccaggctggagtgcagtggcacaattttagctcactgcaacctccacctaccgggttcaagcaattttcatgccttagcctcctaagtagctgggactacaggcatgcgccaccacacctggctaatttttatatttttagtagaaacataatttcaccatgttggtcagtctgatcttgaactcctgatctcaggtgatctgcccacctcggcctcccaaagtgctggaattataggcgtgagcctctgtgcctggcaaaaaactttttttttttagggatggggtgtccctatattgcccaggctggtcttcaatttttggccttaggcaattctcctgtctcagcctctaattggtactgcctggtgtattggatttaggccttacttattaaccataaaccacggaagccgaagatttacctctctcctcactcccttactcccaccacaaacatgcacattttctgctctccaaactcctcactagtagttatggtagaattttggttagattgtattcagggtttacattgtaagattttaaggactgttggctgggcgcggtggctcacgcctgtaatcccagcactttgggaggccaaggcaggtggataacgaggtcaggaaatcgagaccatcctggctaacatggtgaaaccccagctctactaaaaatacaaaaaactggctgggcgtggtggcgggcgcctgtagtcccagctactcgggaggctgaggcaggagaatggtgtgaacccgggaggtggagcttgcagtgagccgagatcgcgccactgcactccagtcttgccagagcaagactccgtctcaaaaaaaaaaaatagattttaaggactgtataaatgctcttcacagctcagctatgttactgtgttaccttgcctttcctgctgaacattttgtttcccagatcatcttctttcagtgtgttcaggtattctagatattctgtcactttcatcttgaagaaattgctccctgagccctctgacattattccactttaagcgtgttgctctccatgttgctgcactgatgtcttcttgggctttttcttcaccatcatcccaggaattccttttgcctcatactgtgttagatcctcttatttcctgaattccacatctttgcttttgcattactttttttttttttttttttttttttgagacacagagtcttgctctgtcccccaggctggatctcggctcactgcaacctgcaaccttggtcttggtcttgaactcctgacctcaggggatccacccacctcagcctcccagagtgcggggattacaggcgtgagacaccacgcctggccttgttttttgttttgttttgcttttttttgagaccgagtctcgctttgttgcccaggctggagtccaaaggcgcgatgatcttggctcactgcaacgtccgcctcccgggttcaagcaattctcctgcctcagcctcccgagtagctgggattataggcacatgccactacgcctggctaattttttgtatttttagtagagacagggtttcaccatgttagccaggatggttttgatctcctgacctcttgatccacccgtttcggtctcccaaagtgctgggattacaggcgtgagtattacttctttactttagtggaacacattctagtagcttttttttaaaaaaaatttttttctgaattttaaaaaattgaggtgggggggtctcagttttttgcccaggctggtctcagactcctgggttcaagtgatcctcctgcttcagcatcccaaagtgctgagattataggcatgagccaccctgcatggccccattccagtagcatcctgagggagagtgcttgggaagggaattttcacatttaaaccatctccggggccgggcgcagtggctcacgcctgtaatcccagcactttgggaggctgaggcgggtggatcacgaggtcgggaaatcgagaccatcctggctaatgtggtgaaaccccgtctctactaaaagtacaaaaaaattagccgggtgtggtggcgggcgtctgtagtcccaggtactctggaggctgaggcaggagaatggcgtgaacctgggaggtggagcttgcagtgagccgagatctcgccactacactccagcctgggtgacagagcgagactccgtattaaaaaaaaaaaaaaaaaaatctccattcatggtcttttgattgtatcgatgtcagtttcctcgtttttgtttttgttttattttttttctttttttgagacagagtctcactgttgctcactgcagcctctgcctcctgggttcaagcgattctcctgcctcagcctcctgagtagctgggattagccaccacacccagctaatttttgtatttttagtagagatggggttttgccatgttggccaggtgatctcgaacccctgacctcaagtgatctgcccaccttggcctcccatagtgctgggattacaggcatgagccaccacatcctccatgtctggccagtttcctggtagtaatattgtactgtgtaccttgtttatatgtatagctcttgtttctatgtaacataaaaacattatattgggagaaactggttgaagggtacatgggacctcttggtactattttttgcaatttcctatgaatataattatttcaaaataaaaggaaaaaataatactctcctctgtcactgtatctagaattctagataggaaataatttttttaagaagcttttaagggcctcacttcattttcttctaactcctagtgtggtgttaagaaatttcatgccatttaactttttttttttttttccgagacagggtcccaccctgttgcccagtttggagcgtggctaaatcatggctcactggtgtctccaacccggtgtgcaccactatgcccagctaattttttttttttttttttttaagacatggtctcgttatgttggccaggctggtctcaaactcctggcctcaagtgctcgtcctgtcttggcctcccaaagtaatgggattataggcatgagccatggccccatttaactcttgagtctttgtgtaacacctgtttttctcaacctctgacagcatgcaggatttttcctttggcttcaatattttgaaaatgcatgataatatgccttagtatttgtctatttttatccatggttttttaaaaagtactttctttttgtttttgtttgtttgtttgttttgagacagagtctcgctccattgcccaggctggagtgcaatggcgtgatcttggctcactggaacctctgcctcccaggttcaagcaattgtcctgtttcagcgtcccgaggagctgggactacaggcgctcaccaccacaccctgctaatttttgtatttttagtagagacggggtttcaccttgttggtcaggctggtctcaaactcctgacctcgtgacccacccacctcagcctcccagagtgctgggattacaggtgtgggccaccatgcctggcgtatccatggttttaaggcacacgtgataaaccttattcttctgcagaaataatttttttttttttttttgagatggagtctcactctgttgccaggctggagtgcagtggcgtgatgtcggcccactgcactctccacctcctgggttcaagtgattctcgtgcctcagcctcccgagtagctgagattacaggcacgcgccaccacacttagctaatttttgtatttttagtagagatggggtttcaccatgttggccaggatggtcttgatctcctgaccttgtgatctgcctgcctcggcctcccaaagtgctgggattacaggcataagccaccacgcctggccagaagtaatttgtgtttaagttttagttttgtgtcatttttcgtgcacacctttgtacttttgttgggggatggggcggggtgtcggggttggagtcttgctctgttgcccaggctggagtgcagtggtgcagtcttggctcactgcaacctcttaattcctcagttcaagtgattctcctgcctcagcctgccaagtagctaggatcacaggcgtgcaccaccacacccagctaatttttttttgtactttattagagacagggtttcgccatgttggccaggctggtcatgaactcctgacctccagtgatccatcctcctcgttctcccaaagtgctggcattacaggcatgagccaccatgcccagccctttgtacattttttaatgtaggatgccatttgtccacttgactctcccactagtctgtaagctccatgagagcaggaattgcttcccttatgtgtgtgcttagcttttagcacagtgcctaggatatagaaaacatcttatgttcatcatgttggatgaacagatgcttattgtcatggtttaagttcagttcttatcttctttttttttttttgagatggagtctcaccctgttaccaacgctggagtgcagtggcatgatcttggctcactgcaatctccaccctaccacccccactgccaggttcaagcgattcttttgccccagcctcccaagtaactgggattacaggcacccaccaccacacccagctaatttttgtatttttagtagagatggagtttcaccatgttggccaggctggtctcaaactctcaatctcaagtgatctgcccgcctcagcctcacaaagtgctgggtttacagatgtgagccaccaaggccagcctatttactcttaaaactgaactgcctcggtctttttttttttccttcccttctgatgcccttcacaccatcatttgcttaaagtctttgatgtgtccattttatagattacgatgctgtctttgcagctgttgagcaggaacaaatcttacataagattgctcttagcatctgcttccttttctctctgtgacctaaactctccccttcctggcaaccagaatggagatcatcagttagaaaatattgaatagggctgggcgcggtggctgacgcctgtaatcctagcactttgggaggccgaggcgggtggatcacgaggtcaggagatcgagaccatcctggctaacacagtgaaaccctgtctctactaaaaatacaaaaaaatcagccgggtgtggtggcgggcacctgtagtcccagctactccggaggctgaggcaggagaatggcgtgaacctgggaggtggagcttgcagtgagcggagatcgcgccattgcactccatcctgggcgacagagcaagactccgtctcaaaaagaaaatactgaataactataaaatctttaaatagagattagtttaatttgaaatgtacaagtattcagcatatgctattcgtatatgtgtgttcatggatgtttgtgtatgtggtcttgtgtgtgtgtgtgtgtgtgtgtgtgtgtgtgtgtttctcttgatccaccaccaccccattcaccagcctgacagaagacagtgtttccagaaggaatgtaattcatgcgcatttttttcatgttaagttttataagaagaccaaacagctgccagtcctaggaaaatgctgtgaagagatccagccacatcagtggaagccacctatagagagagaagaacaccggctcccattctggttaaaggtacagccctcttcctcgaagtctgtaggaggcagaaggtcactgaaagttctgagagaatatcaaggacttccttaatcgtctaatgctttagttgtagaactaggacttcaggaatcttcctgattcacctttcttcccttacttttctgcccttctccgggtgattctacaacattttcaaaataatgggtaaaatggtaatttgctaaaggaaattcagagaagagtttctaaagtgtataattggactgtggtctttgtagaaatttcatatgcagagtcccttggaaagatgccttgagcttgtctcaggtccctaaacttagaaagtcctattctttttcccaaattctgacatgtgctggatcagagtgttctcatttccaataggccagtctgccatccatccaggaagaactgcggcacatggctgatggtgctagagaggtaggaaatatgactggaaccactgagatcaactcagatcaaggcctagaaaaagacaactcagagttggggagtgaaactcggtacccactgctattgcctaagggtgtagtcctgaaactgaagccagttgccgaccg

SEQ ID NO: 15005 - DNA, 2011 bp, Homo sapiens
gtgcgcgctacatggccggagtcgggcgaagcgggggaccgtggggaagaacgcgaggagggaggagtgggaggttgggggtgtcgctaggcgcccttagctccctccctctggaggagctgccgcggccactctgctgccgccgctgccgccgccattttgggttcgctttgcgaggggaaacgatcccagtgtcggttgcgggatccgcctcctctcagtttgcccctttagccctccacctttcccttctcctctctcgcatttccgccagtcggcttacccgctggccgcctcctgacaagcgggagggatccgcggtggacccagggaagcggaggagcctggcggccaccccctcttcctcacttccctgtactctcatcgctctcggcctccgacacgaaaaggaagcaaatgagctgatggaagatctgtttgaaactttccaagatgagatgggattctccaacatggaagatgatggcccagaagaggaggagcgtgtggctgagcctcaagctaactttaacacccctcaagctctacggtttgaggaactactggccaacctactaaatgaacaacatcagatagcgaaggaactatttgaacagctgaagatgaagaaaccttcagccaaacagcagaaggaggtagagaaggttaaaccccagtgtaaggaagttcatcagaccctgattctggacccagcacaaaggaagagactccagcagcagatgcagcagcatgttcagctcttgacacaaatccaccttcttgccacctgcaaccccaatctcaatccggaggccagtagcaccaggatatgtcttaaagagctgggaacctttgctcaaagctccatcgcccttcaccatcagtacaaccccaagtttcagaccctgttccaaccctgtaacttgatgggagctatgcagctgattgaagacttcagcacacatgtcagcattgactgcagccctcataaaactgtcaagaagactgccaatgaatttccctgtttgccaaagcaagtggcttggatcctggccacaagcaaggttttcatgtatccagagttacttccagtgtgttccctgaaggcaaagaatccccaggataagatcctcttcaccaaggctgaggacaatttgttagctttaggactgaagcattttgaagggactgagtttcttaaccctctaatcagcaagtaccttctaacctgcaagactgcccgccaactgacagtgagaatcaagaacctcaacatgaacagagctcctgacaacatcattaaattttataagaagaccaaacagctgccagtcctaggaaaatgctgtgaagagatccagccacatcagtggaagccacctatagagagagaagaacaccggctcccattctggttaaaggtacagccctcttcctcgaagtctgtaggaggcagaaggtcactgaaagttctgagagaatatcaaggacttccttaatcgtctaatgctttagttgtagaactaggacttcaggaatcttcctgattcacctttcttcccttacttttctgcccttctccgggtgattctacaacattttcaaaataatgggtaaaatggtaatttgctaaaggaaattcagagaagagtttctaaagtgtataattggactgtggtctttgtagaaatttcatatgcagagtcccttggaaagatgccttgagcttgtctcaggtccctaaacttagaaagtcctattctttttcccaaattctgacatgtgctggatcagagtgttctcatttccaataggccagtctgccatccatccaggaagaactgcggcacatggctgatggtgctagagaggtaggaaatatgactggaaccactgagatcaactcagatcaaggcctagaaaaagacaactcagagttggggagtgaaactcggtacccactgctattgcctaagggtgtagtcctgaaactgaagccagttgccgaccg

SEQ ID NO: 15006 - DNA, 29329 bp, Homo sapiens; identical to SEQ ID NO: 14990

SEQ ID NO: 15007 - DNA, 2705 bp, Homo sapiens
gtagggtgggggtgctggcggcggctgctttggcggcggttggtggccgtgcgggcggggagggagggggaggagagaagaggaggtggagaaggcttgggctcgcgccgctgaagtcggcttacccgctggccgcctcctgacaagcgggagggatccgcggtggacccagggaagcggaggagcctggcggccaccccctcttcctcacttccctgtactctcatcgctctcggcctccgacacgaaaaggaagcaaatgagctgatggaagatctgtttgaaactgtgagtaatgatcctcaagtgagaacatgggattttccaagatgagatgggattctccaacatggaagatgatggcccagaagaggaggagcgtgtggctgagcctcaagctaactttaacacccctcaagctctacggtttgaggaactactggccaacctactaaatgaacaacatcagatagcgaaggaactatttgaacagctgaagatgaagaaaccttcagccaaacagcagaaggaggtagagaaggttaaaccccagtgtaaggaagttcatcagaccctgattctggacccagcacaaaggaagagactccagcagcagatgcagcagcatgttcagctcttgacacaaatccaccttcttgccacctgcaaccccaatctcaatccggaggccagtagcaccaggatatgtcttaaagagctgggaacctttgctcaaagctccatcgcccttcaccatcagtacaaccccaagtttcagaccctgttccaaccctgtaacttgatgggagctatgcagctgattgaagacttcagcacacatgtcagcattgactgcagccctcataaaactgtcaagaagactgccaatgaatttccctgtttgccaaagcaagtggcttggatcctggccacaagcaaggttttcatgtatccagagttacttccagtgtgttccctgaaggcaaagaatccccaggataagatcctcttcaccaaggctgaggacaacaagtaccttctaacctgcaagactgcccgccaactgacagtgagaatcaagaacctcaacatgaacagagctcctgacaacatcattaaattttataagaagaccaaacagctgccagtcctaggaaaatgctgtgaagagatccagccacatcagtggaagccacctatagagagagaagaacaccggctcccattctggttaaaggccagtctgccatccatccaggaagaactgcggcacatggctgatggtgctagagaggtaggaaatatgactggaaccactgagatcaactcagatcaaggcctagaaaaagacaactcagagttggggagtgaaactcggtacccactgctattgcctaagggtgtagtcctgaaactgaagccagttgccgaccgtttccccaagaaggcttggagacagaagcgttcatcagtcctgaaacccctccttatccaacccagcccctctctccagcccagcttcaaccctgggaaaacaccagcccaatcaactcattcagaagcccctccgagcaaaatggtgctccggattcctcacccaatacagccagccactgttttacagacagttccaggtgtccctccactgggggtcagtggaggtgagagttttgagtctcctgcagcactgcctgctatgccccctgaggccaggacaagcttccctctgtctgagtcccagactttgctctcttctgcccctgtgcccaaggtaatgatgccctcccctgcctcttccatgtttcgaaagccatatgtgagacggagaccctcaaaaagaaggggagccagggcctttcgctgtatcaaacctgcccctgttatccaccctgcatctgttatcttcactgttcctgctaccactgtgaagattgtgagccttggcggtggctgtaacatgatccagcctgtcaatgcggctgtggcccagagtccccagactattcccatcgccaccctcttggttaaccctacttccttcccctgtccattgaaccagccccttgtggcctcctctgtctcacccttaattgtttctggcaattctgtgaatcttcctataccatccacccctgaagataaggcccacatgaatgtggacattgcttgtgctgtggctgatggggaaaatgcctttcagggcctagaacccaaattagagccccaggaactatctcctctctctgctactgttttccccaaagtggaacatagcccagggcctccaccagtcgataaacagtgccaagaaggattgtcagagaacagtgcctatcgctggaccgttgtgaaaacagaggagggaaggcaagctctggagccgctccctcagggcatccaggagtctctaaacaactcttcccctggggatttagaggaagttgtcaagatggaacctgaagatgctacagaggaaatcagtggatttctttgagctaggagaataagagtctggagactgggagccttcacttcggcctccgattggtggcgcatagggtgtaaccaataggaaacccctaaagggtacttaaaccccagattttgcaactggggctcttgagcagcttgctttagcctgctcccactctgtggaatatacttttgcttcaataaatctgtgcttttattgcttcattgtttca

SEQ ID NO: 15008 - DNA, 29528 bp, Homo sapiens
gaggaggaggcgagccgcagcgccgcggcgacgaacccagggaggtaggttgtcatgggactcggccggccaccctggcaattccagtcaaacggcaagccagactcgctttgccggtcccttcctctcctgcccctgcagccgccaggaatggaacagtcccgcggtggggactgtgggaggcgcacgcgcgaggagtgtagggtgggggtgctggcggcggctgctttggcggcggttggtggccgtgcgggcggggagggagggggaggagagaagaggaggtggagaaggcttgggctcgcgccgctgaaggtacgcgtgagggcctgcgctggagccggcttgacagggtctgagggggagtggagaactgggcgaggaggttcccgtgggtgagcgcgtacgggatggctggctcgcaggacggccgaaggtggtggttggtgggagcagccagcgacgagcccgtagacactcgtacgcgtgcgggctgacgtgcgcgctacatggccggagtcgggcgaagcgggggaccgtggggaagaacgcgaggagggaggagtgggaggttgggggtgtcgctaggcgcccttagctccctccctctggaggagctgccgcggccactctgctgccgccgctgccgccgccattttgggttcgctttgcgaggggaaacgatcccagtgtcggttgcgggatccgcctcctctcagtttgcccctttagccctccacctttcccttctcctctctcgcatttccgccagtcggcttacccgctggccgcctcctgacaagcgggagggatccgcggtggacccagggaagcggaggagcctggcggccaccccctcttcctcacttccctgtactctcatcgctctcggcctccgacacggtgagtagaacgatttgggccggcattcgggcctaagcactctctcagcgattgaatcctgggctttctgggagccactgtcatctcccggacctggacctctgggagagcagtggtgaagatgggggaggggagagcagggagggggatcctgagcctaccgggaagtccctccaggcggggtgaaggggtgtccctgacaggcagactcccggagggggctgggaagtaagcgagtggaggcggagtcggctgtgcccctgacaggttagtttgtgtttgtaggcatgatcggagcctcccccatagtccagtttgtgtgtgtttaattaagggataagagtggtcgaggacacgatcttgagaggggattttacctgtgtgacaaggtctgtggtgtccctgccgcgttgaacggtatgtgggaacgacaggatgatctcagtgttgtacgtttaataaatgtcactggttagtttgtacatggaaagagatgtttttggtctagcagacagatggtctgttggtgtgtagcggctgtgttggtgtgtgtatgtgaggatggcaagtgtttccgtaagagtttgcctttatttgtgtaagtgtaatggagttccccttataagttagcttatttcttgaataaatgttgggaggttccttgcaggttgatatgtgtgtgtattttagggattgggagcccctagttacttgttgggaaagagcggcaatggtagtgttctgtacagcatgtgtctgtgaggtcagggaggggagaaacttggcatagccagttgtggtcttaagaatagtttgtgcctttggttagagtgagttgtgtaaatgtgaagggccaaaatatctttaacagaatcattgctacaaagctgtaaagaatgggtggccttatttgttgtcgcgggtttatagtaatagtttacaatacaataagaaagctctttcagtttctttgtgatactgaatctctgtgaaaatggtaggatgctttcttccattttacaaaataggaaatttaggcataaggagagaacttctccaaggccgcatgttaaattggtgacaaagttggaactgtaactcccatattttcactactactgcagcagtatattcagcataccatggtgcctcaggaagtctttgtcggcaaatctgagtatgctggaaagataggagcacataagactggttggcttgtatttgggggagaccgattgtgtcagatatgtatgtggaacgtagctgtccttgccgagtctgacctgtatgaaatgcatatccatggctatattattttggatttatggaggaagcagagcatttctgacacttaaggttgtatgcgtgagggagaaggctttcacagcttaacttgtaccagagcagctgcatgggtgctgacagcttaacttgaaatctgtgggaggaaggatcctttttcactcattcaacaaatataaccattcaatgaatggtccatgccttgaggtgaggatcatcaaggtgtctctgtaaatagcctggatgcaatctgaggggagttgttttgacggtggtaggtattaagttgagggaggcagtgtggaattaaaaccagagaactgtttttgggtactggtaattgttaatatatgtgcctgtggatgttggaacttcttggctgggctgaaggaatcctttgaaagactgatttcggcagggcgcggtggctcacacctgtaatcccagcactttgggaggccgaggtgggcggatcacgaggtcaggagatcgaatcacgaggtcaggagatcgagactatcctggctaacaggatgaaaccccgtctctactaaaaatacaaaaaattagccgggcgtggtggcgggcgcctgtagtcccagctactcggggaggctgaggcaggagaatggcgtgaacccgggaggcagagcttgcagtgagctgagattgcgccactgcactccagcctgggccacagaggagactccatctccaaaaaaaaaaaaaaaaaaaaaaaaaagactgatttcatgtagtaaggatcccgtctatgaactctatgaatatgaggtaagaatgcatgaactaagccaacttagctgtattcttctggaaaatgggatgtttcttgataggctagattagtggttcttaaaagttttttggggtcacttatccttcagagaatcggatgaaagacactgggccctcaagttagaagatgagcataagcgcaatcacatgatttatatatatgattttaggaacttaaactgtaatgaaatagagccaatttatatttagatctcatttgaaaacctttcattttcattgttcgggtgtgtggatgttagtatgagtttaaggtgaaggagtctatgttagtatttgaacatgttgacaggatccatatttttaatttattctttttatcgtctgcaaacatttctgcagtattagtaaatgactctgtatttggtaaaaagggaagctaatgtcgcacaagtatctatggctttgttctttgtcagtatctttttgttctcaaactctgagaagcgtctttttttcagttttggattgggcctgaggtgatttgaagctcctgtcttggagtttaacttagttataacaaacactgagttaatcctatgcaggagacacaaagataattaatatatggtctctgtgcttgaagagacgctaattttctgtggttgaagagatgctgtgaattgtgtgatagtggcagctctcaaaaggacaaggaagagggaaacatattcctagaagctgaaattttattacccaattgcaaagactttttgtcactacttattcttaggaataaccataaagtgtttattttattctgtatggaactttgtactttaaaaaaatatgttttgtatcatctggtgtttttgtataaaggaactgttggtttgaaaagaaggtaaacatcatttatattccttaccttgttttgggatgtatctctacagtgagtttatgtaaaaaggtcttaatgtcatttttgggtatacatacatgtagaaagccctcctgatataaaatccagtagctatttgacagactacccattaatttattactggaacttaaaaataattactgtacttttaaaagaacaagaaattggtcaggtggggtggctcacgcctgtaatcctagcactttgggaggacgaggcggatggattgtcagagctcagaagatcgagaccagcctgggcaacacggtgaaaccccgtctctactaaaatacaaaaaattagctgcatgtgttggagtgcacctgtagtcccagctactcgggaagctgaggcacgagaattgcttgaaccaagaattgcttgaactgggagggggaagttgcagtgagctgaaatcatgccactgcactctagcctcggcatcagagcaacactctgtctcacaaaaaaaaaaaaaaaagcaagaaatgtaaaaaggtgttttaataggacagattataggattcagtgagataatggagaagttttaggaaaaattgtctgatagtcctttctttctattgacatggcccctgtataagaatgctatgtaaatttgtgaaaagtttaatattttctctaatttttaacgggtagtaggttcatggtgttatttttctcaaaacgtacatgtgatatgtgtgtgtagtgtgcatatatgtgcatgtatgtgtatacaatttctttatttttttaattgagattaggtctcgctatggttttttgtttttgtttttgtttttgagagagagtttcgctctcctcgcccaggctggagtacaatggcacaatcttgcctcactgcaacctctgcctcccaggttcaagtgattctctttcctcagcttcccaaatagctgggattacaggcgcgtgccaacacgccctgctgatttttgtatttttagttgagacagggtttccccacgttggccaggctggtcacgaactcctaacctcaagttctccagccgtctcggccttccaaagtgctgggattataggagtgagccactgcacctggcccaggtcttgctatgtagatcaatctggtcttgaactcctggcctcaagccatcctcctgtcttggcctcccagtttgctgggattacagatgtgagccagcatgcccagctctttttacctgcttaccaaatccaagattttctccaaaatgaactggaatagccttcttactgtgttaattttgccttggtggggaagcctaagtcttggaactaaattggggtggttatgacagttctctttttaaagctgatcagtatttcagtatttcacttgttgttgttttttttgttttgttttgttttttttgagatggagtcttgctctgtagcccagtttggaatgcagtggcaggattttgactcactgtagcctctgccacccggattcaagtgattctcctgcctcaatgtcctgagcagctgggtttacaggcacgcaccactacacctggctaatttttgtattgttagtagagacagggtttcaccatgttagccagtagccaagctgttctcatactcctgacctcaagtgatccacctgcctcagcctcccaaagtgctgggattacaggtgtgagccaccacgcctagccaaacccatctctttcattaaaccacctcattttggttcagaaacaagactgccatgtatgtatttaatgcttattatgtgccaagcactattccaggtactaagatacagtgatggacaaaacaagatcccttctcctctatctcaggacttattaatttgggcattttcattttccaatataggatcttttagtactggtataggattcctgaaggaattcctgaaatataattatttttctgctagagcaaatcaattttgttttttgttttttttttgagatggagtttcgctcttgtcgcccaggctggagtgcaatggcgcaatctcggctcactgcaacctccgactcccgggttcaagcgattctcctgcctcagcctcccaagtagctgggattacaggcattagccaccacgctaggctaatttttgtatttttagtagagacagggtttcaccaggttggccaggctggtctcgaactcctgacctcaggtgatcctccaggctcagcctcccaaagtgctaggattacaggcaggagccaccacgcccagaagagcaaaattcttctgttgacaaaaatttctttcctctgaggaagagacactgtgtgcctgtgttttatccaggaattccattggatagtttgtcctttgggatgtcagtggattaaatcctccattaagaatcaaagtacttggctgggtgcagtggctcatgcctgtaatccctgcactttgggaggctgaggcaggtggatcacctgaggtcaggagttggagaccaacctggccaacatgatgaaaccccatctctactaaaaatacaaaaaattatccaggtgttgtggcaggtgcctgtaatcccagctactctcgaaaaaacagaaacaaaaactctgacatgtagagtatgtagatgtagagaaaaaagtaaaatgattgttgaaaaaaatgtctattttttatcttctaaatagctttgtgtgtcagagatcagaacgctcattttacatgatatcaagaaccagaatgctagatagctagaatggttgttaacttcctagataaccattgtagaggaacacataaggtaaaacaaatgaataaaaattaaaaaaaaatgagatagccaaagatttgaagctctttacccattaacatgataatcatttcgactttgaatatttgtagaacaagagtcagaactcagaacaaagatctctgaggaaataaaaaaaaatcaagctgcctcctaatttctcatttagtctgtcattgggcattgtcaaactgtcaaactatatttagagattctggttttcatctggagacttagtgagttgtgtaatatcttgaatacacatataagatcttgccaggtggggtggctcatgtctgtaatcccagcactttgggaggatgaggtgggaggatcgctggagcccaggagttcaagaccagcctgggcaacatagcaagtccctggctctatttaaaaaaaaaaaaaaaaaaaaatcctcaatgtagaactttaaatttatccttacgtgttacatccagttgatttgagaaaatatgattctgaattttccatcaattggattggcagtccctttcagctttacagctttacatcatctacagatttgttaagtatgttctcttggtcttctaattcactgatggagtttttgaataggtcgggtccaaagatagagtcctatgaaacactgttggaaacttgtctctgtctgtctcttttttttttggagacagtgtcttgctctgtcgttcaggctggaatgcagtgggacggtctcagctcactacagcctctgcttcttggactcaaagagattctctcacctcagcctctcaagtatatgggactatatgcatgtgcgaccaagcccagataaatttttttttagagatatgttgacattttgcccaggttgggagacttgtctcttgattccattcagtattgtgtgggtttggataggccatctaattataaaatcattgggctggtcatggtggctcatgcctgtaatcccagcactttgggaggctgaggtgggcggatcacctgaggtcaggagtttgagaccagcctgaccaatatggagaaaccccatctctactaaaaacacaaaattagctgggcgtggtggtgcatgcctgtaatcccagctacttgggaggctgaggcaggagaatagcttgaacctgggaggcggaggttgcagtgagccaaaatcgtgtcatcgcactccagcctgggcaacaagagcgaaactccgtctcaaaaaaaaaaaaaaatcatctagctcacattttctccttgtcttcttcctattagaatttaagttcaatgagattagaactctctctctctctcattctctcatatatcccaagcatctaaaacagggattgaaacatagtaagtactcaataaatgtttttgaataaatgaatgaaggatagctgggcgtggtggctcatgcctgtaaccccagcactttgggaagccaaggtgggtggatcactggagctcaggagttcaagaccagcttgggcaacatggggaaaacccatctctacaaaatatggaagaattagccgggcatgacagcacactcctgttgccccagctacttggagggctgaagtgggaggatcgcttgagcctgggaagcagagattgcagtgagccgagatcaagccactgccctccagcccgggtgacagagtgagaccctgtctcaggaataaggatagatatgaagaattcgtcagatgccttgttgaaaacatcatacattgtctacatggaattcctccatattgtaaaatgaatctaatttataccaacaacgtttggcttttttgcagaaaaggaagcaaatgagctgatggaagatctgtttgaaactgtgagtaatgatcctcaagtgagaacatgggattgtaagttggttctccaacaaaatgtgtcctttgatctctgtgatgctccttctagaagagggactgaaccaattctccttttagtctacctgggaaagaatataatgacaaaagaaatttgctaactgctagactcttgattatccacatgtaggttattcttactaaaattttccttgaagctttttttttttttttttgaggcaaagtcttgctctgtcacccaggctctggagaatacagtggtgaaatctcagctcacagcagcctcgacctccagggctcaaaacaattctctcatctaagcctcctgagtagctgggactacaggcacacacctacaggcccggctaattattttatttttttgtagagacagggtcttgccatgttctggaactcataggctcaagtaatcttcctgcctcaacctcccaaagtgctggaattacaggtgtgagccagcacatcttgccccttgaaaacttttgatggcttcccctactgtcatttggtgtgtccttaaagattgccaactagttttaaagtattttgcacacaaataattaccttttccataaatttgtctaaaaagatatttctgtttaagaaattgatcattttgagttatcctagctctgtgcttactgatacaagttgactggttgagcaacttctttcctggcataatagtcattccatatgtgggtttgtaggagtcctgaagtgagaaaggttctgatgtaggctctttctgggtgccagcattattaaagtattgtttatagttttcacttttccttcccaacactggagcaacattcaaaagcccattccccaggaaaaccctccctttcctttgcccacagttccaagatgagatgggattctccaacatggaagatgatggcccagaagaggaggagcgtgtggctgagcctcaagctaactttaacacccctcaagctctacggtaggctagttgaagaccttgagatttggaatagaggaagagtttatttctgaaaaggttttcagaagttgcagttaacaatttttcatccccagccagcttctgttactgatgtaaggatgcagagtcctgtcaggagttaggtgtcaagtgaagtctccttgttatggggcagtgcagctgtaggccaagctgtatctgtttgggaagggagaaaaaacagtagctggcatccatatccacttctccgggtgagtggtgctggagaggtatgtaggactcaatgtggccagccacacaaactaccctatattgtaatatccagtctgtcccttttgttctttttatgtgccattaatatctgctaaatgtgactgaaaatttgttagtcacctaggcattagtggagcaaaccctgaagcacctgcagtaaggagtctgaaacatacgtgctgacctttttgcctaaagttggcacttgtgttacagcatccagaaagtagaggctttaattttttcctcattttgtggtggatttgcatctgcactttattctgttgtagcagcatataatcattaggtcgatggcgagaggtcaggatgcagtttgtgccataagtggaacaaagcaaagagaatagtccctgtaattagtcctgtgtttgaacttaacagcactactaagcagagagcttgggttccatctgaaagctagacctttagggattttccaatttagtgaaaaaagataagataggccaaccaatgtcttaaaaactagaactactagtcattctccattacaacaaatatcacaatacaactacatcaaaaatctcaagattgctaagtcagtatttgacccattattttaatttatagttcatagaacaaaattctggtatagcagaatggaaccattcatcctgggaacgtataataggatctgattaataaatattttggttttgctgatcaactctttataacttcttaaaatttggaaaatatagaactaatttaaaattcctgttagaatccagttaccttctggtattcaatggaatatagtcatatatcatctcatggtcataccctctgtgaaatctatcattaaacgattcatcattgtgtaaacatcgtagaatgtacttacataaacctaaatggtttagcctactgcatacctattgctcccaggctacaaaacctgtacagtgtgttactgtactgtactgaatactgtaggcagttgtaacacaatggtaagtacatatgtatgtaaacatagaaaaggtacagtaatcttatggagccacctctgactatgtggttcgttattgactgaaacattctgtggcgcatgactgtacttgggcagcttctgcttctctttcgattgcaaatacaaacctgtttttgttttaatctttgactaaataaaaatccctctgtaagtccatagagagtaagcacatcttaaaacacaataaggaagagagaggagaaaaagacagtcaaaacaaaaactctggggcttcccttatcaattacctaaataatccttgttaaaactaagtgcaggctatgtttccattttctacttttttatgcttcttctcttctgttccttcagtggtggtagcgcggatgttcaaattttcagttctcagtaaagattgtatagacagtcccacggtcttcaggtttttactctgtgctacccaaacctacagtaaatactataaaagaaaacttattcaaacgtaatctttatctgcaaaaactattgaaaaacgttaccatttaactattgctgtaatatagggggttccttgaaatatgataacctgcttgttatagctacttcagcagatcttatcctgttgcatagggtatcagcatatgcttaatcatttaggtatattattctccctttatttctttctatgtaaacatagaaaaggtatagtaatcatacatagaactgacatgctaggtattggaatttttgcttcagccctgcaaacaatctttcaggagggtatggatgggaagttagggttaggaaccttggaagaggaatttaaagggctaaaagaagatagccttcatggataatattttaactaacttctccgttctgttcatttgaactaccatgtacttcagttattttggtatatccttttcctgcttcatgctagaaagtctttgacttgttaagaaagcagggcagtgcagcctgagtagataggataatgggacaagctggacctgggatgggagtaacatcccagggagtaacaagtaatgagagaagaaatgagaatgatgagttcccaccagctccttggctgctttcttacccatatatttctctgtccctagttttttgtttaattttttcttcatttgtatattatttggaagaggaattgtagaggaatgggatggggtgtaatacagaatcatttgatgcatgctaactactttgggaaaagatttgtgtaaggctgggagtttgactgttggctaaagtgaaaaggggggattagtagggaatgaaaattgttcaggctctttgctcatcattgcaaagaattggatgtgttgtggacctaggaaaacactcaaattcagtcatccccgtttgggataggtttgaggaactactggccaacctactaaatgaacaacatcagatagcgaaggaactatttgaacagctgaagatgaagaaaccttcagccaaacagcagaaggaggtagagaaggttaaaccccagtgtaaggaagttcatcagaccctgattctggacccagcacaaaggaagagactccagcagcagatgcagcaggtaacactttccttggtcatattaatattgaattataccaaggcctaactctgaggctttggtataatctaaaattagcagctttgtaaatgtcagagatagttaccttactacgtattaaaaccgtagtatcttcacatcagttaggagcttgagaagtcatcatgttcatgtcctgtggctcagggaagacagcacataaggaccctaatggtattcggaattacagatttcaaagagtcctcagtaatctattctgaaatttaaccttcactgtgacaagtagttttttttcccttttcccttttcttttttcttttttttttgagacgtagtctcgctctgtcacccaggctggagtgcagtggctcaatctcagctcactgcaagctctgcctcccgggttcacgccattctcctgcctcagcctcccgagtagctgtgactacagggactcgccaccacacccagctaattttttgtatttttagtagagacagggttcactgtgttagccaggatggtctcgatctcctaacctcgtgatccacccgcctcggcctcccagagtgctgggattacacgcgtgagtcactgcgcccggccttttccttttctaatctcagttcctcctctgtttagaggttaaacttcctctggttctgtcattttgttcaagggaacatgtctgagaaatttatgccaagatcctacgttgttctcacactctttgcagaaagcaaaatttgtgtcataaagttgcaaacatcttagttaatgactctctggtggctgggtgcagtggctcacacatgtaatcccagcactttgggaggctgaggtgggaggattgcttgagcaggggagttcaaaagcagcctggacaacatagtgagactctgtctctacaaaaaataaaaataaggctgggcacagtggctcacacctgtaatcccagcactttgggaggccaaggcgggtgaatcatgaggtcaggagtttgaggcaagcctggccaacatggtgaaaccccgtctctacgaaaacaaaaaattagctgggtgtggcggcgggcacctgtaatcccagctactcgggaggttgaggcaagagaatcacttgaacctgggaggcagaggttacagtgagccgagatcacgccattgcactccagcccaaaagtcagtgcgagactctgtctaaaaataataataataataataataaaataaattagccaggcattgtggtcacagctacttgggaggctgaggtgggaagattgcttgagcacaggtggttgagagggcattgagtcatggttgcaccactgcactccaagctgtgtgacagagcaagaccctgtctccagggggaaaaaaaaatatctctgggctcctgaaatggcagtgtcataacatatcactgcattattttctttctctccccagcatgttcagctcttgacacaaatccaccttcttgccacctgcaaccccaatctcaatccggaggccagtagcaccaggatatgtcttgtaagtttccaaattgccgtaattctatagactagaatataaaattagcttggcaggttatttctcacagttattctctcaggtatttttgattgctgtggcttcctatgtttgctgagtgaacataagccactgattcacatgaaaggacaaagagtgtattcaattttttcttttcttttttgagacagggtcttgctctttcacccaggatggagtgcggtggaacaatttcagttcactgcaacccctgcctcccgggttcaagtgattctcctgcctcagcctcccaagtagctgggactacaggcgggcaccaccacgggtaattttttttgtatttttagtagagacagggttttgccatgttggccaggctggtctcgaattcctgacttcaagtgatctgcccacctctacctcccaaagtactgggattacagccatgagccactgcgcctggcctgtccttctgatatttttattgggtcctcctcctcatctttagattcaccctgacttcttaggtttttggtaccgctattcatttcatagatgttgaggctgggcatagtggctcacacctgtaattccagcactttgggaggctgaggtgataggatcacttgagcccagtggtcaagaacagcctgggcaacatagtaagacccggtctgtgttttttttgttttgttttgttttaatttaaataatgaagtaaatatacatgtagatgttgaattcattatccattcatgaagctcaatattagtgttttatgtgtagagctagttttgctcatgacgttttgaggtattttgagctttttttttttttttttttttttttgagacggagtctcgctctgtcgcccaggctggagtgcagtggcgggatctcggctcactgcaagctccgcctcccgggttcacgccattctcttgcctcagcctcccaagtagctgggactacaggcacccgccactatgcccggctaattttttgtatttttagtagagacggggtttcaccgttttagccgggatggtctcgatctcctgacctcgtgatccgcccacctcggcctcccaaagtgctgggattacaggcgtgagccaccgcgcccggcctattttgagattttaaatttgaaatttggccaggtatggtggctcatgcctgtagtcccagcactttggtaggtcaaggtgggaggattgcttgagcccaggagtttgagaccagcctgggcaacatagtaagaccccatccctaccaaaaaaataaaaaataaaaaaattagctggggatggtgccgagtgcctgtagtcccagcaacttgggagactgaggtaggaggatcacttgagcctgggacgttgagactgtagggagccgtgcttatatatcactccagcctgggtgacagagtgagaacctgtctcacaaaaacaaaaccatactttacctcataaaaattgcctcaaacttttggacaggtaatgataatactctcagcttcttcagtaagtcttctttggattttgaagagtacatttgctagtattctaaaacttccttggtgatcaacaggatgtcttcatctcttactgtattcagaggaggatgaggagtacttggttgtaggcattattctgagaccaaaagacaaaacaattttaaaagtaatggtcctggtcgggtgaggtgactcatccctgtaatcccagcactatgagaggccgaggcaggcggattgtgagcccaggagttcgagatcagcctggccaagatgggaaaacgctgtctctgcaaaaaatacaaaaatcagctaggtttggaggtgtatgcctatagtcccagcttctcaggaggcagtgggaggatggcttgagcctgggagggggagtttgcagtgagctgagatcatgccactgcagtccagcctgagcggcagagtgagaccatgtctcaaaataaattaattaattaaattaaagtaatagtccccattcttgagactcttaattctagctcgggagctagaccatgtattccttagtgagaaacagtttaaaaataaaacaagaatataatccctgaatatctgagaactcaggcataatcttaacagtagtttattgtgaaagactttatgattatttttacctgtttttatcctgtagtaggaaggtcagcttctcatttagattctgaaggctattggtattaattgtctggaattgtcttagatcttccttgtgtcgtgttttcccagaaagagctgggaacctttgctcaaagctccatcgcccttcaccatcagtacaaccccaagtttcagaccctgttccaaccctgtaacttgatgggagctatgcagctgattgaagacttcagcacacatgtcagcattgactgcagccctcataaaactgtcaagaagactggtaggagacagatgtgtcagctttaagtttttacttgcggtgagaggtggtgggaatcttatcccatagataacttcctaggatacttgcctaggaatggaggacacaggacatttgtaatttcttccttctctcttttatcctccctttgtactcattatccaagttctagaattacatgataatctccgggcctgggtaaggcatggaggcagtggacagtataggaatatgggaggtagagatctgaggctcagtgctaagaattggactacagcaatatgaggggtaagtattaggaatcagatcaagataaactggggcctggtaaagatgaaagtcaggtggtaaagttcggtcatgtttagctttttattctcttcattaagatcaactaactttatttaccataatgattgtagcataggtgatatctccattctgaatgaaatgttgacttgcaagttaggcgtaaattagagattgtacatttgccgtgttcagtattttaaagaaatttgccggtttagattctaccttgcattggtttagtattttttgagaaaatatttgctatttacttaagccaaatatttacttctgatttgtttgctgacttagcaaattagttgtggtttgttctggatttgggtttgtctttggattctattttaaatccctaagtcttatcattacattgaatgtagttgaatttaagtgtactatatcatagacacagatcccaaactactttaatagctatattatatgaaatggtaatgaaaacgtgatttaataccaaattatagtattatcttacacatctagtgtcctgtgtttttcttctggagatataaaaatgacacttatggaaggagaaatatggatatagtagttttgtctctagaaatgcagaggtgcctaaaattgagaggctgagagagggagacagaaatgaatgagactgaattgtctcattccttttatggttcttttgttcccaacctcaggaggaatctgggagaacttaatgaaagttaagaaagaatgaaataaaagtaaaatttggaataccaggtttgtgagggagattaaagaagttggaatcttttttcttttttttttttttaagatggagtctcgctctgtcacctaggctggagtgcagtggggtgatctcggctcactgcaacctccgcctcccaggttcaaacaattctcctgcctcagcctcccaagtagctggaattacaggtgcgtgccaccatgcctggctaatttttacatttttggtagagatggggtttcactatgttggccaggctggtcttgaactcctgacctcaggtgatccacctgcctcggcctcccaaagtgctgggattacaggcgtgagccagcacgcctggcctggaatcttatcctggaagaaaaaagcattgttgaaggtctgttatccttcagagatttaaaggggaaaggaggtaaaacatttttgagcatacactatgtgacaggtattactaggtactttttaagtgtttgttttactttgtgaataaagtgttacacgtaagaaagagtaagagaggccgggcgccgtggcttacgcctgtaatccaacactttaggaggccgaggctgtcggatgacaaggtcaggagatcaagaccatcctgtctacagtgaaaccccgtctctactaaaaatacaaaaaatcagccaggcgtggtggcaggcgcctgtagtcccagctactcaggaggctgaggcaggagaatggcctgaacccgggaggcggagcttgcagtgagccaagattgcgccacgcactccagtctgggcgacagagccagactccgtctaaaaaaaaaaaaaaaaaaagtcaacttttattgccagtgaatgggactccctttagacctaatgttagttgaggaaagactgtggaaactctttggggagtggtaggcagatgggagggaatcaagttagataaggacagctctacctaaatgcaaaaatgcattcacaggctttttgaagccctcttttttcctagaagttgatttatcagagatttattttcttatagccaatgaatttccctgtttgccaaagcaagtggcttggatcctggccacaagcaaggttttcatgtatccagagttacttccagtgtgttccctgaaggcaaagaatccccaggataagatcctcttcaccaaggctgaggacaagtaagtgtttactctgggggatcaaatatcccaaggagaagatgtagttcctttgaggagtttaggggaagtaagacttgtataataagacatggacacaaaaggaaaagcagtatagatgagcagagtcctctagaacgtgcttgttctagcagtgccaaatactgctttttggggggatgttacacacatttttaaaatgttttagactggacatggcggctcccacctgtaatcccagcactttgaaaggccaaggcaggaggttggcttttctaatgttattatttatttagagacaggatcttactctgtcacccaggctggagtacagtgttgcaatcacagctcactgcagccttgaactcctgggatcaagtgatcctcctgcctcagcctccatggagtagctgggaccacaagcgtgtgccaccatacatggctgattttttttgtacaggtgagggtatctctgtgttgcccaggctgctcttgaattcctgacctcaaatgatcctcccactcctggcctcccaaagtgctgggactataggcataagccaccacacccagctagattatgaacatttttatggccctttgtgtgtattgccacactgttaacagcaaatatgtatatatgtaaccatgattatatatgttatgttagagggtagtattggtgccagtttaatttgtctgacggggtacctattattcattttatatttgttttattagaatcattctccttcccatgtattctctttgaacttcctttgtgttgttaatatacagctcatcatgatctgacatttattgatgatttatgactagtttctcttgctcctacttaattgtgaactatttgattcttattcatagtacttaatcactactcactaaatacctgaaattttctactgagtagtcaccaacttgtagtagtcactacaagaattagttgtagaaaaagtagattggccagccatggtggctcacacctgtaatgacgacactttgggaggccgaggcaggaggatcacttgaggccagaagttcaagatcagcctaggcaacaaagtgagaactggtctctacaaataatgaaataaaacattagttaggcatggtagcaaacgtttatagccacagatactcaggaggctgaagtgcgggaatcgattgaacccaggcattcaagactgcagtgcactgtaatcatgccactgctctccagcctggacaacagagcaaaaccctgtctgaaaaaaatgaaaaagtagattgggccacacgccatgggctcatgcctgtaatctcagcactttgggaggctgagactggagaatcgcttcagcttaggaagtagcagctgcagtgggctgcgatcacgccactgcactccagcccaggtgacagagtgagaccttgttttaagaacaagtaagaaaaagtagattgtaaaatgtgttagtctggggaggccctttagaaggaaggactgtgaagtgagatttagtgttattgctcctttctcagtttgttagctttaggactgaagcattttgaagggactgagtttcttaaccctctaatcagcaagtaccttctaacctgcaagactgcccgccaactgacagtgagaatcaagaacctcaacatgaacagagctcctgacaacatcattaaagtgagtgtttcctgcatgcactatccaggcacctcaccaacacatatctgttcttttctcttgttattctcaaagaaaagaagaaccttcttttatctaaagctaatttctcctacttatatactagattaattcccctgttgccttttcagggacattgattcattcattacgttcctctggagtatcttcatcctcttaaaagattccacaaatccatgtttccctgtaataattctctttcttgaactttctagaaatgatatgcagtattccacttacatgctttgggtttttgttttgttttgtttttttggtcagacataatcttgcactgtcacccaggctggagtgcaggagtatagtggcatgatcttggctcactgcagcttccgcctcccgggttcaagtgattctcctgcctcagcctcccaaatagctgagattacaggcgtgcccaccacgctcagctaattttttgtatttttagtagatacgggtttcaccatgttggccaggctggtcttgaacttctgacctcaagtgatccaccagttttggcttcccagaggctaggattgcaggcataagccaccgtgcccagcctatatactttttctcaattttgtgtttgtatgtatgcatgtatgtgtgtgtgtgtgtgtgtgtgtgtttgtgtgtgtctgtgtctgtatgtatgtatgtatgtatgtatgtatgtattgagatggagtttcgctcttgtcgcccaggcccagcctatatactttttctcaactctttttacttattgattgattgattgagatggagtctcgctcttgacccccaggctggagtgcaatggtgcgatcttggctgactgcaacctctgcctcctgggttcaagtgattctcctgcctcagcctcccttgtagctgggattacaggcccctgccaccatgcccagctgatttttgtatttagtagagtcggggtttcaccatgttggccaggctggtctcgaactcctgacctcaggtgatccatctgcctcggcctccctaagtgctgggattacaaatgtgagccattgcccccagccttcttttttatttagatatttatttatgtttttttttttttttagagacaggttctcactctgtcatcctggctggagtgcatgggcacaatcataggtcactgcaacctcaaattcctgggtgatccttccacttcagccttccaagtagcttggactacaggtgcatgccaccaaggctagccgattattttattttgtgtgaagacagggtgtcattttgtttcccaggctggtcttgaagtcctgacctcaagcagtcctcttgcctcagctcggcctcccagagtgttgggattacaggcgtgagccatgatgcccagcctttggtttcattgtgtttttgtatttttcttgagacaaggtcttactctcctgcctaggctggagtacagtggtatagtcatagctcactgcagccttgaactcctaggctcaagcattcttccaacgtcagcctcccaaggagctgggattatatgcattagccactgtgcttggccattaaatttatttatttatttattttattttatttttttgagacagaatctgtctctgtcacccaggctggagtgcagtggcacaattttagctcactgcaacctccacctaccgggttcaagcaattttcatgccttagcctcctaagtagctgggactacaggcatgcgccaccacacctggctaatttttatatttttagtagaaacataatttcaccatgttggtcagtctgatcttgaactcctgatctcaggtgatctgcccacctcggcctcccaaagtgctggaattataggcgtgagcctctgtgcctggcaaaaaactttttttttttagggatggggtgtccctatattgcccaggctggtcttcaatttttggccttaggcaattctcctgtctcagcctctaattggtactgcctggtgtattggatttaggccttacttattaaccataaaccacggaagccgaagatttacctctctcctcactcccttactcccaccacaaacatgcacattttctgctctccaaactcctcactagtagttatggtagaattttggttagattgtattcagggtttacattgtaagattttaaggactgttggctgggcgcggtggctcacgcctgtaatcccagcactttgggaggccaaggcaggtggataacgaggtcaggaaatcgagaccatcctggctaacatggtgaaaccccagctctactaaaaatacaaaaaactggctgggcgtggtggcgggcgcctgtagtcccagctactcgggaggctgaggcaggagaatggtgtgaacccgggaggtggagcttgcagtgagccgagatcgcgccactgcactccagtcttgccagagcaagactccgtctcaaaaaaaaaaaatagattttaaggactgtataaatgctcttcacagctcagctatgttactgtgttaccttgcctttcctgctgaacattttgtttcccagatcatcttctttcagtgtgttcaggtattctagatattctgtcactttcatcttgaagaaattgctccctgagccctctgacattattccactttaagcgtgttgctctccatgttgctgcactgatgtcttcttgggctttttcttcaccatcatcccaggaattccttttgcctcatactgtgttagatcctcttatttcctgaattccacatctttgcttttgcattactttttttttttttttttttttttttgagacacagagtcttgctctgtcccccaggctggatctcggctcactgcaacctgcaaccttggtcttggtcttgaactcctgacctcaggggatccacccacctcagcctcccagagtgcggggattacaggcgtgagacaccacgcctggccttgttttttgttttgttttgcttttttttgagaccgagtctcgctttgttgcccaggctggagtccaaaggcgcgatgatcttggctcactgcaacgtccgcctcccgggttcaagcaattctcctgcctcagcctcccgagtagctgggattataggcacatgccactacgcctggctaattttttgtatttttagtagagacagggtttcaccatgttagccaggatggttttgatctcctgacctcttgatccacccgtttcggtctcccaaagtgctgggattacaggcgtgagtattacttctttactttagtggaacacattctagtagcttttttttaaaaaaaatttttttctgaattttaaaaaattgaggtgggggggtctcagttttttgcccaggctggtctcagactcctgggttcaagtgatcctcctgcttcagcatcccaaagtgctgagattataggcatgagccaccctgcatggccccattccagtagcatcctgagggagagtgcttgggaagggaattttcacatttaaaccatctccggggccgggcgcagtggctcacgcctgtaatcccagcactttgggaggctgaggcgggtggatcacgaggtcgggaaatcgagaccatcctggctaatgtggtgaaaccccgtctctactaaaagtacaaaaaaattagccgggtgtggtggcgggcgtctgtagtcccaggtactctggaggctgaggcaggagaatggcgtgaacctgggaggtggagcttgcagtgagccgagatctcgccactacactccagcctgggtgacagagcgagactccgtattaaaaaaaaaaaaaaaaaaatctccattcatggtcttttgattgtatcgatgtcagtttcctcgtttttgtttttgttttattttttttctttttttgagacagagtctcactgttgctcactgcagcctctgcctcctgggttcaagcgattctcctgcctcagcctcctgagtagctgggattagccaccacacccagctaatttttgtatttttagtagagatggggttttgccatgttggccaggtgatctcgaacccctgacctcaagtgatctgcccaccttggcctcccatagtgctgggattacaggcatgagccaccacatcctccatgtctggccagtttcctggtagtaatattgtactgtgtaccttgtttatatgtatagctcttgtttctatgtaacataaaaacattatattgggagaaactggttgaagggtacatgggacctcttggtactattttttgcaatttcctatgaatataattatttcaaaataaaaggaaaaaataatactctcctctgtcactgtatctagaattctagataggaaataatttttttaagaagcttttaagggcctcacttcattttcttctaactcctagtgtggtgttaagaaatttcatgccatttaactttttttttttttttccgagacagggtcccaccctgttgcccagtttggagcgtggctaaatcatggctcactggtgtctccaacccggtgtgcaccactatgcccagctaattttttttttttttttttttaagacatggtctcgttatgttggccaggctggtctcaaactcctggcctcaagtgctcgtcctgtcttggcctcccaaagtaatgggattataggcatgagccatggccccatttaactcttgagtctttgtgtaacacctgtttttctcaacctctgacagcatgcaggatttttcctttggcttcaatattttgaaaatgcatgataatatgccttagtatttgtctatttttatccatggttttttaaaaagtactttctttttgtttttgtttgtttgtttgttttgagacagagtctcgctccattgcccaggctggagtgcaatggcgtgatcttggctcactggaacctctgcctcccaggttcaagcaattgtcctgtttcagcgtcccgaggagctgggactacaggcgctcaccaccacaccctgctaatttttgtatttttagtagagacggggtttcaccttgttggtcaggctggtctcaaactcctgacctcgtgacccacccacctcagcctcccagagtgctgggattacaggtgtgggccaccatgcctggcgtatccatggttttaaggcacacgtgataaaccttattcttctgcagaaataatttttttttttttttttgagatggagtctcactctgttgccaggctggagtgcagtggcgtgatgtcggcccactgcactctccacctcctgggttcaagtgattctcgtgcctcagcctcccgagtagctgagattacaggcacgcgccaccacacttagctaatttttgtatttttagtagagatggggtttcaccatgttggccaggatggtcttgatctcctgaccttgtgatctgcctgcctcggcctcccaaagtgctgggattacaggcataagccaccacgcctggccagaagtaatttgtgtttaagttttagttttgtgtcatttttcgtgcacacctttgtacttttgttgggggatggggcggggtgtcggggttggagtcttgctctgttgcccaggctggagtgcagtggtgcagtcttggctcactgcaacctcttaattcctcagttcaagtgattctcctgcctcagcctgccaagtagctaggatcacaggcgtgcaccaccacacccagctaatttttttttgtactttattagagacagggtttcgccatgttggccaggctggtcatgaactcctgacctccagtgatccatcctcctcgttctcccaaagtgctggcattacaggcatgagccaccatgcccagccctttgtacattttttaatgtaggatgccatttgtccacttgactctcccactagtctgtaagctccatgagagcaggaattgcttcccttatgtgtgtgcttagcttttagcacagtgcctaggatatagaaaacatcttatgttcatcatgttggatgaacagatgcttattgtcatggtttaagttcagttcttatcttctttttttttttttgagatggagtctcaccctgttaccaacgctggagtgcagtggcatgatcttggctcactgcaatctccaccctaccacccccactgccaggttcaagcgattcttttgccccagcctcccaagtaactgggattacaggcacccaccaccacacccagctaatttttgtatttttagtagagatggagtttcaccatgttggccaggctggtctcaaactctcaatctcaagtgatctgcccgcctcagcctcacaaagtgctgggtttacagatgtgagccaccaaggccagcctatttactcttaaaactgaactgcctcggtctttttttttttccttcccttctgatgcccttcacaccatcatttgcttaaagtctttgatgtgtccattttatagattacgatgctgtctttgcagctgttgagcaggaacaaatcttacataagattgctcttagcatctgcttccttttctctctgtgacctaaactctccccttcctggcaaccagaatggagatcatcagttagaaaatattgaatagggctgggcgcggtggctgacgcctgtaatcctagcactttgggaggccgaggcgggtggatcacgaggtcaggagatcgagaccatcctggctaacacagtgaaaccctgtctctactaaaaatacaaaaaaatcagccgggtgtggtggcgggcacctgtagtcccagctactccggaggctgaggcaggagaatggcgtgaacctgggaggtggagcttgcagtgagcggagatcgcgccattgcactccatcctgggcgacagagcaagactccgtctcaaaaagaaaatactgaataactataaaatctttaaatagagattagtttaatttgaaatgtacaagtattcagcatatgctattcgtatatgtgtgttcatggatgtttgtgtatgtggtcttgtgtgtgtgtgtgtgtgtgtgtgtgtgtgtgtgtttctcttgatccaccaccaccccattcaccagcctgacagaagacagtgtttccagaaggaatgtaattcatgcgcatttttttcatgttaagttttataagaagaccaaacagctgccagtcctaggaaaatgctgtgaagagatccagccacatcagtggaagccacctatagagagagaagaacaccggctcccattctggttaaaggtacagccctcttcctcgaagtctgtaggaggcagaaggtcactgaaagttctgagagaatatcaaggacttccttaatcgtctaatgctttagttgtagaactaggacttcaggaatcttcctgattcacctttcttcccttacttttctgcccttctccgggtgattctacaacattttcaaaataatgggtaaaatggtaatttgctaaaggaaattcagagaagagtttctaaagtgtataattggactgtggtctttgtagaaatttcatatgcagagtcccttggaaagatgccttgagcttgtctcaggtccctaaacttagaaagtcctattctttttcccaaattctgacatgtgctggatcagagtgttctcatttccaataggccagtctgccatccatccaggaagaactgcggcacatggctgatggtgctagagaggtaggaaatatgactggaaccactgagatcaactcagatcaaggcctagaaaaagacaactcagagttggggagtgaaactcggtacccactgctattgcctaagggtgtagtcctgaaactgaagccagttgccgaccgtttccccaagaaggcttggagacagaagcgttcatcagtcctgaaacccctccttatccaacccagcccctctctccagcccagcttcaaccctgggaaaacaccagcccaatcaactcattcagaagcccctccgagcaaaatggtgctccggattcctcacccaatacagccagccactgttttacagacagttccaggtgtccctccactgggggtcagtggaggtgagagttttgagtctcctgcagcactgcctgctatgccccctgaggccaggacaagcttccctctgtctgagtcccagactttgctctcttctgcccctgtgcccaaggtaatgatgccctcccctgcctcttccatgtttcgaaagccatatgtgagacggagaccctcaaaaagaaggggagccagggcctttcgctgtatcaaacctgcccctgttatccaccctgcatctgttatcttcactgttcctgctaccactgtgaagattgtgagccttggcggtggctgtaacatgatccagcctgtcaatgcggctgtggcccagagtccccagactattcccatcgccaccctcttggttaaccctacttccttcccctgtccattgaaccagccccttgtggcctcctctgtctcacccttaattgtttctggcaattctgtgaatcttcctataccatccacccctgaagataaggcccacatgaatgtggacattgcttgtgctgtggctgatggggaaaatgcctttcagggcctagaacccaaattagagccccaggaactatctcctctctctgctactgttttccccaaagtggaacatagcccagggcctccaccagtcgataaacagtgccaagaaggattgtcagagaacagtgcctatcgctggaccgttgtgaaaacagaggagggaaggcaagctctggagccgctccctcagggcatccaggagtctctaaacaactcttcccctggggatttagaggaagttgtcaagatggaacctgaagatgctacagaggaaatcagtggatttctttgagctaggagaataagagtctggagactgggagccttcacttcggcctccgattggtggcgcatagggtgtaaccaataggaaacccctaaagggtacttaaaccccagattttgcaactggggctcttgagcagcttgctttagcctgctcccactctgtggaatatacttttgcttcaataaatctgtgcttttattgcttcattgtttca

SEQ ID NO: 15009 - DNA, 2684 bp, Homo sapiens
gaggaggaggcgagccgcagcgccgcggcgacgaacccagggagaaaaggaagcaaatgagctgatggaagatctgtttgaaactttccaagatgagatgggattctccaacatggaagatgatggcccagaagaggaggagcgtgtggctgagcctcaagctaactttaacacccctcaagctctacgccagcttctgttactgatgtaaggatgcagagtcctgtcaggagttaggtgtcaagtgaagtctccttgttatggggcagtgcagctgtaggccaagctgtatctgtttgggaagggagaaaaaacagtagctggcatccatatccacttctccgggtttgaggaactactggccaacctactaaatgaacaacatcagatagcgaaggaactatttgaacagctgaagatgaagaaaccttcagccaaacagcagaaggaggtagagaaggttaaaccccagtgtaaggaagttcatcagaccctgattctggacccagcacaaaggaagagactccagcagcagatgcagcagcatgttcagctcttgacacaaatccaccttcttgccacctgcaaccccaatctcaatccggaggccagtagcaccaggatatgtcttaaagagctgggaacctttgctcaaagctccatcgcccttcaccatcagtacaaccccaagtttcagaccctgttccaaccctgtaacttgatgggagctatgcagctgattgaagacttcagcacacatgtcagcattgactgcagccctcataaaactgtcaagaagactgccaatgaatttccctgtttgccaaagcaagtggcttggatcctggccacaagcaaggttttcatgtatccagagttacttccagtgtgttccctgaaggcaaagaatccccaggataagatcctcttcaccaaggctgaggacaatttgttagctttaggactgaagcattttgaagggactgagtttcttaaccctctaatcagcaagtaccttctaacctgcaagactgcccgccaactgacagtgagaatcaagaacctcaacatgaacagagctcctgacaacatcattaaattttataagaagaccaaacagctgccagtcctaggaaaatgctgtgaagagatccagccacatcagtggaagccacctatagagagagaagaacaccggctcccattctggttaaaggccagtctgccatccatccaggaagaactgcggcacatggctgatggtgctagagaggtaggaaatatgactggaaccactgagatcaactcagatcaaggcctagaaaaagacaactcagagttggggagtgaaactcggtacccactgctattgcctaagggtgtagtcctgaaactgaagccagttgccgaccgtttccccaagaaggcttggagacagaagcgttcatcagtcctgaaacccctccttatccaacccagcccctctctccagcccagcttcaaccctgggaaaacaccagcccaatcaactcattcagaagcccctccgagcaaaatggtgctccggattcctcacccaatacagccagccactgttttacagacagttccaggtgtccctccactgggggtcagtggaggtgagagttttgagtctcctgcagcactgcctgctatgccccctgaggccaggacaagcttccctctgtctgagtcccagactttgctctcttctgcccctgtgcccaaggtaatgatgccctcccctgcctcttccatgtttcgaaagccatatgtgagacggagaccctcaaaaagaaggggagccagggcctttcgctgtatcaaacctgcccctgttatccaccctgcatctgttatcttcactgttcctgctaccactgtgaagattgtgagccttggcggtggctgtaacatgatccagcctgtcaatgcggctgtggcccagagtccccagactattcccatcgccaccctcttggttaaccctacttccttcccctgtccattgaaccagccccttgtggcctcctctgtctcacccttaattgtttctggcaattctgtgaatcttcctataccatccacccctgaagataaggcccacatgaatgtggacattgcttgtgctgtggctgatggggaaaatgcctttcagggcctagaacccaaattagagccccaggaactatctcctctctctgctactgttttccccaaagtggaacatagcccagggcctccaccagtcgataaacagtgccaagaaggattgtcagagaacagtgcctatcgctggaccgttgtgaaaacagaggagggaaggcaagctctggagccgctccctcagggcatccaggagtctctaaacaactcttcccctggggatttagaggaagttgtcaagatggaacctgaagatgctacagaggaaatcagtggatttctttgagctaggagaataagagtctggagactgggagccttcacttcggcctccgattggtggcgcatagggtgtaaccaataggaaacccctaaagggtacttaaaccccagattttgcaactggggctcttgagcagcttgctttagcctgctcccactctgtggaatatacttttgcttcaataaatctgtgcttttattgcttcattgtttca

SEQ ID NO: 15010 - DNA, 11646 bp, Homo sapiens
ttaaaggggaaaggaggtaaaacatttttgagcatacactatgtgacaggtattactaggtactttttaagtgtttgttttactttgtgaataaagtgttacacgtaagaaagagtaagagaggccgggcgccgtggcttacgcctgtaatccaacactttaggaggccgaggctgtcggatgacaaggtcaggagatcaagaccatcctgtctacagtgaaaccccgtctctactaaaaatacaaaaaatcagccaggcgtggtggcaggcgcctgtagtcccagctactcaggaggctgaggcaggagaatggcctgaacccgggaggcggagcttgcagtgagccaagattgcgccacgcactccagtctgggcgacagagccagactccgtctaaaaaaaaaaaaaaaaaaagtcaacttttattgccagtgaatgggactccctttagacctaatgttagttgaggaaagactgtggaaactctttggggagtggtaggcagatgggagggaatcaagttagataaggacagctctacctaaatgcaaaaatgcattcacaggctttttgaagccctcttttttcctagaagttgatttatcagagatttattttcttatagccaatgaatttccctgtttgccaaagcaagtggcttggatcctggccacaagcaaggttttcatgtatccagagttacttccagtgtgttccctgaaggcaaagaatccccaggataagatcctcttcaccaaggctgaggacaagtaagtgtttactctgggggatcaaatatcccaaggagaagatgtagttcctttgaggagtttaggggaagtaagacttgtataataagacatggacacaaaaggaaaagcagtatagatgagcagagtcctctagaacgtgcttgttctagcagtgccaaatactgctttttggggggatgttacacacatttttaaaatgttttagactggacatggcggctcccacctgtaatcccagcactttgaaaggccaaggcaggaggttggcttttctaatgttattatttatttagagacaggatcttactctgtcacccaggctggagtacagtgttgcaatcacagctcactgcagccttgaactcctgggatcaagtgatcctcctgcctcagcctccatggagtagctgggaccacaagcgtgtgccaccatacatggctgattttttttgtacaggtgagggtatctctgtgttgcccaggctgctcttgaattcctgacctcaaatgatcctcccactcctggcctcccaaagtgctgggactataggcataagccaccacacccagctagattatgaacatttttatggccctttgtgtgtattgccacactgttaacagcaaatatgtatatatgtaaccatgattatatatgttatgttagagggtagtattggtgccagtttaatttgtctgacggggtacctattattcattttatatttgttttattagaatcattctccttcccatgtattctctttgaacttcctttgtgttgttaatatacagctcatcatgatctgacatttattgatgatttatgactagtttctcttgctcctacttaattgtgaactatttgattcttattcatagtacttaatcactactcactaaatacctgaaattttctactgagtagtcaccaacttgtagtagtcactacaagaattagttgtagaaaaagtagattggccagccatggtggctcacacctgtaatgacgacactttgggaggccgaggcaggaggatcacttgaggccagaagttcaagatcagcctaggcaacaaagtgagaactggtctctacaaataatgaaataaaacattagttaggcatggtagcaaacgtttatagccacagatactcaggaggctgaagtgcgggaatcgattgaacccaggcattcaagactgcagtgcactgtaatcatgccactgctctccagcctggacaacagagcaaaaccctgtctgaaaaaaatgaaaaagtagattgggccacacgccatgggctcatgcctgtaatctcagcactttgggaggctgagactggagaatcgcttcagcttaggaagtagcagctgcagtgggctgcgatcacgccactgcactccagcccaggtgacagagtgagaccttgttttaagaacaagtaagaaaaagtagattgtaaaatgtgttagtctggggaggccctttagaaggaaggactgtgaagtgagatttagtgttattgctcctttctcagtttgttagctttaggactgaagcattttgaagggactgagtttcttaaccctctaatcagcaagtaccttctaacctgcaagactgcccgccaactgacagtgagaatcaagaacctcaacatgaacagagctcctgacaacatcattaaagtgagtgtttcctgcatgcactatccaggcacctcaccaacacatatctgttcttttctcttgttattctcaaagaaaagaagaaccttcttttatctaaagctaatttctcctacttatatactagattaattcccctgttgccttttcagggacattgattcattcattacgttcctctggagtatcttcatcctcttaaaagattccacaaatccatgtttccctgtaataattctctttcttgaactttctagaaatgatatgcagtattccacttacatgctttgggtttttgttttgttttgtttttttggtcagacataatcttgcactgtcacccaggctggagtgcaggagtatagtggcatgatcttggctcactgcagcttccgcctcccgggttcaagtgattctcctgcctcagcctcccaaatagctgagattacaggcgtgcccaccacgctcagctaattttttgtatttttagtagatacgggtttcaccatgttggccaggctggtcttgaacttctgacctcaagtgatccaccagttttggcttcccagaggctaggattgcaggcataagccaccgtgcccagcctatatactttttctcaattttgtgtttgtatgtatgcatgtatgtgtgtgtgtgtgtgtgtgtgtgtttgtgtgtgtctgtgtctgtatgtatgtatgtatgtatgtatgtatgtattgagatggagtttcgctcttgtcgcccaggcccagcctatatactttttctcaactctttttacttattgattgattgattgagatggagtctcgctcttgacccccaggctggagtgcaatggtgcgatcttggctgactgcaacctctgcctcctgggttcaagtgattctcctgcctcagcctcccttgtagctgggattacaggcccctgccaccatgcccagctgatttttgtatttagtagagtcggggtttcaccatgttggccaggctggtctcgaactcctgacctcaggtgatccatctgcctcggcctccctaagtgctgggattacaaatgtgagccattgcccccagccttcttttttatttagatatttatttatgtttttttttttttttagagacaggttctcactctgtcatcctggctggagtgcatgggcacaatcataggtcactgcaacctcaaattcctgggtgatccttccacttcagccttccaagtagcttggactacaggtgcatgccaccaaggctagccgattattttattttgtgtgaagacagggtgtcattttgtttcccaggctggtcttgaagtcctgacctcaagcagtcctcttgcctcagctcggcctcccagagtgttgggattacaggcgtgagccatgatgcccagcctttggtttcattgtgtttttgtatttttcttgagacaaggtcttactctcctgcctaggctggagtacagtggtatagtcatagctcactgcagccttgaactcctaggctcaagcattcttccaacgtcagcctcccaaggagctgggattatatgcattagccactgtgcttggccattaaatttatttatttatttattttattttatttttttgagacagaatctgtctctgtcacccaggctggagtgcagtggcacaattttagctcactgcaacctccacctaccgggttcaagcaattttcatgccttagcctcctaagtagctgggactacaggcatgcgccaccacacctggctaatttttatatttttagtagaaacataatttcaccatgttggtcagtctgatcttgaactcctgatctcaggtgatctgcccacctcggcctcccaaagtgctggaattataggcgtgagcctctgtgcctggcaaaaaactttttttttttagggatggggtgtccctatattgcccaggctggtcttcaatttttggccttaggcaattctcctgtctcagcctctaattggtactgcctggtgtattggatttaggccttacttattaaccataaaccacggaagccgaagatttacctctctcctcactcccttactcccaccacaaacatgcacattttctgctctccaaactcctcactagtagttatggtagaattttggttagattgtattcagggtttacattgtaagattttaaggactgttggctgggcgcggtggctcacgcctgtaatcccagcactttgggaggccaaggcaggtggataacgaggtcaggaaatcgagaccatcctggctaacatggtgaaaccccagctctactaaaaatacaaaaaactggctgggcgtggtggcgggcgcctgtagtcccagctactcgggaggctgaggcaggagaatggtgtgaacccgggaggtggagcttgcagtgagccgagatcgcgccactgcactccagtcttgccagagcaagactccgtctcaaaaaaaaaaaatagattttaaggactgtataaatgctcttcacagctcagctatgttactgtgttaccttgcctttcctgctgaacattttgtttcccagatcatcttctttcagtgtgttcaggtattctagatattctgtcactttcatcttgaagaaattgctccctgagccctctgacattattccactttaagcgtgttgctctccatgttgctgcactgatgtcttcttgggctttttcttcaccatcatcccaggaattccttttgcctcatactgtgttagatcctcttatttcctgaattccacatctttgcttttgcattactttttttttttttttttttttttttgagacacagagtcttgctctgtcccccaggctggatctcggctcactgcaacctgcaaccttggtcttggtcttgaactcctgacctcaggggatccacccacctcagcctcccagagtgcggggattacaggcgtgagacaccacgcctggccttgttttttgttttgttttgcttttttttgagaccgagtctcgctttgttgcccaggctggagtccaaaggcgcgatgatcttggctcactgcaacgtccgcctcccgggttcaagcaattctcctgcctcagcctcccgagtagctgggattataggcacatgccactacgcctggctaattttttgtatttttagtagagacagggtttcaccatgttagccaggatggttttgatctcctgacctcttgatccacccgtttcggtctcccaaagtgctgggattacaggcgtgagtattacttctttactttagtggaacacattctagtagcttttttttaaaaaaaatttttttctgaattttaaaaaattgaggtgggggggtctcagttttttgcccaggctggtctcagactcctgggttcaagtgatcctcctgcttcagcatcccaaagtgctgagattataggcatgagccaccctgcatggccccattccagtagcatcctgagggagagtgcttgggaagggaattttcacatttaaaccatctccggggccgggcgcagtggctcacgcctgtaatcccagcactttgggaggctgaggcgggtggatcacgaggtcgggaaatcgagaccatcctggctaatgtggtgaaaccccgtctctactaaaagtacaaaaaaattagccgggtgtggtggcgggcgtctgtagtcccaggtactctggaggctgaggcaggagaatggcgtgaacctgggaggtggagcttgcagtgagccgagatctcgccactacactccagcctgggtgacagagcgagactccgtattaaaaaaaaaaaaaaaaaaatctccattcatggtcttttgattgtatcgatgtcagtttcctcgtttttgtttttgttttattttttttctttttttgagacagagtctcactgttgctcactgcagcctctgcctcctgggttcaagcgattctcctgcctcagcctcctgagtagctgggattagccaccacacccagctaatttttgtatttttagtagagatggggttttgccatgttggccaggtgatctcgaacccctgacctcaagtgatctgcccaccttggcctcccatagtgctgggattacaggcatgagccaccacatcctccatgtctggccagtttcctggtagtaatattgtactgtgtaccttgtttatatgtatagctcttgtttctatgtaacataaaaacattatattgggagaaactggttgaagggtacatgggacctcttggtactattttttgcaatttcctatgaatataattatttcaaaataaaaggaaaaaataatactctcctctgtcactgtatctagaattctagataggaaataatttttttaagaagcttttaagggcctcacttcattttcttctaactcctagtgtggtgttaagaaatttcatgccatttaactttttttttttttttccgagacagggtcccaccctgttgcccagtttggagcgtggctaaatcatggctcactggtgtctccaacccggtgtgcaccactatgcccagctaattttttttttttttttttttaagacatggtctcgttatgttggccaggctggtctcaaactcctggcctcaagtgctcgtcctgtcttggcctcccaaagtaatgggattataggcatgagccatggccccatttaactcttgagtctttgtgtaacacctgtttttctcaacctctgacagcatgcaggatttttcctttggcttcaatattttgaaaatgcatgataatatgccttagtatttgtctatttttatccatggttttttaaaaagtactttctttttgtttttgtttgtttgtttgttttgagacagagtctcgctccattgcccaggctggagtgcaatggcgtgatcttggctcactggaacctctgcctcccaggttcaagcaattgtcctgtttcagcgtcccgaggagctgggactacaggcgctcaccaccacaccctgctaatttttgtatttttagtagagacggggtttcaccttgttggtcaggctggtctcaaactcctgacctcgtgacccacccacctcagcctcccagagtgctgggattacaggtgtgggccaccatgcctggcgtatccatggttttaaggcacacgtgataaaccttattcttctgcagaaataatttttttttttttttttgagatggagtctcactctgttgccaggctggagtgcagtggcgtgatgtcggcccactgcactctccacctcctgggttcaagtgattctcgtgcctcagcctcccgagtagctgagattacaggcacgcgccaccacacttagctaatttttgtatttttagtagagatggggtttcaccatgttggccaggatggtcttgatctcctgaccttgtgatctgcctgcctcggcctcccaaagtgctgggattacaggcataagccaccacgcctggccagaagtaatttgtgtttaagttttagttttgtgtcatttttcgtgcacacctttgtacttttgttgggggatggggcggggtgtcggggttggagtcttgctctgttgcccaggctggagtgcagtggtgcagtcttggctcactgcaacctcttaattcctcagttcaagtgattctcctgcctcagcctgccaagtagctaggatcacaggcgtgcaccaccacacccagctaatttttttttgtactttattagagacagggtttcgccatgttggccaggctggtcatgaactcctgacctccagtgatccatcctcctcgttctcccaaagtgctggcattacaggcatgagccaccatgcccagccctttgtacattttttaatgtaggatgccatttgtccacttgactctcccactagtctgtaagctccatgagagcaggaattgcttcccttatgtgtgtgcttagcttttagcacagtgcctaggatatagaaaacatcttatgttcatcatgttggatgaacagatgcttattgtcatggtttaagttcagttcttatcttctttttttttttttgagatggagtctcaccctgttaccaacgctggagtgcagtggcatgatcttggctcactgcaatctccaccctaccacccccactgccaggttcaagcgattcttttgccccagcctcccaagtaactgggattacaggcacccaccaccacacccagctaatttttgtatttttagtagagatggagtttcaccatgttggccaggctggtctcaaactctcaatctcaagtgatctgcccgcctcagcctcacaaagtgctgggtttacagatgtgagccaccaaggccagcctatttactcttaaaactgaactgcctcggtctttttttttttccttcccttctgatgcccttcacaccatcatttgcttaaagtctttgatgtgtccattttatagattacgatgctgtctttgcagctgttgagcaggaacaaatcttacataagattgctcttagcatctgcttccttttctctctgtgacctaaactctccccttcctggcaaccagaatggagatcatcagttagaaaatattgaatagggctgggcgcggtggctgacgcctgtaatcctagcactttgggaggccgaggcgggtggatcacgaggtcaggagatcgagaccatcctggctaacacagtgaaaccctgtctctactaaaaatacaaaaaaatcagccgggtgtggtggcgggcacctgtagtcccagctactccggaggctgaggcaggagaatggcgtgaacctgggaggtggagcttgcagtgagcggagatcgcgccattgcactccatcctgggcgacagagcaagactccgtctcaaaaagaaaatactgaataactataaaatctttaaatagagattagtttaatttgaaatgtacaagtattcagcatatgctattcgtatatgtgtgttcatggatgtttgtgtatgtggtcttgtgtgtgtgtgtgtgtgtgtgtgtgtgtgtgtgtttctcttgatccaccaccaccccattcaccagcctgacagaagacagtgtttccagaaggaatgtaattcatgcgcatttttttcatgttaagttttataagaagaccaaacagctgccagtcctaggaaaatgctgtgaagagatccagccacatcagtggaagccacctatagagagagaagaacaccggctcccattctggttaaaggtacagccctcttcctcgaagtctgtaggaggcagaaggtcactgaaagttctgagagaatatcaaggacttccttaatcgtctaatgctttagttgtagaactaggacttcaggaatcttcctgattcacctttcttcccttacttttctgcccttctccgggtgattctacaacattttcaaaataatgggtaaaatggtaatttgctaaaggaaattcagagaagagtttctaaagtgtataattggactgtggtctttgtagaaatttcatatgcagagtcccttggaaagatgccttgagcttgtctcaggtccctaaacttagaaagtcctattctttttcccaaattctgacatgtgctggatcagagtgttctcatttccaataggccagtctgccatccatccaggaagaactgcggcacatggctgatggtgctagagaggtaggaaatatgactggaaccactgagatcaactcagatcaaggcctagaaaaagacaactcagagttggggagtgaaactcggtacccactgctattgcctaagggtgtagtcctgaaactgaagccagttgccgaccgtttccccaagaaggcttggagacagaagcgttcatcagtcctgaaacccctccttatccaacccagcccctctctccagcccagcttcaaccctgggaaaacaccagcccaatcaactcattcagaagcccctccgagcaaaatggtgctccggattcctcacccaatacagccagccactgttttacagacagttccaggtgtccctccactgggggtcagtggaggtgagagttttgagtctcctgcagcactgcctgctatgccccctgaggccaggacaagcttccctctgtctgagtcccagactttgctctcttctgcccctgtgcccaaggtaatgatgccctcccctgcctcttccatgtttcgaaagccatatgtgagacggagaccctcaaaaagaaggggagccagggcctttcgctgtatcaaacctgcccctgttatccaccctgcatctgttatcttcactgttcctgctaccactgtgaagattgtgagccttggcggtggctgtaacatgatccagcctgtcaatgcggctgtggcccagagtccccagactattcccatcgccaccctcttggttaaccctacttccttcccctgtccattgaaccagccccttgtggcctcctctgtctcacccttaattgtttctggcaattctgtgaatcttcctataccatccacccctgaagataaggcccacatgaatgtggacattgcttgtgctgtggctgatggggaaaatgcctttcagggcctagaacccaaattagagccccaggaactatctcctctctctgctactgttttccccaaagtggaacatagcccagggcctccaccagtcgataaacagtgccaagaaggattgtcagagaacagtgcctatcgctggaccgttgtgaaaacagaggagggaaggcaagctctggagccgctccctcagggcatccaggagtctctaaacaactcttcccctggggatttagaggaagttgtcaagatggaacctgaagatgctacagaggaaatcagtggatttctttgagctaggagaataagagtctggagactgggagccttcacttcggcctccgattggtggcgcatagggtgtaaccaataggaaacccctaaagggtacttaaaccccagattttgcaactggggctcttgagcagcttgctttagcctgctcccactctgtggaatatacttttgcttcaataaatctgtgcttttattgcttcattgtttca

SEQ ID NO: 15011 - DNA, 2508 bp, Homo sapiens
ttaaaggggaaaggaggtaaaacatttttgagcatacactatgtgacaggtattactaggtactttttaagtgtttgttttactttgtgaataaagtgttacacgtaagaaagagtaagagaggccgggcgccgtggcttacgcctgtaatccaacactttaggaggccgaggctgtcggatgacaaggtcaggagatcaagaccatcctgtctacagtgaaaccccgtctctactaaaaatacaaaaaatcagccaggcgtggtggcaggcgcctgtagtcccagctactcaggaggctgaggcaggagaatggcctgaacccgggaggcggagcttgcagtgagccaagattgcgccacgcactccagtctgggcgacagagccagactccgtctaaaaaaaaaaaaaaaaaaagtcaacttttattgccagtgaatgggactccctttagacctaatgttagttgaggaaagactgtggaaactctttggggagtggtaggcagatgggagggaatcaagttagataaggacagctctacctaaatgcaaaaatgcattcacaggctttttgaagccctcttttttcctagaagttgatttatcagagatttattttcttatagccaatgaatttccctgtttgccaaagcaagtggcttggatcctggccacaagcaaggttttcatgtatccagagttacttccagtgtgttccctgaaggcaaagaatccccaggataagatcctcttcaccaaggctgaggacaatttgttagctttaggactgaagcattttgaagggactgagtttcttaaccctctaatcagcaagtaccttctaacctgcaagactgcccgccaactgacagtgagaatcaagaacctcaacatgaacagagctcctgacaacatcattaaattttataagaagaccaaacagctgccagtcctaggaaaatgctgtgaagagatccagccacatcagtggaagccacctatagagagagaagaacaccggctcccattctggttaaaggccagtctgccatccatccaggaagaactgcggcacatggctgatggtgctagagaggtaggaaatatgactggaaccactgagatcaactcagatcaaggcctagaaaaagacaactcagagttggggagtgaaactcggtacccactgctattgcctaagggtgtagtcctgaaactgaagccagttgccgaccgtttccccaagaaggcttggagacagaagcgttcatcagtcctgaaacccctccttatccaacccagcccctctctccagcccagcttcaaccctgggaaaacaccagcccaatcaactcattcagaagcccctccgagcaaaatggtgctccggattcctcacccaatacagccagccactgttttacagacagttccaggtgtccctccactgggggtcagtggaggtgagagttttgagtctcctgcagcactgcctgctatgccccctgaggccaggacaagcttccctctgtctgagtcccagactttgctctcttctgcccctgtgcccaaggtaatgatgccctcccctgcctcttccatgtttcgaaagccatatgtgagacggagaccctcaaaaagaaggggagccagggcctttcgctgtatcaaacctgcccctgttatccaccctgcatctgttatcttcactgttcctgctaccactgtgaagattgtgagccttggcggtggctgtaacatgatccagcctgtcaatgcggctgtggcccagagtccccagactattcccatcgccaccctcttggttaaccctacttccttcccctgtccattgaaccagccccttgtggcctcctctgtctcacccttaattgtttctggcaattctgtgaatcttcctataccatccacccctgaagataaggcccacatgaatgtggacattgcttgtgctgtggctgatggggaaaatgcctttcagggcctagaacccaaattagagccccaggaactatctcctctctctgctactgttttccccaaagtggaacatagcccagggcctccaccagtcgataaacagtgccaagaaggattgtcagagaacagtgcctatcgctggaccgttgtgaaaacagaggagggaaggcaagctctggagccgctccctcagggcatccaggagtctctaaacaactcttcccctggggatttagaggaagttgtcaagatggaacctgaagatgctacagaggaaatcagtggatttctttgagctaggagaataagagtctggagactgggagccttcacttcggcctccgattggtggcgcatagggtgtaaccaataggaaacccctaaagggtacttaaaccccagattttgcaactggggctcttgagcagcttgctttagcctgctcccactctgtggaatatacttttgcttcaataaatctgtgcttttattgcttcattgtttca

SEQ ID NO: 15012 - DNA, 18273 bp, Homo sapiens
cgccgctgaaggtacgcgtgagggcctgcgctggagccggcttgacagggtctgagggggagtggagaactgggcgaggaggttcccgtgggtgagcgcgtacgggatggctggctcgcaggacggccgaaggtggtggttggtgggagcagccagcgacgagcccgtagacactcgtacgcgtgcgggctgacgtgcgcgctacatggccggagtcgggcgaagcgggggaccgtggggaagaacgcgaggagggaggagtgggaggttgggggtgtcgctaggcgcccttagctccctccctctggaggagctgccgcggccactctgctgccgccgctgccgccgccattttgggttcgctttgcgaggggaaacgatcccagtgtcggttgcgggatccgcctcctctcagtttgcccctttagccctccacctttcccttctcctctctcgcatttccgccagtcggcttacccgctggccgcctcctgacaagcgggagggatccgcggtggacccagggaagcggaggagcctggcggccaccccctcttcctcacttccctgtactctcatcgctctcggcctccgacacggtgagtagaacgatttgggccggcattcgggcctaagcactctctcagcgattgaatcctgggctttctgggagccactgtcatctcccggacctggacctctgggagagcagtggtgaagatgggggaggggagagcagggagggggatcctgagcctaccgggaagtccctccaggcggggtgaaggggtgtccctgacaggcagactcccggagggggctgggaagtaagcgagtggaggcggagtcggctgtgcccctgacaggttagtttgtgtttgtaggcatgatcggagcctcccccatagtccagtttgtgtgtgtttaattaagggataagagtggtcgaggacacgatcttgagaggggattttacctgtgtgacaaggtctgtggtgtccctgccgcgttgaacggtatgtgggaacgacaggatgatctcagtgttgtacgtttaataaatgtcactggttagtttgtacatggaaagagatgtttttggtctagcagacagatggtctgttggtgtgtagcggctgtgttggtgtgtgtatgtgaggatggcaagtgtttccgtaagagtttgcctttatttgtgtaagtgtaatggagttccccttataagttagcttatttcttgaataaatgttgggaggttccttgcaggttgatatgtgtgtgtattttagggattgggagcccctagttacttgttgggaaagagcggcaatggtagtgttctgtacagcatgtgtctgtgaggtcagggaggggagaaacttggcatagccagttgtggtcttaagaatagtttgtgcctttggttagagtgagttgtgtaaatgtgaagggccaaaatatctttaacagaatcattgctacaaagctgtaaagaatgggtggccttatttgttgtcgcgggtttatagtaatagtttacaatacaataagaaagctctttcagtttctttgtgatactgaatctctgtgaaaatggtaggatgctttcttccattttacaaaataggaaatttaggcataaggagagaacttctccaaggccgcatgttaaattggtgacaaagttggaactgtaactcccatattttcactactactgcagcagtatattcagcataccatggtgcctcaggaagtctttgtcggcaaatctgagtatgctggaaagataggagcacataagactggttggcttgtatttgggggagaccgattgtgtcagatatgtatgtggaacgtagctgtccttgccgagtctgacctgtatgaaatgcatatccatggctatattattttggatttatggaggaagcagagcatttctgacacttaaggttgtatgcgtgagggagaaggctttcacagcttaacttgtaccagagcagctgcatgggtgctgacagcttaacttgaaatctgtgggaggaaggatcctttttcactcattcaacaaatataaccattcaatgaatggtccatgccttgaggtgaggatcatcaaggtgtctctgtaaatagcctggatgcaatctgaggggagttgttttgacggtggtaggtattaagttgagggaggcagtgtggaattaaaaccagagaactgtttttgggtactggtaattgttaatatatgtgcctgtggatgttggaacttcttggctgggctgaaggaatcctttgaaagactgatttcggcagggcgcggtggctcacacctgtaatcccagcactttgggaggccgaggtgggcggatcacgaggtcaggagatcgaatcacgaggtcaggagatcgagactatcctggctaacaggatgaaaccccgtctctactaaaaatacaaaaaattagccgggcgtggtggcgggcgcctgtagtcccagctactcggggaggctgaggcaggagaatggcgtgaacccgggaggcagagcttgcagtgagctgagattgcgccactgcactccagcctgggccacagaggagactccatctccaaaaaaaaaaaaaaaaaaaaaaaaaagactgatttcatgtagtaaggatcccgtctatgaactctatgaatatgaggtaagaatgcatgaactaagccaacttagctgtattcttctggaaaatgggatgtttcttgataggctagattagtggttcttaaaagttttttggggtcacttatccttcagagaatcggatgaaagacactgggccctcaagttagaagatgagcataagcgcaatcacatgatttatatatatgattttaggaacttaaactgtaatgaaatagagccaatttatatttagatctcatttgaaaacctttcattttcattgttcgggtgtgtggatgttagtatgagtttaaggtgaaggagtctatgttagtatttgaacatgttgacaggatccatatttttaatttattctttttatcgtctgcaaacatttctgcagtattagtaaatgactctgtatttggtaaaaagggaagctaatgtcgcacaagtatctatggctttgttctttgtcagtatctttttgttctcaaactctgagaagcgtctttttttcagttttggattgggcctgaggtgatttgaagctcctgtcttggagtttaacttagttataacaaacactgagttaatcctatgcaggagacacaaagataattaatatatggtctctgtgcttgaagagacgctaattttctgtggttgaagagatgctgtgaattgtgtgatagtggcagctctcaaaaggacaaggaagagggaaacatattcctagaagctgaaattttattacccaattgcaaagactttttgtcactacttattcttaggaataaccataaagtgtttattttattctgtatggaactttgtactttaaaaaaatatgttttgtatcatctggtgtttttgtataaaggaactgttggtttgaaaagaaggtaaacatcatttatattccttaccttgttttgggatgtatctctacagtgagtttatgtaaaaaggtcttaatgtcatttttgggtatacatacatgtagaaagccctcctgatataaaatccagtagctatttgacagactacccattaatttattactggaacttaaaaataattactgtacttttaaaagaacaagaaattggtcaggtggggtggctcacgcctgtaatcctagcactttgggaggacgaggcggatggattgtcagagctcagaagatcgagaccagcctgggcaacacggtgaaaccccgtctctactaaaatacaaaaaattagctgcatgtgttggagtgcacctgtagtcccagctactcgggaagctgaggcacgagaattgcttgaaccaagaattgcttgaactgggagggggaagttgcagtgagctgaaatcatgccactgcactctagcctcggcatcagagcaacactctgtctcacaaaaaaaaaaaaaaaagcaagaaatgtaaaaaggtgttttaataggacagattataggattcagtgagataatggagaagttttaggaaaaattgtctgatagtcctttctttctattgacatggcccctgtataagaatgctatgtaaatttgtgaaaagtttaatattttctctaatttttaacgggtagtaggttcatggtgttatttttctcaaaacgtacatgtgatatgtgtgtgtagtgtgcatatatgtgcatgtatgtgtatacaatttctttatttttttaattgagattaggtctcgctatggttttttgtttttgtttttgtttttgagagagagtttcgctctcctcgcccaggctggagtacaatggcacaatcttgcctcactgcaacctctgcctcccaggttcaagtgattctctttcctcagcttcccaaatagctgggattacaggcgcgtgccaacacgccctgctgatttttgtatttttagttgagacagggtttccccacgttggccaggctggtcacgaactcctaacctcaagttctccagccgtctcggccttccaaagtgctgggattataggagtgagccactgcacctggcccaggtcttgctatgtagatcaatctggtcttgaactcctggcctcaagccatcctcctgtcttggcctcccagtttgctgggattacagatgtgagccagcatgcccagctctttttacctgcttaccaaatccaagattttctccaaaatgaactggaatagccttcttactgtgttaattttgccttggtggggaagcctaagtcttggaactaaattggggtggttatgacagttctctttttaaagctgatcagtatttcagtatttcacttgttgttgttttttttgttttgttttgttttttttgagatggagtcttgctctgtagcccagtttggaatgcagtggcaggattttgactcactgtagcctctgccacccggattcaagtgattctcctgcctcaatgtcctgagcagctgggtttacaggcacgcaccactacacctggctaatttttgtattgttagtagagacagggtttcaccatgttagccagtagccaagctgttctcatactcctgacctcaagtgatccacctgcctcagcctcccaaagtgctgggattacaggtgtgagccaccacgcctagccaaacccatctctttcattaaaccacctcattttggttcagaaacaagactgccatgtatgtatttaatgcttattatgtgccaagcactattccaggtactaagatacagtgatggacaaaacaagatcccttctcctctatctcaggacttattaatttgggcattttcattttccaatataggatcttttagtactggtataggattcctgaaggaattcctgaaatataattatttttctgctagagcaaatcaattttgttttttgttttttttttgagatggagtttcgctcttgtcgcccaggctggagtgcaatggcgcaatctcggctcactgcaacctccgactcccgggttcaagcgattctcctgcctcagcctcccaagtagctgggattacaggcattagccaccacgctaggctaatttttgtatttttagtagagacagggtttcaccaggttggccaggctggtctcgaactcctgacctcaggtgatcctccaggctcagcctcccaaagtgctaggattacaggcaggagccaccacgcccagaagagcaaaattcttctgttgacaaaaatttctttcctctgaggaagagacactgtgtgcctgtgttttatccaggaattccattggatagtttgtcctttgggatgtcagtggattaaatcctccattaagaatcaaagtacttggctgggtgcagtggctcatgcctgtaatccctgcactttgggaggctgaggcaggtggatcacctgaggtcaggagttggagaccaacctggccaacatgatgaaaccccatctctactaaaaatacaaaaaattatccaggtgttgtggcaggtgcctgtaatcccagctactctcgaaaaaacagaaacaaaaactctgacatgtagagtatgtagatgtagagaaaaaagtaaaatgattgttgaaaaaaatgtctattttttatcttctaaatagctttgtgtgtcagagatcagaacgctcattttacatgatatcaagaaccagaatgctagatagctagaatggttgttaacttcctagataaccattgtagaggaacacataaggtaaaacaaatgaataaaaattaaaaaaaaatgagatagccaaagatttgaagctctttacccattaacatgataatcatttcgactttgaatatttgtagaacaagagtcagaactcagaacaaagatctctgaggaaataaaaaaaaatcaagctgcctcctaatttctcatttagtctgtcattgggcattgtcaaactgtcaaactatatttagagattctggttttcatctggagacttagtgagttgtgtaatatcttgaatacacatataagatcttgccaggtggggtggctcatgtctgtaatcccagcactttgggaggatgaggtgggaggatcgctggagcccaggagttcaagaccagcctgggcaacatagcaagtccctggctctatttaaaaaaaaaaaaaaaaaaaaatcctcaatgtagaactttaaatttatccttacgtgttacatccagttgatttgagaaaatatgattctgaattttccatcaattggattggcagtccctttcagctttacagctttacatcatctacagatttgttaagtatgttctcttggtcttctaattcactgatggagtttttgaataggtcgggtccaaagatagagtcctatgaaacactgttggaaacttgtctctgtctgtctcttttttttttggagacagtgtcttgctctgtcgttcaggctggaatgcagtgggacggtctcagctcactacagcctctgcttcttggactcaaagagattctctcacctcagcctctcaagtatatgggactatatgcatgtgcgaccaagcccagataaatttttttttagagatatgttgacattttgcccaggttgggagacttgtctcttgattccattcagtattgtgtgggtttggataggccatctaattataaaatcattgggctggtcatggtggctcatgcctgtaatcccagcactttgggaggctgaggtgggcggatcacctgaggtcaggagtttgagaccagcctgaccaatatggagaaaccccatctctactaaaaacacaaaattagctgggcgtggtggtgcatgcctgtaatcccagctacttgggaggctgaggcaggagaatagcttgaacctgggaggcggaggttgcagtgagccaaaatcgtgtcatcgcactccagcctgggcaacaagagcgaaactccgtctcaaaaaaaaaaaaaaatcatctagctcacattttctccttgtcttcttcctattagaatttaagttcaatgagattagaactctctctctctctcattctctcatatatcccaagcatctaaaacagggattgaaacatagtaagtactcaataaatgtttttgaataaatgaatgaaggatagctgggcgtggtggctcatgcctgtaaccccagcactttgggaagccaaggtgggtggatcactggagctcaggagttcaagaccagcttgggcaacatggggaaaacccatctctacaaaatatggaagaattagccgggcatgacagcacactcctgttgccccagctacttggagggctgaagtgggaggatcgcttgagcctgggaagcagagattgcagtgagccgagatcaagccactgccctccagcccgggtgacagagtgagaccctgtctcaggaataaggatagatatgaagaattcgtcagatgccttgttgaaaacatcatacattgtctacatggaattcctccatattgtaaaatgaatctaatttataccaacaacgtttggcttttttgcagaaaaggaagcaaatgagctgatggaagatctgtttgaaactgtgagtaatgatcctcaagtgagaacatgggattgtaagttggttctccaacaaaatgtgtcctttgatctctgtgatgctccttctagaagagggactgaaccaattctccttttagtctacctgggaaagaatataatgacaaaagaaatttgctaactgctagactcttgattatccacatgtaggttattcttactaaaattttccttgaagctttttttttttttttttgaggcaaagtcttgctctgtcacccaggctctggagaatacagtggtgaaatctcagctcacagcagcctcgacctccagggctcaaaacaattctctcatctaagcctcctgagtagctgggactacaggcacacacctacaggcccggctaattattttatttttttgtagagacagggtcttgccatgttctggaactcataggctcaagtaatcttcctgcctcaacctcccaaagtgctggaattacaggtgtgagccagcacatcttgccccttgaaaacttttgatggcttcccctactgtcatttggtgtgtccttaaagattgccaactagttttaaagtattttgcacacaaataattaccttttccataaatttgtctaaaaagatatttctgtttaagaaattgatcattttgagttatcctagctctgtgcttactgatacaagttgactggttgagcaacttctttcctggcataatagtcattccatatgtgggtttgtaggagtcctgaagtgagaaaggttctgatgtaggctctttctgggtgccagcattattaaagtattgtttatagttttcacttttccttcccaacactggagcaacattcaaaagcccattccccaggaaaaccctccctttcctttgcccacagttccaagatgagatgggattctccaacatggaagatgatggcccagaagaggaggagcgtgtggctgagcctcaagctaactttaacacccctcaagctctacggtaggctagttgaagaccttgagatttggaatagaggaagagtttatttctgaaaaggttttcagaagttgcagttaacaatttttcatccccagccagcttctgttactgatgtaaggatgcagagtcctgtcaggagttaggtgtcaagtgaagtctccttgttatggggcagtgcagctgtaggccaagctgtatctgtttgggaagggagaaaaaacagtagctggcatccatatccacttctccgggtgagtggtgctggagaggtatgtaggactcaatgtggccagccacacaaactaccctatattgtaatatccagtctgtcccttttgttctttttatgtgccattaatatctgctaaatgtgactgaaaatttgttagtcacctaggcattagtggagcaaaccctgaagcacctgcagtaaggagtctgaaacatacgtgctgacctttttgcctaaagttggcacttgtgttacagcatccagaaagtagaggctttaattttttcctcattttgtggtggatttgcatctgcactttattctgttgtagcagcatataatcattaggtcgatggcgagaggtcaggatgcagtttgtgccataagtggaacaaagcaaagagaatagtccctgtaattagtcctgtgtttgaacttaacagcactactaagcagagagcttgggttccatctgaaagctagacctttagggattttccaatttagtgaaaaaagataagataggccaaccaatgtcttaaaaactagaactactagtcattctccattacaacaaatatcacaatacaactacatcaaaaatctcaagattgctaagtcagtatttgacccattattttaatttatagttcatagaacaaaattctggtatagcagaatggaaccattcatcctgggaacgtataataggatctgattaataaatattttggttttgctgatcaactctttataacttcttaaaatttggaaaatatagaactaatttaaaattcctgttagaatccagttaccttctggtattcaatggaatatagtcatatatcatctcatggtcataccctctgtgaaatctatcattaaacgattcatcattgtgtaaacatcgtagaatgtacttacataaacctaaatggtttagcctactgcatacctattgctcccaggctacaaaacctgtacagtgtgttactgtactgtactgaatactgtaggcagttgtaacacaatggtaagtacatatgtatgtaaacatagaaaaggtacagtaatcttatggagccacctctgactatgtggttcgttattgactgaaacattctgtggcgcatgactgtacttgggcagcttctgcttctctttcgattgcaaatacaaacctgtttttgttttaatctttgactaaataaaaatccctctgtaagtccatagagagtaagcacatcttaaaacacaataaggaagagagaggagaaaaagacagtcaaaacaaaaactctggggcttcccttatcaattacctaaataatccttgttaaaactaagtgcaggctatgtttccattttctacttttttatgcttcttctcttctgttccttcagtggtggtagcgcggatgttcaaattttcagttctcagtaaagattgtatagacagtcccacggtcttcaggtttttactctgtgctacccaaacctacagtaaatactataaaagaaaacttattcaaacgtaatctttatctgcaaaaactattgaaaaacgttaccatttaactattgctgtaatatagggggttccttgaaatatgataacctgcttgttatagctacttcagcagatcttatcctgttgcatagggtatcagcatatgcttaatcatttaggtatattattctccctttatttctttctatgtaaacatagaaaaggtatagtaatcatacatagaactgacatgctaggtattggaatttttgcttcagccctgcaaacaatctttcaggagggtatggatgggaagttagggttaggaaccttggaagaggaatttaaagggctaaaagaagatagccttcatggataatattttaactaacttctccgttctgttcatttgaactaccatgtacttcagttattttggtatatccttttcctgcttcatgctagaaagtctttgacttgttaagaaagcagggcagtgcagcctgagtagataggataatgggacaagctggacctgggatgggagtaacatcccagggagtaacaagtaatgagagaagaaatgagaatgatgagttcccaccagctccttggctgctttcttacccatatatttctctgtccctagttttttgtttaattttttcttcatttgtatattatttggaagaggaattgtagaggaatgggatggggtgtaatacagaatcatttgatgcatgctaactactttgggaaaagatttgtgtaaggctgggagtttgactgttggctaaagtgaaaaggggggattagtagggaatgaaaattgttcaggctctttgctcatcattgcaaagaattggatgtgttgtggacctaggaaaacactcaaattcagtcatccccgtttgggataggtttgaggaactactggccaacctactaaatgaacaacatcagatagcgaaggaactatttgaacagctgaagatgaagaaaccttcagccaaacagcagaaggaggtagagaaggttaaaccccagtgtaaggaagttcatcagaccctgattctggacccagcacaaaggaagagactccagcagcagatgcagcaggtaacactttccttggtcatattaatattgaattataccaaggcctaactctgaggctttggtataatctaaaattagcagctttgtaaatgtcagagatagttaccttactacgtattaaaaccgtagtatcttcacatcagttaggagcttgagaagtcatcatgttcatgtcctgtggctcagggaagacagcacataaggaccctaatggtattcggaattacagatttcaaagagtcctcagtaatctattctgaaatttaaccttcactgtgacaagtagttttttttcccttttcccttttcttttttcttttttttttgagacgtagtctcgctctgtcacccaggctggagtgcagtggctcaatctcagctcactgcaagctctgcctcccgggttcacgccattctcctgcctcagcctcccgagtagctgtgactacagggactcgccaccacacccagctaattttttgtatttttagtagagacagggttcactgtgttagccaggatggtctcgatctcctaacctcgtgatccacccgcctcggcctcccagagtgctgggattacacgcgtgagtcactgcgcccggccttttccttttctaatctcagttcctcctctgtttagaggttaaacttcctctggttctgtcattttgttcaagggaacatgtctgagaaatttatgccaagatcctacgttgttctcacactctttgcagaaagcaaaatttgtgtcataaagttgcaaacatcttagttaatgactctctggtggctgggtgcagtggctcacacatgtaatcccagcactttgggaggctgaggtgggaggattgcttgagcaggggagttcaaaagcagcctggacaacatagtgagactctgtctctacaaaaaataaaaataaggctgggcacagtggctcacacctgtaatcccagcactttgggaggccaaggcgggtgaatcatgaggtcaggagtttgaggcaagcctggccaacatggtgaaaccccgtctctacgaaaacaaaaaattagctgggtgtggcggcgggcacctgtaatcccagctactcgggaggttgaggcaagagaatcacttgaacctgggaggcagaggttacagtgagccgagatcacgccattgcactccagcccaaaagtcagtgcgagactctgtctaaaaataataataataataataataaaataaattagccaggcattgtggtcacagctacttgggaggctgaggtgggaagattgcttgagcacaggtggttgagagggcattgagtcatggttgcaccactgcactccaagctgtgtgacagagcaagaccctgtctccagggggaaaaaaaaatatctctgggctcctgaaatggcagtgtcataacatatcactgcattattttctttctctccccagcatgttcagctcttgacacaaatccaccttcttgccacctgcaaccccaatctcaatccggaggccagtagcaccaggatatgtcttgtaagtttccaaattgccgtaattctatagactagaatataaaattagcttggcaggttatttctcacagttattctctcaggtatttttgattgctgtggcttcctatgtttgctgagtgaacataagccactgattcacatgaaaggacaaagagtgtattcaattttttcttttcttttttgagacagggtcttgctctttcacccaggatggagtgcggtggaacaatttcagttcactgcaacccctgcctcccgggttcaagtgattctcctgcctcagcctcccaagtagctgggactacaggcgggcaccaccacgggtaattttttttgtatttttagtagagacagggttttgccatgttggccaggctggtctcgaattcctgacttcaagtgatctgcccacctctacctcccaaagtactgggattacagccatgagccactgcgcctggcctgtccttctgatatttttattgggtcctcctcctcatctttagattcaccctgacttcttaggtttttggtaccgctattcatttcatagatgttgaggctgggcatagtggctcacacctgtaattccagcactttgggaggctgaggtgataggatcacttgagcccagtggtcaagaacagcctgggcaacatagtaagacccggtctgtgttttttttgttttgttttgttttaatttaaataatgaagtaaatatacatgtagatgttgaattcattatccattcatgaagctcaatattagtgttttatgtgtagagctagttttgctcatgacgttttgaggtattttgagctttttttttttttttttttttttttgagacggagtctcgctctgtcgcccaggctggagtgcagtggcgggatctcggctcactgcaagctccgcctcccgggttcacgccattctcttgcctcagcctcccaagtagctgggactacaggcacccgccactatgcccggctaattttttgtatttttagtagagacggggtttcaccgttttagccgggatggtctcgatctcctgacctcgtgatccgcccacctcggcctcccaaagtgctgggattacaggcgtgagccaccgcgcccggcctattttgagattttaaatttgaaatttggccaggtatggtggctcatgcctgtagtcccagcactttggtaggtcaaggtgggaggattgcttgagcccaggagtttgagaccagcctgggcaacatagtaagaccccatccctaccaaaaaaataaaaaataaaaaaattagctggggatggtgccgagtgcctgtagtcccagcaacttgggagactgaggtaggaggatcacttgagcctgggacgttgagactgtagggagccgtgcttatatatcactccagcctgggtgacagagtgagaacctgtctcacaaaaacaaaaccatactttacctcataaaaattgcctcaaacttttggacaggtaatgataatactctcagcttcttcagtaagtcttctttggattttgaagagtacatttgctagtattctaaaacttccttggtgatcaacaggatgtcttcatctcttactgtattcagaggaggatgaggagtacttggttgtaggcattattctgagaccaaaagacaaaacaattttaaaagtaatggtcctggtcgggtgaggtgactcatccctgtaatcccagcactatgagaggccgaggcaggcggattgtgagcccaggagttcgagatcagcctggccaagatgggaaaacgctgtctctgcaaaaaatacaaaaatcagctaggtttggaggtgtatgcctatagtcccagcttctcaggaggcagtgggaggatggcttgagcctgggagggggagtttgcagtgagctgagatcatgccactgcagtccagcctgagcggcagagtgagaccatgtctcaaaataaattaattaattaaattaaagtaatagtccccattcttgagactcttaattctagctcgggagctagaccatgtattccttagtgagaaacagtttaaaaataaaacaagaatataatccctgaatatctgagaactcaggcataatcttaacagtagtttattgtgaaagactttatgattatttttacctgtttttatcctgtagtaggaaggtcagcttctcatttagattctgaaggctattggtattaattgtctggaattgtcttagatcttccttgtgtcgtgttttcccagaaagagctgggaacctttgctcaaagctccatcgcccttcaccatcagtacaaccccaagtttcagaccctgttccaaccctgtaacttgatgggagctatgcagctgattgaagacttcagcacacatgtcagcattgactgcagccctcataaaactgtcaagaagactggtaggagacagatgtgtcagctttaagtttttacttgcggtgagaggtggtgggaatcttatcccatagataacttcctaggatacttgcctaggaatggaggacacaggacatttgtaatttcttccttctctcttttatcctccctttgtactcattatccaagttctagaattacatgataatctccgggcctgggtaaggcatggaggcagtggacagtataggaatatgggaggtagagatctgaggctcagtgctaagaattggactacagcaatatgaggggtaagtattaggaatcagatcaagataaactggggcctggtaaagatgaaagtcaggtggtaaagttcggtcatgtttagctttttattctcttcattaagatcaactaactttatttaccataatgattgtagcataggtgatatctccattctgaatgaaatgttgacttgcaagttaggcgtaaattagagattgtacatttgccgtgttcagtattttaaagaaatttgccggtttagattctaccttgcattggtttagtattttttgagaaaatatttgctatttacttaagccaaatatttacttctgatttgtttgctgacttagcaaattagttgtggtttgttctggatttgggtttgtctttggattctattttaaatccctaagtcttatcattacattgaatgtagttgaatttaagtgtactatatcatagacacagatcccaaactactttaatagctatattatatgaaatggtaatgaaaacgtgatttaataccaaattatagtattatcttacacatctagtgtcctgtgtttttcttctggagatataaaaatgacacttatggaaggagaaatatggatatagtagttttgtctctagaaatgcagaggtgcctaaaattgagaggctgagagagggagacagaaatgaatgagactgaattgtctcattccttttatggttcttttgttcccaacctcaggaggaatctgggagaacttaatgaaagttaagaaagaatgaaataaaagtaaaatttggaataccaggtttgtgagggagattaaagaagttggaatcttttttcttttttttttttttaagatggagtctcgctctgtcacctaggctggagtgcagtggggtgatctcggctcactgcaacctccgcctcccaggttcaaacaattctcctgcctcagcctcccaagtagctggaattacaggtgcgtgccaccatgcctggctaatttttacatttttggtagagatggggtttcactatgttggccaggctggtcttgaactcctgacctcaggtgatccacctgcctcggcctcccaaagtgctgggattacaggcgtgagccagcacgcctggcctggaatcttatcctggaagaaaaaagcattgttgaaggtctgttatccttcagagatttaaaggggaaaggaggtaaaacatttttgagcatacactatgtgacaggtattactaggtactttttaagtgtttgttttactttgtgaataaagtgttacacgtaagaaagagtaagagaggccgggcgccgtggcttacgcctgtaatccaacactttaggaggccgaggctgtcggatgacaaggtcaggagatcaagaccatcctgtctacagtgaaaccccgtctctactaaaaatacaaaaaatcagccaggcgtggtggcaggcgcctgtagtcccagctactcaggaggctgaggcaggagaatggcctgaacccgggaggcggagcttgcagtgagccaagattgcgccacgcactccagtctgggcgacagagccagactccgtctaaaaaaaaaaaaaaaaaaagtcaacttttattgccagtgaatgggactccctttagacctaatgttagttgaggaaagactgtggaaactctttggggagtggtaggcagatgggagggaatcaagttagataaggacagctctacctaaatgcaaaaatgcattcacaggctttttgaagccctcttttttcctagaagttgatttatcagagatttattttcttatagccaatgaatttccctgtttgccaaagcaagtggcttggatcctggccacaagcaaggttttcatgtat

SEQ ID NO: 15013 - DNA, 932 bp, Homo sapiens
cgccgctgaaggtacgcgtgagggcctgcgctggagccggcttgacaggtcggcttacccgctggccgcctcctgacaagcgggagggatccgcggtggacccagggaagcggaggagcctggcggccaccccctcttcctcacttccctgtactctcatcgctctcggcctccgacacgaaaaggaagcaaatgagctgatggaagatctgtttgaaactagacagggtcttgccatgttctggaactcataggctcaagtaatcttcctgcctcaacctcccaaagtgctggaattacagttccaagatgagatgggattctccaacatggaagatgatggcccagaagaggaggagcgtgtggctgagcctcaagctaactttaacacccctcaagctctacggtttgaggaactactggccaacctactaaatgaacaacatcagatagcgaaggaactatttgaacagctgaagatgaagaaaccttcagccaaacagcagaaggaggtagagaaggttaaaccccagtgtaaggaagttcatcagaccctgattctggacccagcacaaaggaagagactccagcagcagatgcagcagcatgttcagctcttgacacaaatccaccttcttgccacctgcaaccccaatctcaatccggaggccagtagcaccaggatatgtcttaaagagctgggaacctttgctcaaagctccatcgcccttcaccatcagtacaaccccaagtttcagaccctgttccaaccctgtaacttgatgggagctatgcagctgattgaagacttcagcacacatgtcagcattgactgcagccctcataaaactgtcaagaagactgccaatgaatttccctgtttgccaaagcaagtggcttggatcctggccacaagcaaggttttcatgtat

SEQ ID NO: 15014 - DNA, 16095 bp, Homo sapiens
gcgtgagggcctgcgctggagccggcttgacagggtctgagggggagtggagaactgggcgaggaggttcccgtgggtgagcgcgtacgggatggctggctcgcaggacggccgaaggtggtggttggtgggagcagccagcgacgagcccgtagacactcgtacgcgtgcgggctgacgtgcgcgctacatggccggagtcgggcgaagcgggggaccgtggggaagaacgcgaggagggaggagtgggaggttgggggtgtcgctaggcgcccttagctccctccctctggaggagctgccgcggccactctgctgccgccgctgccgccgccattttgggttcgctttgcgaggggaaacgatcccagtgtcggttgcgggatccgcctcctctcagtttgcccctttagccctccacctttcccttctcctctctcgcatttccgccagtcggcttacccgctggccgcctcctgacaagcgggagggatccgcggtggacccagggaagcggaggagcctggcggccaccccctcttcctcacttccctgtactctcatcgctctcggcctccgacacggtgagtagaacgatttgggccggcattcgggcctaagcactctctcagcgattgaatcctgggctttctgggagccactgtcatctcccggacctggacctctgggagagcagtggtgaagatgggggaggggagagcagggagggggatcctgagcctaccgggaagtccctccaggcggggtgaaggggtgtccctgacaggcagactcccggagggggctgggaagtaagcgagtggaggcggagtcggctgtgcccctgacaggttagtttgtgtttgtaggcatgatcggagcctcccccatagtccagtttgtgtgtgtttaattaagggataagagtggtcgaggacacgatcttgagaggggattttacctgtgtgacaaggtctgtggtgtccctgccgcgttgaacggtatgtgggaacgacaggatgatctcagtgttgtacgtttaataaatgtcactggttagtttgtacatggaaagagatgtttttggtctagcagacagatggtctgttggtgtgtagcggctgtgttggtgtgtgtatgtgaggatggcaagtgtttccgtaagagtttgcctttatttgtgtaagtgtaatggagttccccttataagttagcttatttcttgaataaatgttgggaggttccttgcaggttgatatgtgtgtgtattttagggattgggagcccctagttacttgttgggaaagagcggcaatggtagtgttctgtacagcatgtgtctgtgaggtcagggaggggagaaacttggcatagccagttgtggtcttaagaatagtttgtgcctttggttagagtgagttgtgtaaatgtgaagggccaaaatatctttaacagaatcattgctacaaagctgtaaagaatgggtggccttatttgttgtcgcgggtttatagtaatagtttacaatacaataagaaagctctttcagtttctttgtgatactgaatctctgtgaaaatggtaggatgctttcttccattttacaaaataggaaatttaggcataaggagagaacttctccaaggccgcatgttaaattggtgacaaagttggaactgtaactcccatattttcactactactgcagcagtatattcagcataccatggtgcctcaggaagtctttgtcggcaaatctgagtatgctggaaagataggagcacataagactggttggcttgtatttgggggagaccgattgtgtcagatatgtatgtggaacgtagctgtccttgccgagtctgacctgtatgaaatgcatatccatggctatattattttggatttatggaggaagcagagcatttctgacacttaaggttgtatgcgtgagggagaaggctttcacagcttaacttgtaccagagcagctgcatgggtgctgacagcttaacttgaaatctgtgggaggaaggatcctttttcactcattcaacaaatataaccattcaatgaatggtccatgccttgaggtgaggatcatcaaggtgtctctgtaaatagcctggatgcaatctgaggggagttgttttgacggtggtaggtattaagttgagggaggcagtgtggaattaaaaccagagaactgtttttgggtactggtaattgttaatatatgtgcctgtggatgttggaacttcttggctgggctgaaggaatcctttgaaagactgatttcggcagggcgcggtggctcacacctgtaatcccagcactttgggaggccgaggtgggcggatcacgaggtcaggagatcgaatcacgaggtcaggagatcgagactatcctggctaacaggatgaaaccccgtctctactaaaaatacaaaaaattagccgggcgtggtggcgggcgcctgtagtcccagctactcggggaggctgaggcaggagaatggcgtgaacccgggaggcagagcttgcagtgagctgagattgcgccactgcactccagcctgggccacagaggagactccatctccaaaaaaaaaaaaaaaaaaaaaaaaaagactgatttcatgtagtaaggatcccgtctatgaactctatgaatatgaggtaagaatgcatgaactaagccaacttagctgtattcttctggaaaatgggatgtttcttgataggctagattagtggttcttaaaagttttttggggtcacttatccttcagagaatcggatgaaagacactgggccctcaagttagaagatgagcataagcgcaatcacatgatttatatatatgattttaggaacttaaactgtaatgaaatagagccaatttatatttagatctcatttgaaaacctttcattttcattgttcgggtgtgtggatgttagtatgagtttaaggtgaaggagtctatgttagtatttgaacatgttgacaggatccatatttttaatttattctttttatcgtctgcaaacatttctgcagtattagtaaatgactctgtatttggtaaaaagggaagctaatgtcgcacaagtatctatggctttgttctttgtcagtatctttttgttctcaaactctgagaagcgtctttttttcagttttggattgggcctgaggtgatttgaagctcctgtcttggagtttaacttagttataacaaacactgagttaatcctatgcaggagacacaaagataattaatatatggtctctgtgcttgaagagacgctaattttctgtggttgaagagatgctgtgaattgtgtgatagtggcagctctcaaaaggacaaggaagagggaaacatattcctagaagctgaaattttattacccaattgcaaagactttttgtcactacttattcttaggaataaccataaagtgtttattttattctgtatggaactttgtactttaaaaaaatatgttttgtatcatctggtgtttttgtataaaggaactgttggtttgaaaagaaggtaaacatcatttatattccttaccttgttttgggatgtatctctacagtgagtttatgtaaaaaggtcttaatgtcatttttgggtatacatacatgtagaaagccctcctgatataaaatccagtagctatttgacagactacccattaatttattactggaacttaaaaataattactgtacttttaaaagaacaagaaattggtcaggtggggtggctcacgcctgtaatcctagcactttgggaggacgaggcggatggattgtcagagctcagaagatcgagaccagcctgggcaacacggtgaaaccccgtctctactaaaatacaaaaaattagctgcatgtgttggagtgcacctgtagtcccagctactcgggaagctgaggcacgagaattgcttgaaccaagaattgcttgaactgggagggggaagttgcagtgagctgaaatcatgccactgcactctagcctcggcatcagagcaacactctgtctcacaaaaaaaaaaaaaaaagcaagaaatgtaaaaaggtgttttaataggacagattataggattcagtgagataatggagaagttttaggaaaaattgtctgatagtcctttctttctattgacatggcccctgtataagaatgctatgtaaatttgtgaaaagtttaatattttctctaatttttaacgggtagtaggttcatggtgttatttttctcaaaacgtacatgtgatatgtgtgtgtagtgtgcatatatgtgcatgtatgtgtatacaatttctttatttttttaattgagattaggtctcgctatggttttttgtttttgtttttgtttttgagagagagtttcgctctcctcgcccaggctggagtacaatggcacaatcttgcctcactgcaacctctgcctcccaggttcaagtgattctctttcctcagcttcccaaatagctgggattacaggcgcgtgccaacacgccctgctgatttttgtatttttagttgagacagggtttccccacgttggccaggctggtcacgaactcctaacctcaagttctccagccgtctcggccttccaaagtgctgggattataggagtgagccactgcacctggcccaggtcttgctatgtagatcaatctggtcttgaactcctggcctcaagccatcctcctgtcttggcctcccagtttgctgggattacagatgtgagccagcatgcccagctctttttacctgcttaccaaatccaagattttctccaaaatgaactggaatagccttcttactgtgttaattttgccttggtggggaagcctaagtcttggaactaaattggggtggttatgacagttctctttttaaagctgatcagtatttcagtatttcacttgttgttgttttttttgttttgttttgttttttttgagatggagtcttgctctgtagcccagtttggaatgcagtggcaggattttgactcactgtagcctctgccacccggattcaagtgattctcctgcctcaatgtcctgagcagctgggtttacaggcacgcaccactacacctggctaatttttgtattgttagtagagacagggtttcaccatgttagccagtagccaagctgttctcatactcctgacctcaagtgatccacctgcctcagcctcccaaagtgctgggattacaggtgtgagccaccacgcctagccaaacccatctctttcattaaaccacctcattttggttcagaaacaagactgccatgtatgtatttaatgcttattatgtgccaagcactattccaggtactaagatacagtgatggacaaaacaagatcccttctcctctatctcaggacttattaatttgggcattttcattttccaatataggatcttttagtactggtataggattcctgaaggaattcctgaaatataattatttttctgctagagcaaatcaattttgttttttgttttttttttgagatggagtttcgctcttgtcgcccaggctggagtgcaatggcgcaatctcggctcactgcaacctccgactcccgggttcaagcgattctcctgcctcagcctcccaagtagctgggattacaggcattagccaccacgctaggctaatttttgtatttttagtagagacagggtttcaccaggttggccaggctggtctcgaactcctgacctcaggtgatcctccaggctcagcctcccaaagtgctaggattacaggcaggagccaccacgcccagaagagcaaaattcttctgttgacaaaaatttctttcctctgaggaagagacactgtgtgcctgtgttttatccaggaattccattggatagtttgtcctttgggatgtcagtggattaaatcctccattaagaatcaaagtacttggctgggtgcagtggctcatgcctgtaatccctgcactttgggaggctgaggcaggtggatcacctgaggtcaggagttggagaccaacctggccaacatgatgaaaccccatctctactaaaaatacaaaaaattatccaggtgttgtggcaggtgcctgtaatcccagctactctcgaaaaaacagaaacaaaaactctgacatgtagagtatgtagatgtagagaaaaaagtaaaatgattgttgaaaaaaatgtctattttttatcttctaaatagctttgtgtgtcagagatcagaacgctcattttacatgatatcaagaaccagaatgctagatagctagaatggttgttaacttcctagataaccattgtagaggaacacataaggtaaaacaaatgaataaaaattaaaaaaaaatgagatagccaaagatttgaagctctttacccattaacatgataatcatttcgactttgaatatttgtagaacaagagtcagaactcagaacaaagatctctgaggaaataaaaaaaaatcaagctgcctcctaatttctcatttagtctgtcattgggcattgtcaaactgtcaaactatatttagagattctggttttcatctggagacttagtgagttgtgtaatatcttgaatacacatataagatcttgccaggtggggtggctcatgtctgtaatcccagcactttgggaggatgaggtgggaggatcgctggagcccaggagttcaagaccagcctgggcaacatagcaagtccctggctctatttaaaaaaaaaaaaaaaaaaaaatcctcaatgtagaactttaaatttatccttacgtgttacatccagttgatttgagaaaatatgattctgaattttccatcaattggattggcagtccctttcagctttacagctttacatcatctacagatttgttaagtatgttctcttggtcttctaattcactgatggagtttttgaataggtcgggtccaaagatagagtcctatgaaacactgttggaaacttgtctctgtctgtctcttttttttttggagacagtgtcttgctctgtcgttcaggctggaatgcagtgggacggtctcagctcactacagcctctgcttcttggactcaaagagattctctcacctcagcctctcaagtatatgggactatatgcatgtgcgaccaagcccagataaatttttttttagagatatgttgacattttgcccaggttgggagacttgtctcttgattccattcagtattgtgtgggtttggataggccatctaattataaaatcattgggctggtcatggtggctcatgcctgtaatcccagcactttgggaggctgaggtgggcggatcacctgaggtcaggagtttgagaccagcctgaccaatatggagaaaccccatctctactaaaaacacaaaattagctgggcgtggtggtgcatgcctgtaatcccagctacttgggaggctgaggcaggagaatagcttgaacctgggaggcggaggttgcagtgagccaaaatcgtgtcatcgcactccagcctgggcaacaagagcgaaactccgtctcaaaaaaaaaaaaaaatcatctagctcacattttctccttgtcttcttcctattagaatttaagttcaatgagattagaactctctctctctctcattctctcatatatcccaagcatctaaaacagggattgaaacatagtaagtactcaataaatgtttttgaataaatgaatgaaggatagctgggcgtggtggctcatgcctgtaaccccagcactttgggaagccaaggtgggtggatcactggagctcaggagttcaagaccagcttgggcaacatggggaaaacccatctctacaaaatatggaagaattagccgggcatgacagcacactcctgttgccccagctacttggagggctgaagtgggaggatcgcttgagcctgggaagcagagattgcagtgagccgagatcaagccactgccctccagcccgggtgacagagtgagaccctgtctcaggaataaggatagatatgaagaattcgtcagatgccttgttgaaaacatcatacattgtctacatggaattcctccatattgtaaaatgaatctaatttataccaacaacgtttggcttttttgcagaaaaggaagcaaatgagctgatggaagatctgtttgaaactgtgagtaatgatcctcaagtgagaacatgggattgtaagttggttctccaacaaaatgtgtcctttgatctctgtgatgctccttctagaagagggactgaaccaattctccttttagtctacctgggaaagaatataatgacaaaagaaatttgctaactgctagactcttgattatccacatgtaggttattcttactaaaattttccttgaagctttttttttttttttttgaggcaaagtcttgctctgtcacccaggctctggagaatacagtggtgaaatctcagctcacagcagcctcgacctccagggctcaaaacaattctctcatctaagcctcctgagtagctgggactacaggcacacacctacaggcccggctaattattttatttttttgtagagacagggtcttgccatgttctggaactcataggctcaagtaatcttcctgcctcaacctcccaaagtgctggaattacaggtgtgagccagcacatcttgccccttgaaaacttttgatggcttcccctactgtcatttggtgtgtccttaaagattgccaactagttttaaagtattttgcacacaaataattaccttttccataaatttgtctaaaaagatatttctgtttaagaaattgatcattttgagttatcctagctctgtgcttactgatacaagttgactggttgagcaacttctttcctggcataatagtcattccatatgtgggtttgtaggagtcctgaagtgagaaaggttctgatgtaggctctttctgggtgccagcattattaaagtattgtttatagttttcacttttccttcccaacactggagcaacattcaaaagcccattccccaggaaaaccctccctttcctttgcccacagttccaagatgagatgggattctccaacatggaagatgatggcccagaagaggaggagcgtgtggctgagcctcaagctaactttaacacccctcaagctctacggtaggctagttgaagaccttgagatttggaatagaggaagagtttatttctgaaaaggttttcagaagttgcagttaacaatttttcatccccagccagcttctgttactgatgtaaggatgcagagtcctgtcaggagttaggtgtcaagtgaagtctccttgttatggggcagtgcagctgtaggccaagctgtatctgtttgggaagggagaaaaaacagtagctggcatccatatccacttctccgggtgagtggtgctggagaggtatgtaggactcaatgtggccagccacacaaactaccctatattgtaatatccagtctgtcccttttgttctttttatgtgccattaatatctgctaaatgtgactgaaaatttgttagtcacctaggcattagtggagcaaaccctgaagcacctgcagtaaggagtctgaaacatacgtgctgacctttttgcctaaagttggcacttgtgttacagcatccagaaagtagaggctttaattttttcctcattttgtggtggatttgcatctgcactttattctgttgtagcagcatataatcattaggtcgatggcgagaggtcaggatgcagtttgtgccataagtggaacaaagcaaagagaatagtccctgtaattagtcctgtgtttgaacttaacagcactactaagcagagagcttgggttccatctgaaagctagacctttagggattttccaatttagtgaaaaaagataagataggccaaccaatgtcttaaaaactagaactactagtcattctccattacaacaaatatcacaatacaactacatcaaaaatctcaagattgctaagtcagtatttgacccattattttaatttatagttcatagaacaaaattctggtatagcagaatggaaccattcatcctgggaacgtataataggatctgattaataaatattttggttttgctgatcaactctttataacttcttaaaatttggaaaatatagaactaatttaaaattcctgttagaatccagttaccttctggtattcaatggaatatagtcatatatcatctcatggtcataccctctgtgaaatctatcattaaacgattcatcattgtgtaaacatcgtagaatgtacttacataaacctaaatggtttagcctactgcatacctattgctcccaggctacaaaacctgtacagtgtgttactgtactgtactgaatactgtaggcagttgtaacacaatggtaagtacatatgtatgtaaacatagaaaaggtacagtaatcttatggagccacctctgactatgtggttcgttattgactgaaacattctgtggcgcatgactgtacttgggcagcttctgcttctctttcgattgcaaatacaaacctgtttttgttttaatctttgactaaataaaaatccctctgtaagtccatagagagtaagcacatcttaaaacacaataaggaagagagaggagaaaaagacagtcaaaacaaaaactctggggcttcccttatcaattacctaaataatccttgttaaaactaagtgcaggctatgtttccattttctacttttttatgcttcttctcttctgttccttcagtggtggtagcgcggatgttcaaattttcagttctcagtaaagattgtatagacagtcccacggtcttcaggtttttactctgtgctacccaaacctacagtaaatactataaaagaaaacttattcaaacgtaatctttatctgcaaaaactattgaaaaacgttaccatttaactattgctgtaatatagggggttccttgaaatatgataacctgcttgttatagctacttcagcagatcttatcctgttgcatagggtatcagcatatgcttaatcatttaggtatattattctccctttatttctttctatgtaaacatagaaaaggtatagtaatcatacatagaactgacatgctaggtattggaatttttgcttcagccctgcaaacaatctttcaggagggtatggatgggaagttagggttaggaaccttggaagaggaatttaaagggctaaaagaagatagccttcatggataatattttaactaacttctccgttctgttcatttgaactaccatgtacttcagttattttggtatatccttttcctgcttcatgctagaaagtctttgacttgttaagaaagcagggcagtgcagcctgagtagataggataatgggacaagctggacctgggatgggagtaacatcccagggagtaacaagtaatgagagaagaaatgagaatgatgagttcccaccagctccttggctgctttcttacccatatatttctctgtccctagttttttgtttaattttttcttcatttgtatattatttggaagaggaattgtagaggaatgggatggggtgtaatacagaatcatttgatgcatgctaactactttgggaaaagatttgtgtaaggctgggagtttgactgttggctaaagtgaaaaggggggattagtagggaatgaaaattgttcaggctctttgctcatcattgcaaagaattggatgtgttgtggacctaggaaaacactcaaattcagtcatccccgtttgggataggtttgaggaactactggccaacctactaaatgaacaacatcagatagcgaaggaactatttgaacagctgaagatgaagaaaccttcagccaaacagcagaaggaggtagagaaggttaaaccccagtgtaaggaagttcatcagaccctgattctggacccagcacaaaggaagagactccagcagcagatgcagcaggtaacactttccttggtcatattaatattgaattataccaaggcctaactctgaggctttggtataatctaaaattagcagctttgtaaatgtcagagatagttaccttactacgtattaaaaccgtagtatcttcacatcagttaggagcttgagaagtcatcatgttcatgtcctgtggctcagggaagacagcacataaggaccctaatggtattcggaattacagatttcaaagagtcctcagtaatctattctgaaatttaaccttcactgtgacaagtagttttttttcccttttcccttttcttttttcttttttttttgagacgtagtctcgctctgtcacccaggctggagtgcagtggctcaatctcagctcactgcaagctctgcctcccgggttcacgccattctcctgcctcagcctcccgagtagctgtgactacagggactcgccaccacacccagctaattttttgtatttttagtagagacagggttcactgtgttagccaggatggtctcgatctcctaacctcgtgatccacccgcctcggcctcccagagtgctgggattacacgcgtgagtcactgcgcccggccttttccttttctaatctcagttcctcctctgtttagaggttaaacttcctctggttctgtcattttgttcaagggaacatgtctgagaaatttatgccaagatcctacgttgttctcacactctttgcagaaagcaaaatttgtgtcataaagttgcaaacatcttagttaatgactctctggtggctgggtgcagtggctcacacatgtaatcccagcactttgggaggctgaggtgggaggattgcttgagcaggggagttcaaaagcagcctggacaacatagtgagactctgtctctacaaaaaataaaaataaggctgggcacagtggctcacacctgtaatcccagcactttgggaggccaaggcgggtgaatcatgaggtcaggagtttgaggcaagcctggccaacatggtgaaaccccgtctctacgaaaacaaaaaattagctgggtgtggcggcgggcacctgtaatcccagctactcgggaggttgaggcaagagaatcacttgaacctgggaggcagaggttacagtgagccgagatcacgccattgcactccagcccaaaagtcagtgcgagactctgtctaaaaataataataataataataataaaataaattagccaggcattgtggtcacagctacttgggaggctgaggtgggaagattgcttgagcacaggtggttgagagggcattgagtcatggttgcaccactgcactccaagctgtgtgacagagcaagaccctgtctccagggggaaaaaaaaatatctctgggctcctgaaatggcagtgtcataacatatcactgcattattttctttctctccccagcatgttcagctcttgacacaaatccaccttcttgccacctgcaaccccaatctcaatccggaggccagtagcaccaggatatgtcttgtaagtttccaaattgccgtaattctatagactagaatataaaattagcttggcaggttatttctcacagttattctctcaggtatttttgattgctgtggcttcctatgtttgctgagtgaacataagccactgattcacatgaaaggacaaagagtgtattcaattttttcttttcttttttgagacagggtcttgctctttcacccaggatggagtgcggtggaacaatttcagttcactgcaacccctgcctcccgggttcaagtgattctcctgcctcagcctcccaagtagctgggactacaggcgggcaccaccacgggtaattttttttgtatttttagtagagacagggttttgccatgttggccaggctggtctcgaattcctgacttcaagtgatctgcccacctctacctcccaaagtactgggattacagccatgagccactgcgcctggcctgtccttctgatatttttattgggtcctcctcctcatctttagattcaccctgacttcttaggtttttggtaccgctattcatttcatagatgttgaggctgggcatagtggctcacacctgtaattccagcactttgggaggctgaggtgataggatcacttgagcccagtggtcaagaacagcctgggcaacatagtaagacccggtctgtgttttttttgttttgttttgttttaatttaaataatgaagtaaatatacatgtagatgttgaattcattatccattcatgaagctcaatattagtgttttatgtgtagagctagttttgctcatgacgttttgaggtattttgagctttttttttttttttttttttttttgagacggagtctcgctctgtcgcccaggctggagtgcagtggcgggatctcggctcactgcaagctccgcctcccgggttcacgccattctcttgcctcagcctcccaagtagctgggactacaggcacccgccactatgcccggctaattttttgtatttttagtagagacggggtttcaccgttttagccgggatggtctcgatctcctgacctcgtgatccgcccacctcggcctcccaaagtgctgggattacaggcgtgagccaccgcgcccggcctattttgagattttaaatttgaaatttggccaggtatggtggctcatgcctgtagtcccagcactttggtaggtcaaggtgggaggattgcttgagcccaggagtttgagaccagcctgggcaacatagtaagaccccatccctaccaaaaaaataaaaaataaaaaaattagctggggatggtgccgagtgcctgtagtcccagcaacttgggagactgaggtaggaggatcacttgagcctgggacgttgagactgtagggagccgtgcttatatatcactccagcctgggtgacagagtgagaacctgtctcacaaaaacaaaaccatactttacctcataaaaattgcctcaaacttttggacaggtaatgataatactctcagcttcttcagtaagtcttctttggattttgaagagtacatttgctagtattctaaaacttccttggtgatcaacaggatgtcttcatctcttactgtattcagaggaggatgaggagtacttggttgtaggcattattctgagaccaaaagacaaaacaattttaaaagtaatggtcctggtcgggtgaggtgactcatccctgtaatcccagcactatgagaggccgaggcaggcggattgtgagcccaggagttcgagatcagcctggccaagatgggaaaacgctgtctctgcaaaaaatacaaaaatcagctaggtttggaggtgtatgcctatagtcccagcttctcaggaggcagtgggaggatggcttgagcctgggagggggagtttgcagtgagctgagatcatgccactgcagtccagcctgagcggcagagtgagaccatgtctcaaaataaattaattaattaaattaaagtaatagtccccattcttgagactcttaattctagctcgggagctagaccatgtattccttagtgagaaacagtttaaaaataaaacaagaatataatccctgaatatctgagaactcaggcataatcttaacagtagtttattgtgaaagactttatgattatttttacctgtttttatcctgtagtaggaaggtcagcttctcatttagattctgaaggctattggtattaattgtctggaattgtcttagatcttccttgtgtcgtgttttcccagaaagagctgggaacctttgctcaaagctccatcgcccttcaccatcagtacaaccccaagtttcagaccctgttccaaccctgtaacttgatgggagctatgcagctgattgaagacttcagcacacatgtcagcattgactgcagccctcataaaactgtcaagaagactg

SEQ ID NO: 15015 - DNA, 810 bp, Homo sapiens
gcgtgagggcctgcgctggagccggcttgacagggtctgagggggagtggagaactgggcgaggaggttcccgtggtcggcttacccgctggccgcctcctgacaagcgggagggatccgcggtggacccagggaagcggaggagcctggcggccaccccctcttcctcacttccctgtactctcatcgctctcggcctccgacacgaaaaggaagcaaatgagctgatggaagatctgtttgaaactttccaagatgagatgggattctccaacatggaagatgatggcccagaagaggaggagcgtgtggctgagcctcaagctaactttaacacccctcaagctctacggtttgaggaactactggccaacctactaaatgaacaacatcagatagcgaaggaactatttgaacagctgaagatgaagaaaccttcagccaaacagcagaaggaggtagagaaggttaaaccccagtgtaaggaagttcatcagaccctgattctggacccagcacaaaggaagagactccagcagcagatgcagcagcatgttcagctcttgacacaaatccaccttcttgccacctgcaaccccaatctcaatccggaggccagtagcaccaggatatgtcttaaagagctgggaacctttgctcaaagctccatcgcccttcaccatcagtacaaccccaagtttcagaccctgttccaaccctgtaacttgatgggagctatgcagctgattgaagacttcagcacacatgtcagcattgactgcagccctcataaaactgtcaagaagactg

SEQ ID NO: 15016 - DNA, 6739 bp, Homo sapiens
gaggaggagcgtgtggctgagcctcaagctaactttaacacccctcaagctctacggtaggctagttgaagaccttgagatttggaatagaggaagagtttatttctgaaaaggttttcagaagttgcagttaacaatttttcatccccagccagcttctgttactgatgtaaggatgcagagtcctgtcaggagttaggtgtcaagtgaagtctccttgttatggggcagtgcagctgtaggccaagctgtatctgtttgggaagggagaaaaaacagtagctggcatccatatccacttctccgggtgagtggtgctggagaggtatgtaggactcaatgtggccagccacacaaactaccctatattgtaatatccagtctgtcccttttgttctttttatgtgccattaatatctgctaaatgtgactgaaaatttgttagtcacctaggcattagtggagcaaaccctgaagcacctgcagtaaggagtctgaaacatacgtgctgacctttttgcctaaagttggcacttgtgttacagcatccagaaagtagaggctttaattttttcctcattttgtggtggatttgcatctgcactttattctgttgtagcagcatataatcattaggtcgatggcgagaggtcaggatgcagtttgtgccataagtggaacaaagcaaagagaatagtccctgtaattagtcctgtgtttgaacttaacagcactactaagcagagagcttgggttccatctgaaagctagacctttagggattttccaatttagtgaaaaaagataagataggccaaccaatgtcttaaaaactagaactactagtcattctccattacaacaaatatcacaatacaactacatcaaaaatctcaagattgctaagtcagtatttgacccattattttaatttatagttcatagaacaaaattctggtatagcagaatggaaccattcatcctgggaacgtataataggatctgattaataaatattttggttttgctgatcaactctttataacttcttaaaatttggaaaatatagaactaatttaaaattcctgttagaatccagttaccttctggtattcaatggaatatagtcatatatcatctcatggtcataccctctgtgaaatctatcattaaacgattcatcattgtgtaaacatcgtagaatgtacttacataaacctaaatggtttagcctactgcatacctattgctcccaggctacaaaacctgtacagtgtgttactgtactgtactgaatactgtaggcagttgtaacacaatggtaagtacatatgtatgtaaacatagaaaaggtacagtaatcttatggagccacctctgactatgtggttcgttattgactgaaacattctgtggcgcatgactgtacttgggcagcttctgcttctctttcgattgcaaatacaaacctgtttttgttttaatctttgactaaataaaaatccctctgtaagtccatagagagtaagcacatcttaaaacacaataaggaagagagaggagaaaaagacagtcaaaacaaaaactctggggcttcccttatcaattacctaaataatccttgttaaaactaagtgcaggctatgtttccattttctacttttttatgcttcttctcttctgttccttcagtggtggtagcgcggatgttcaaattttcagttctcagtaaagattgtatagacagtcccacggtcttcaggtttttactctgtgctacccaaacctacagtaaatactataaaagaaaacttattcaaacgtaatctttatctgcaaaaactattgaaaaacgttaccatttaactattgctgtaatatagggggttccttgaaatatgataacctgcttgttatagctacttcagcagatcttatcctgttgcatagggtatcagcatatgcttaatcatttaggtatattattctccctttatttctttctatgtaaacatagaaaaggtatagtaatcatacatagaactgacatgctaggtattggaatttttgcttcagccctgcaaacaatctttcaggagggtatggatgggaagttagggttaggaaccttggaagaggaatttaaagggctaaaagaagatagccttcatggataatattttaactaacttctccgttctgttcatttgaactaccatgtacttcagttattttggtatatccttttcctgcttcatgctagaaagtctttgacttgttaagaaagcagggcagtgcagcctgagtagataggataatgggacaagctggacctgggatgggagtaacatcccagggagtaacaagtaatgagagaagaaatgagaatgatgagttcccaccagctccttggctgctttcttacccatatatttctctgtccctagttttttgtttaattttttcttcatttgtatattatttggaagaggaattgtagaggaatgggatggggtgtaatacagaatcatttgatgcatgctaactactttgggaaaagatttgtgtaaggctgggagtttgactgttggctaaagtgaaaaggggggattagtagggaatgaaaattgttcaggctctttgctcatcattgcaaagaattggatgtgttgtggacctaggaaaacactcaaattcagtcatccccgtttgggataggtttgaggaactactggccaacctactaaatgaacaacatcagatagcgaaggaactatttgaacagctgaagatgaagaaaccttcagccaaacagcagaaggaggtagagaaggttaaaccccagtgtaaggaagttcatcagaccctgattctggacccagcacaaaggaagagactccagcagcagatgcagcaggtaacactttccttggtcatattaatattgaattataccaaggcctaactctgaggctttggtataatctaaaattagcagctttgtaaatgtcagagatagttaccttactacgtattaaaaccgtagtatcttcacatcagttaggagcttgagaagtcatcatgttcatgtcctgtggctcagggaagacagcacataaggaccctaatggtattcggaattacagatttcaaagagtcctcagtaatctattctgaaatttaaccttcactgtgacaagtagttttttttcccttttcccttttcttttttcttttttttttgagacgtagtctcgctctgtcacccaggctggagtgcagtggctcaatctcagctcactgcaagctctgcctcccgggttcacgccattctcctgcctcagcctcccgagtagctgtgactacagggactcgccaccacacccagctaattttttgtatttttagtagagacagggttcactgtgttagccaggatggtctcgatctcctaacctcgtgatccacccgcctcggcctcccagagtgctgggattacacgcgtgagtcactgcgcccggccttttccttttctaatctcagttcctcctctgtttagaggttaaacttcctctggttctgtcattttgttcaagggaacatgtctgagaaatttatgccaagatcctacgttgttctcacactctttgcagaaagcaaaatttgtgtcataaagttgcaaacatcttagttaatgactctctggtggctgggtgcagtggctcacacatgtaatcccagcactttgggaggctgaggtgggaggattgcttgagcaggggagttcaaaagcagcctggacaacatagtgagactctgtctctacaaaaaataaaaataaggctgggcacagtggctcacacctgtaatcccagcactttgggaggccaaggcgggtgaatcatgaggtcaggagtttgaggcaagcctggccaacatggtgaaaccccgtctctacgaaaacaaaaaattagctgggtgtggcggcgggcacctgtaatcccagctactcgggaggttgaggcaagagaatcacttgaacctgggaggcagaggttacagtgagccgagatcacgccattgcactccagcccaaaagtcagtgcgagactctgtctaaaaataataataataataataataaaataaattagccaggcattgtggtcacagctacttgggaggctgaggtgggaagattgcttgagcacaggtggttgagagggcattgagtcatggttgcaccactgcactccaagctgtgtgacagagcaagaccctgtctccagggggaaaaaaaaatatctctgggctcctgaaatggcagtgtcataacatatcactgcattattttctttctctccccagcatgttcagctcttgacacaaatccaccttcttgccacctgcaaccccaatctcaatccggaggccagtagcaccaggatatgtcttgtaagtttccaaattgccgtaattctatagactagaatataaaattagcttggcaggttatttctcacagttattctctcaggtatttttgattgctgtggcttcctatgtttgctgagtgaacataagccactgattcacatgaaaggacaaagagtgtattcaattttttcttttcttttttgagacagggtcttgctctttcacccaggatggagtgcggtggaacaatttcagttcactgcaacccctgcctcccgggttcaagtgattctcctgcctcagcctcccaagtagctgggactacaggcgggcaccaccacgggtaattttttttgtatttttagtagagacagggttttgccatgttggccaggctggtctcgaattcctgacttcaagtgatctgcccacctctacctcccaaagtactgggattacagccatgagccactgcgcctggcctgtccttctgatatttttattgggtcctcctcctcatctttagattcaccctgacttcttaggtttttggtaccgctattcatttcatagatgttgaggctgggcatagtggctcacacctgtaattccagcactttgggaggctgaggtgataggatcacttgagcccagtggtcaagaacagcctgggcaacatagtaagacccggtctgtgttttttttgttttgttttgttttaatttaaataatgaagtaaatatacatgtagatgttgaattcattatccattcatgaagctcaatattagtgttttatgtgtagagctagttttgctcatgacgttttgaggtattttgagctttttttttttttttttttttttttgagacggagtctcgctctgtcgcccaggctggagtgcagtggcgggatctcggctcactgcaagctccgcctcccgggttcacgccattctcttgcctcagcctcccaagtagctgggactacaggcacccgccactatgcccggctaattttttgtatttttagtagagacggggtttcaccgttttagccgggatggtctcgatctcctgacctcgtgatccgcccacctcggcctcccaaagtgctgggattacaggcgtgagccaccgcgcccggcctattttgagattttaaatttgaaatttggccaggtatggtggctcatgcctgtagtcccagcactttggtaggtcaaggtgggaggattgcttgagcccaggagtttgagaccagcctgggcaacatagtaagaccccatccctaccaaaaaaataaaaaataaaaaaattagctggggatggtgccgagtgcctgtagtcccagcaacttgggagactgaggtaggaggatcacttgagcctgggacgttgagactgtagggagccgtgcttatatatcactccagcctgggtgacagagtgagaacctgtctcacaaaaacaaaaccatactttacctcataaaaattgcctcaaacttttggacaggtaatgataatactctcagcttcttcagtaagtcttctttggattttgaagagtacatttgctagtattctaaaacttccttggtgatcaacaggatgtcttcatctcttactgtattcagaggaggatgaggagtacttggttgtaggcattattctgagaccaaaagacaaaacaattttaaaagtaatggtcctggtcgggtgaggtgactcatccctgtaatcccagcactatgagaggccgaggcaggcggattgtgagcccaggagttcgagatcagcctggccaagatgggaaaacgctgtctctgcaaaaaatacaaaaatcagctaggtttggaggtgtatgcctatagtcccagcttctcaggaggcagtgggaggatggcttgagcctgggagggggagtttgcagtgagctgagatcatgccactgcagtccagcctgagcggcagagtgagaccatgtctcaaaataaattaattaattaaattaaagtaatagtccccattcttgagactcttaattctagctcgggagctagaccatgtattccttagtgagaaacagtttaaaaataaaacaagaatataatccctgaatatctgagaactcaggcataatcttaacagtagtttattgtgaaagactttatgattatttttacctgtttttatcctgtagtaggaaggtcagcttctcatttagattctgaaggctattggtattaattgtctggaattgtcttagatcttccttgtgtcgtgttttcccagaaagag

SEQ ID NO: 15017 - DNA, 374 bp, Homo sapiens
gaggaggagcgtgtggctgagcctcaagctaactttaacacccctcaagctctacggtttgaggaactactggccaacctactaaatgaacaacatcagatagcgaaggaactatttgaacagctgaagatgaagaaaccttcagccaaacagcagaaggaggtagagaaggttaaaccccagtgtaaggaagttcatcagaccctgattctggacccagcacaaaggaagagactccagcagcagatgcagcagcatgttcagctcttgacacaaatccaccttcttgccacctgcaaccccaatctcaatccggaggccagtagcaccaggatatgtcttatcttccttgtgtcgtgttttcccagaaagag

SEQ ID NO: 15018 - DNA, 16158 bp, Homo sapiens
gggagggagggggaggagagaagaggaggtggagaaggcttgggctcgcgccgctgaaggtacgcgtgagggcctgcgctggagccggcttgacagggtctgagggggagtggagaactgggcgaggaggttcccgtgggtgagcgcgtacgggatggctggctcgcaggacggccgaaggtggtggttggtgggagcagccagcgacgagcccgtagacactcgtacgcgtgcgggctgacgtgcgcgctacatggccggagtcgggcgaagcgggggaccgtggggaagaacgcgaggagggaggagtgggaggttgggggtgtcgctaggcgcccttagctccctccctctggaggagctgccgcggccactctgctgccgccgctgccgccgccattttgggttcgctttgcgaggggaaacgatcccagtgtcggttgcgggatccgcctcctctcagtttgcccctttagccctccacctttcccttctcctctctcgcatttccgccagtcggcttacccgctggccgcctcctgacaagcgggagggatccgcggtggacccagggaagcggaggagcctggcggccaccccctcttcctcacttccctgtactctcatcgctctcggcctccgacacggtgagtagaacgatttgggccggcattcgggcctaagcactctctcagcgattgaatcctgggctttctgggagccactgtcatctcccggacctggacctctgggagagcagtggtgaagatgggggaggggagagcagggagggggatcctgagcctaccgggaagtccctccaggcggggtgaaggggtgtccctgacaggcagactcccggagggggctgggaagtaagcgagtggaggcggagtcggctgtgcccctgacaggttagtttgtgtttgtaggcatgatcggagcctcccccatagtccagtttgtgtgtgtttaattaagggataagagtggtcgaggacacgatcttgagaggggattttacctgtgtgacaaggtctgtggtgtccctgccgcgttgaacggtatgtgggaacgacaggatgatctcagtgttgtacgtttaataaatgtcactggttagtttgtacatggaaagagatgtttttggtctagcagacagatggtctgttggtgtgtagcggctgtgttggtgtgtgtatgtgaggatggcaagtgtttccgtaagagtttgcctttatttgtgtaagtgtaatggagttccccttataagttagcttatttcttgaataaatgttgggaggttccttgcaggttgatatgtgtgtgtattttagggattgggagcccctagttacttgttgggaaagagcggcaatggtagtgttctgtacagcatgtgtctgtgaggtcagggaggggagaaacttggcatagccagttgtggtcttaagaatagtttgtgcctttggttagagtgagttgtgtaaatgtgaagggccaaaatatctttaacagaatcattgctacaaagctgtaaagaatgggtggccttatttgttgtcgcgggtttatagtaatagtttacaatacaataagaaagctctttcagtttctttgtgatactgaatctctgtgaaaatggtaggatgctttcttccattttacaaaataggaaatttaggcataaggagagaacttctccaaggccgcatgttaaattggtgacaaagttggaactgtaactcccatattttcactactactgcagcagtatattcagcataccatggtgcctcaggaagtctttgtcggcaaatctgagtatgctggaaagataggagcacataagactggttggcttgtatttgggggagaccgattgtgtcagatatgtatgtggaacgtagctgtccttgccgagtctgacctgtatgaaatgcatatccatggctatattattttggatttatggaggaagcagagcatttctgacacttaaggttgtatgcgtgagggagaaggctttcacagcttaacttgtaccagagcagctgcatgggtgctgacagcttaacttgaaatctgtgggaggaaggatcctttttcactcattcaacaaatataaccattcaatgaatggtccatgccttgaggtgaggatcatcaaggtgtctctgtaaatagcctggatgcaatctgaggggagttgttttgacggtggtaggtattaagttgagggaggcagtgtggaattaaaaccagagaactgtttttgggtactggtaattgttaatatatgtgcctgtggatgttggaacttcttggctgggctgaaggaatcctttgaaagactgatttcggcagggcgcggtggctcacacctgtaatcccagcactttgggaggccgaggtgggcggatcacgaggtcaggagatcgaatcacgaggtcaggagatcgagactatcctggctaacaggatgaaaccccgtctctactaaaaatacaaaaaattagccgggcgtggtggcgggcgcctgtagtcccagctactcggggaggctgaggcaggagaatggcgtgaacccgggaggcagagcttgcagtgagctgagattgcgccactgcactccagcctgggccacagaggagactccatctccaaaaaaaaaaaaaaaaaaaaaaaaaagactgatttcatgtagtaaggatcccgtctatgaactctatgaatatgaggtaagaatgcatgaactaagccaacttagctgtattcttctggaaaatgggatgtttcttgataggctagattagtggttcttaaaagttttttggggtcacttatccttcagagaatcggatgaaagacactgggccctcaagttagaagatgagcataagcgcaatcacatgatttatatatatgattttaggaacttaaactgtaatgaaatagagccaatttatatttagatctcatttgaaaacctttcattttcattgttcgggtgtgtggatgttagtatgagtttaaggtgaaggagtctatgttagtatttgaacatgttgacaggatccatatttttaatttattctttttatcgtctgcaaacatttctgcagtattagtaaatgactctgtatttggtaaaaagggaagctaatgtcgcacaagtatctatggctttgttctttgtcagtatctttttgttctcaaactctgagaagcgtctttttttcagttttggattgggcctgaggtgatttgaagctcctgtcttggagtttaacttagttataacaaacactgagttaatcctatgcaggagacacaaagataattaatatatggtctctgtgcttgaagagacgctaattttctgtggttgaagagatgctgtgaattgtgtgatagtggcagctctcaaaaggacaaggaagagggaaacatattcctagaagctgaaattttattacccaattgcaaagactttttgtcactacttattcttaggaataaccataaagtgtttattttattctgtatggaactttgtactttaaaaaaatatgttttgtatcatctggtgtttttgtataaaggaactgttggtttgaaaagaaggtaaacatcatttatattccttaccttgttttgggatgtatctctacagtgagtttatgtaaaaaggtcttaatgtcatttttgggtatacatacatgtagaaagccctcctgatataaaatccagtagctatttgacagactacccattaatttattactggaacttaaaaataattactgtacttttaaaagaacaagaaattggtcaggtggggtggctcacgcctgtaatcctagcactttgggaggacgaggcggatggattgtcagagctcagaagatcgagaccagcctgggcaacacggtgaaaccccgtctctactaaaatacaaaaaattagctgcatgtgttggagtgcacctgtagtcccagctactcgggaagctgaggcacgagaattgcttgaaccaagaattgcttgaactgggagggggaagttgcagtgagctgaaatcatgccactgcactctagcctcggcatcagagcaacactctgtctcacaaaaaaaaaaaaaaaagcaagaaatgtaaaaaggtgttttaataggacagattataggattcagtgagataatggagaagttttaggaaaaattgtctgatagtcctttctttctattgacatggcccctgtataagaatgctatgtaaatttgtgaaaagtttaatattttctctaatttttaacgggtagtaggttcatggtgttatttttctcaaaacgtacatgtgatatgtgtgtgtagtgtgcatatatgtgcatgtatgtgtatacaatttctttatttttttaattgagattaggtctcgctatggttttttgtttttgtttttgtttttgagagagagtttcgctctcctcgcccaggctggagtacaatggcacaatcttgcctcactgcaacctctgcctcccaggttcaagtgattctctttcctcagcttcccaaatagctgggattacaggcgcgtgccaacacgccctgctgatttttgtatttttagttgagacagggtttccccacgttggccaggctggtcacgaactcctaacctcaagttctccagccgtctcggccttccaaagtgctgggattataggagtgagccactgcacctggcccaggtcttgctatgtagatcaatctggtcttgaactcctggcctcaagccatcctcctgtcttggcctcccagtttgctgggattacagatgtgagccagcatgcccagctctttttacctgcttaccaaatccaagattttctccaaaatgaactggaatagccttcttactgtgttaattttgccttggtggggaagcctaagtcttggaactaaattggggtggttatgacagttctctttttaaagctgatcagtatttcagtatttcacttgttgttgttttttttgttttgttttgttttttttgagatggagtcttgctctgtagcccagtttggaatgcagtggcaggattttgactcactgtagcctctgccacccggattcaagtgattctcctgcctcaatgtcctgagcagctgggtttacaggcacgcaccactacacctggctaatttttgtattgttagtagagacagggtttcaccatgttagccagtagccaagctgttctcatactcctgacctcaagtgatccacctgcctcagcctcccaaagtgctgggattacaggtgtgagccaccacgcctagccaaacccatctctttcattaaaccacctcattttggttcagaaacaagactgccatgtatgtatttaatgcttattatgtgccaagcactattccaggtactaagatacagtgatggacaaaacaagatcccttctcctctatctcaggacttattaatttgggcattttcattttccaatataggatcttttagtactggtataggattcctgaaggaattcctgaaatataattatttttctgctagagcaaatcaattttgttttttgttttttttttgagatggagtttcgctcttgtcgcccaggctggagtgcaatggcgcaatctcggctcactgcaacctccgactcccgggttcaagcgattctcctgcctcagcctcccaagtagctgggattacaggcattagccaccacgctaggctaatttttgtatttttagtagagacagggtttcaccaggttggccaggctggtctcgaactcctgacctcaggtgatcctccaggctcagcctcccaaagtgctaggattacaggcaggagccaccacgcccagaagagcaaaattcttctgttgacaaaaatttctttcctctgaggaagagacactgtgtgcctgtgttttatccaggaattccattggatagtttgtcctttgggatgtcagtggattaaatcctccattaagaatcaaagtacttggctgggtgcagtggctcatgcctgtaatccctgcactttgggaggctgaggcaggtggatcacctgaggtcaggagttggagaccaacctggccaacatgatgaaaccccatctctactaaaaatacaaaaaattatccaggtgttgtggcaggtgcctgtaatcccagctactctcgaaaaaacagaaacaaaaactctgacatgtagagtatgtagatgtagagaaaaaagtaaaatgattgttgaaaaaaatgtctattttttatcttctaaatagctttgtgtgtcagagatcagaacgctcattttacatgatatcaagaaccagaatgctagatagctagaatggttgttaacttcctagataaccattgtagaggaacacataaggtaaaacaaatgaataaaaattaaaaaaaaatgagatagccaaagatttgaagctctttacccattaacatgataatcatttcgactttgaatatttgtagaacaagagtcagaactcagaacaaagatctctgaggaaataaaaaaaaatcaagctgcctcctaatttctcatttagtctgtcattgggcattgtcaaactgtcaaactatatttagagattctggttttcatctggagacttagtgagttgtgtaatatcttgaatacacatataagatcttgccaggtggggtggctcatgtctgtaatcccagcactttgggaggatgaggtgggaggatcgctggagcccaggagttcaagaccagcctgggcaacatagcaagtccctggctctatttaaaaaaaaaaaaaaaaaaaaatcctcaatgtagaactttaaatttatccttacgtgttacatccagttgatttgagaaaatatgattctgaattttccatcaattggattggcagtccctttcagctttacagctttacatcatctacagatttgttaagtatgttctcttggtcttctaattcactgatggagtttttgaataggtcgggtccaaagatagagtcctatgaaacactgttggaaacttgtctctgtctgtctcttttttttttggagacagtgtcttgctctgtcgttcaggctggaatgcagtgggacggtctcagctcactacagcctctgcttcttggactcaaagagattctctcacctcagcctctcaagtatatgggactatatgcatgtgcgaccaagcccagataaatttttttttagagatatgttgacattttgcccaggttgggagacttgtctcttgattccattcagtattgtgtgggtttggataggccatctaattataaaatcattgggctggtcatggtggctcatgcctgtaatcccagcactttgggaggctgaggtgggcggatcacctgaggtcaggagtttgagaccagcctgaccaatatggagaaaccccatctctactaaaaacacaaaattagctgggcgtggtggtgcatgcctgtaatcccagctacttgggaggctgaggcaggagaatagcttgaacctgggaggcggaggttgcagtgagccaaaatcgtgtcatcgcactccagcctgggcaacaagagcgaaactccgtctcaaaaaaaaaaaaaaatcatctagctcacattttctccttgtcttcttcctattagaatttaagttcaatgagattagaactctctctctctctcattctctcatatatcccaagcatctaaaacagggattgaaacatagtaagtactcaataaatgtttttgaataaatgaatgaaggatagctgggcgtggtggctcatgcctgtaaccccagcactttgggaagccaaggtgggtggatcactggagctcaggagttcaagaccagcttgggcaacatggggaaaacccatctctacaaaatatggaagaattagccgggcatgacagcacactcctgttgccccagctacttggagggctgaagtgggaggatcgcttgagcctgggaagcagagattgcagtgagccgagatcaagccactgccctccagcccgggtgacagagtgagaccctgtctcaggaataaggatagatatgaagaattcgtcagatgccttgttgaaaacatcatacattgtctacatggaattcctccatattgtaaaatgaatctaatttataccaacaacgtttggcttttttgcagaaaaggaagcaaatgagctgatggaagatctgtttgaaactgtgagtaatgatcctcaagtgagaacatgggattgtaagttggttctccaacaaaatgtgtcctttgatctctgtgatgctccttctagaagagggactgaaccaattctccttttagtctacctgggaaagaatataatgacaaaagaaatttgctaactgctagactcttgattatccacatgtaggttattcttactaaaattttccttgaagctttttttttttttttttgaggcaaagtcttgctctgtcacccaggctctggagaatacagtggtgaaatctcagctcacagcagcctcgacctccagggctcaaaacaattctctcatctaagcctcctgagtagctgggactacaggcacacacctacaggcccggctaattattttatttttttgtagagacagggtcttgccatgttctggaactcataggctcaagtaatcttcctgcctcaacctcccaaagtgctggaattacaggtgtgagccagcacatcttgccccttgaaaacttttgatggcttcccctactgtcatttggtgtgtccttaaagattgccaactagttttaaagtattttgcacacaaataattaccttttccataaatttgtctaaaaagatatttctgtttaagaaattgatcattttgagttatcctagctctgtgcttactgatacaagttgactggttgagcaacttctttcctggcataatagtcattccatatgtgggtttgtaggagtcctgaagtgagaaaggttctgatgtaggctctttctgggtgccagcattattaaagtattgtttatagttttcacttttccttcccaacactggagcaacattcaaaagcccattccccaggaaaaccctccctttcctttgcccacagttccaagatgagatgggattctccaacatggaagatgatggcccagaagaggaggagcgtgtggctgagcctcaagctaactttaacacccctcaagctctacggtaggctagttgaagaccttgagatttggaatagaggaagagtttatttctgaaaaggttttcagaagttgcagttaacaatttttcatccccagccagcttctgttactgatgtaaggatgcagagtcctgtcaggagttaggtgtcaagtgaagtctccttgttatggggcagtgcagctgtaggccaagctgtatctgtttgggaagggagaaaaaacagtagctggcatccatatccacttctccgggtgagtggtgctggagaggtatgtaggactcaatgtggccagccacacaaactaccctatattgtaatatccagtctgtcccttttgttctttttatgtgccattaatatctgctaaatgtgactgaaaatttgttagtcacctaggcattagtggagcaaaccctgaagcacctgcagtaaggagtctgaaacatacgtgctgacctttttgcctaaagttggcacttgtgttacagcatccagaaagtagaggctttaattttttcctcattttgtggtggatttgcatctgcactttattctgttgtagcagcatataatcattaggtcgatggcgagaggtcaggatgcagtttgtgccataagtggaacaaagcaaagagaatagtccctgtaattagtcctgtgtttgaacttaacagcactactaagcagagagcttgggttccatctgaaagctagacctttagggattttccaatttagtgaaaaaagataagataggccaaccaatgtcttaaaaactagaactactagtcattctccattacaacaaatatcacaatacaactacatcaaaaatctcaagattgctaagtcagtatttgacccattattttaatttatagttcatagaacaaaattctggtatagcagaatggaaccattcatcctgggaacgtataataggatctgattaataaatattttggttttgctgatcaactctttataacttcttaaaatttggaaaatatagaactaatttaaaattcctgttagaatccagttaccttctggtattcaatggaatatagtcatatatcatctcatggtcataccctctgtgaaatctatcattaaacgattcatcattgtgtaaacatcgtagaatgtacttacataaacctaaatggtttagcctactgcatacctattgctcccaggctacaaaacctgtacagtgtgttactgtactgtactgaatactgtaggcagttgtaacacaatggtaagtacatatgtatgtaaacatagaaaaggtacagtaatcttatggagccacctctgactatgtggttcgttattgactgaaacattctgtggcgcatgactgtacttgggcagcttctgcttctctttcgattgcaaatacaaacctgtttttgttttaatctttgactaaataaaaatccctctgtaagtccatagagagtaagcacatcttaaaacacaataaggaagagagaggagaaaaagacagtcaaaacaaaaactctggggcttcccttatcaattacctaaataatccttgttaaaactaagtgcaggctatgtttccattttctacttttttatgcttcttctcttctgttccttcagtggtggtagcgcggatgttcaaattttcagttctcagtaaagattgtatagacagtcccacggtcttcaggtttttactctgtgctacccaaacctacagtaaatactataaaagaaaacttattcaaacgtaatctttatctgcaaaaactattgaaaaacgttaccatttaactattgctgtaatatagggggttccttgaaatatgataacctgcttgttatagctacttcagcagatcttatcctgttgcatagggtatcagcatatgcttaatcatttaggtatattattctccctttatttctttctatgtaaacatagaaaaggtatagtaatcatacatagaactgacatgctaggtattggaatttttgcttcagccctgcaaacaatctttcaggagggtatggatgggaagttagggttaggaaccttggaagaggaatttaaagggctaaaagaagatagccttcatggataatattttaactaacttctccgttctgttcatttgaactaccatgtacttcagttattttggtatatccttttcctgcttcatgctagaaagtctttgacttgttaagaaagcagggcagtgcagcctgagtagataggataatgggacaagctggacctgggatgggagtaacatcccagggagtaacaagtaatgagagaagaaatgagaatgatgagttcccaccagctccttggctgctttcttacccatatatttctctgtccctagttttttgtttaattttttcttcatttgtatattatttggaagaggaattgtagaggaatgggatggggtgtaatacagaatcatttgatgcatgctaactactttgggaaaagatttgtgtaaggctgggagtttgactgttggctaaagtgaaaaggggggattagtagggaatgaaaattgttcaggctctttgctcatcattgcaaagaattggatgtgttgtggacctaggaaaacactcaaattcagtcatccccgtttgggataggtttgaggaactactggccaacctactaaatgaacaacatcagatagcgaaggaactatttgaacagctgaagatgaagaaaccttcagccaaacagcagaaggaggtagagaaggttaaaccccagtgtaaggaagttcatcagaccctgattctggacccagcacaaaggaagagactccagcagcagatgcagcaggtaacactttccttggtcatattaatattgaattataccaaggcctaactctgaggctttggtataatctaaaattagcagctttgtaaatgtcagagatagttaccttactacgtattaaaaccgtagtatcttcacatcagttaggagcttgagaagtcatcatgttcatgtcctgtggctcagggaagacagcacataaggaccctaatggtattcggaattacagatttcaaagagtcctcagtaatctattctgaaatttaaccttcactgtgacaagtagttttttttcccttttcccttttcttttttcttttttttttgagacgtagtctcgctctgtcacccaggctggagtgcagtggctcaatctcagctcactgcaagctctgcctcccgggttcacgccattctcctgcctcagcctcccgagtagctgtgactacagggactcgccaccacacccagctaattttttgtatttttagtagagacagggttcactgtgttagccaggatggtctcgatctcctaacctcgtgatccacccgcctcggcctcccagagtgctgggattacacgcgtgagtcactgcgcccggccttttccttttctaatctcagttcctcctctgtttagaggttaaacttcctctggttctgtcattttgttcaagggaacatgtctgagaaatttatgccaagatcctacgttgttctcacactctttgcagaaagcaaaatttgtgtcataaagttgcaaacatcttagttaatgactctctggtggctgggtgcagtggctcacacatgtaatcccagcactttgggaggctgaggtgggaggattgcttgagcaggggagttcaaaagcagcctggacaacatagtgagactctgtctctacaaaaaataaaaataaggctgggcacagtggctcacacctgtaatcccagcactttgggaggccaaggcgggtgaatcatgaggtcaggagtttgaggcaagcctggccaacatggtgaaaccccgtctctacgaaaacaaaaaattagctgggtgtggcggcgggcacctgtaatcccagctactcgggaggttgaggcaagagaatcacttgaacctgggaggcagaggttacagtgagccgagatcacgccattgcactccagcccaaaagtcagtgcgagactctgtctaaaaataataataataataataataaaataaattagccaggcattgtggtcacagctacttgggaggctgaggtgggaagattgcttgagcacaggtggttgagagggcattgagtcatggttgcaccactgcactccaagctgtgtgacagagcaagaccctgtctccagggggaaaaaaaaatatctctgggctcctgaaatggcagtgtcataacatatcactgcattattttctttctctccccagcatgttcagctcttgacacaaatccaccttcttgccacctgcaaccccaatctcaatccggaggccagtagcaccaggatatgtcttgtaagtttccaaattgccgtaattctatagactagaatataaaattagcttggcaggttatttctcacagttattctctcaggtatttttgattgctgtggcttcctatgtttgctgagtgaacataagccactgattcacatgaaaggacaaagagtgtattcaattttttcttttcttttttgagacagggtcttgctctttcacccaggatggagtgcggtggaacaatttcagttcactgcaacccctgcctcccgggttcaagtgattctcctgcctcagcctcccaagtagctgggactacaggcgggcaccaccacgggtaattttttttgtatttttagtagagacagggttttgccatgttggccaggctggtctcgaattcctgacttcaagtgatctgcccacctctacctcccaaagtactgggattacagccatgagccactgcgcctggcctgtccttctgatatttttattgggtcctcctcctcatctttagattcaccctgacttcttaggtttttggtaccgctattcatttcatagatgttgaggctgggcatagtggctcacacctgtaattccagcactttgggaggctgaggtgataggatcacttgagcccagtggtcaagaacagcctgggcaacatagtaagacccggtctgtgttttttttgttttgttttgttttaatttaaataatgaagtaaatatacatgtagatgttgaattcattatccattcatgaagctcaatattagtgttttatgtgtagagctagttttgctcatgacgttttgaggtattttgagctttttttttttttttttttttttttgagacggagtctcgctctgtcgcccaggctggagtgcagtggcgggatctcggctcactgcaagctccgcctcccgggttcacgccattctcttgcctcagcctcccaagtagctgggactacaggcacccgccactatgcccggctaattttttgtatttttagtagagacggggtttcaccgttttagccgggatggtctcgatctcctgacctcgtgatccgcccacctcggcctcccaaagtgctgggattacaggcgtgagccaccgcgcccggcctattttgagattttaaatttgaaatttggccaggtatggtggctcatgcctgtagtcccagcactttggtaggtcaaggtgggaggattgcttgagcccaggagtttgagaccagcctgggcaacatagtaagaccccatccctaccaaaaaaataaaaaataaaaaaattagctggggatggtgccgagtgcctgtagtcccagcaacttgggagactgaggtaggaggatcacttgagcctgggacgttgagactgtagggagccgtgcttatatatcactccagcctgggtgacagagtgagaacctgtctcacaaaaacaaaaccatactttacctcataaaaattgcctcaaacttttggacaggtaatgataatactctcagcttcttcagtaagtcttctttggattttgaagagtacatttgctagtattctaaaacttccttggtgatcaacaggatgtcttcatctcttactgtattcagaggaggatgaggagtacttggttgtaggcattattctgagaccaaaagacaaaacaattttaaaagtaatggtcctggtcgggtgaggtgactcatccctgtaatcccagcactatgagaggccgaggcaggcggattgtgagcccaggagttcgagatcagcctggccaagatgggaaaacgctgtctctgcaaaaaatacaaaaatcagctaggtttggaggtgtatgcctatagtcccagcttctcaggaggcagtgggaggatggcttgagcctgggagggggagtttgcagtgagctgagatcatgccactgcagtccagcctgagcggcagagtgagaccatgtctcaaaataaattaattaattaaattaaagtaatagtccccattcttgagactcttaattctagctcgggagctagaccatgtattccttagtgagaaacagtttaaaaataaaacaagaatataatccctgaatatctgagaactcaggcataatcttaacagtagtttattgtgaaagactttatgattatttttacctgtttttatcctgtagtaggaaggtcagcttctcatttagattctgaaggctattggtattaattgtctggaattgtcttagatcttccttgtgtcgtgttttcccagaaagagctgggaacctttgctcaaagctccatcgcccttcaccatcagtacaaccccaagtttcagaccctgttccaaccctgtaacttgatgggagctatgcagctgattgaagacttcagcacacatgtcagcattgactgcagccctcataaaactgtcaagaagactg

SEQ ID NO: 15019 - DNA, 927 bp, Homo sapiens
gggagggagggggaggagagaagaggaggtggagaaggcttgggctcgcgccgctgaagtcggcttacccgctggccgcctcctgacaagcgggagggatccgcggtggacccagggaagcggaggagcctggcggccaccccctcttcctcacttccctgtactctcatcgctctcggcctccgacacgaaaaggaagcaaatgagctgatggaagatctgtttgaaactttccaagatgagatgggattctccaacatggaagatgatggcccagaagaggaggagcgtgtggctgagcctcaagctaactttaacacccctcaagctctacggtttgaggaactactggccaacctactaaatgaacaacatcagatagcgaaggaactatttgaacagctgaagatgaagaaaccttcagccaaacagcagaaggaggtagagaaggttaaaccccagtgtaaggaagttcatcagaccctgattctggacccagcacaaaggaagagactccagcagcagatgcagcagcatgttcagctcttgacacaaatccaccttcttgccacctgcaaccccaatctcaatccggaggccagtagcaccaggatatgtcttggtcttgctctttcacccaggatggagtgcggtggaacaatttcagttcactgcaacccctgcctcccgggttcaagtgattctcctgcctcagcctcccaagtagctgggactacaggcgggcaccaccacggaaagagctgggaacctttgctcaaagctccatcgcccttcaccatcagtacaaccccaagtttcagaccctgttccaaccctgtaacttgatgggagctatgcagctgattgaagacttcagcacacatgtcagcattgactgcagccctcataaaactgtcaagaagactg

SEQ ID NO: 15020 - DNA, 18652 bp, Homo sapiens
tggaggaggaggcgagccgcagcgccgcggcgacgaacccagggaggtaggttgtcatgggactcggccggccaccctggcaattccagtcaaacggcaagccagactcgctttgccggtcccttcctctcctgcccctgcagccgccaggaatggaacagtcccgcggtggggactgtgggaggcgcacgcgcgaggagtgtagggtgggggtgctggcggcggctgctttggcggcggttggtggccgtgcgggcggggagggagggggaggagagaagaggaggtggagaaggcttgggctcgcgccgctgaaggtacgcgtgagggcctgcgctggagccggcttgacagggtctgagggggagtggagaactgggcgaggaggttcccgtgggtgagcgcgtacgggatggctggctcgcaggacggccgaaggtggtggttggtgggagcagccagcgacgagcccgtagacactcgtacgcgtgcgggctgacgtgcgcgctacatggccggagtcgggcgaagcgggggaccgtggggaagaacgcgaggagggaggagtgggaggttgggggtgtcgctaggcgcccttagctccctccctctggaggagctgccgcggccactctgctgccgccgctgccgccgccattttgggttcgctttgcgaggggaaacgatcccagtgtcggttgcgggatccgcctcctctcagtttgcccctttagccctccacctttcccttctcctctctcgcatttccgccagtcggcttacccgctggccgcctcctgacaagcgggagggatccgcggtggacccagggaagcggaggagcctggcggccaccccctcttcctcacttccctgtactctcatcgctctcggcctccgacacggtgagtagaacgatttgggccggcattcgggcctaagcactctctcagcgattgaatcctgggctttctgggagccactgtcatctcccggacctggacctctgggagagcagtggtgaagatgggggaggggagagcagggagggggatcctgagcctaccgggaagtccctccaggcggggtgaaggggtgtccctgacaggcagactcccggagggggctgggaagtaagcgagtggaggcggagtcggctgtgcccctgacaggttagtttgtgtttgtaggcatgatcggagcctcccccatagtccagtttgtgtgtgtttaattaagggataagagtggtcgaggacacgatcttgagaggggattttacctgtgtgacaaggtctgtggtgtccctgccgcgttgaacggtatgtgggaacgacaggatgatctcagtgttgtacgtttaataaatgtcactggttagtttgtacatggaaagagatgtttttggtctagcagacagatggtctgttggtgtgtagcggctgtgttggtgtgtgtatgtgaggatggcaagtgtttccgtaagagtttgcctttatttgtgtaagtgtaatggagttccccttataagttagcttatttcttgaataaatgttgggaggttccttgcaggttgatatgtgtgtgtattttagggattgggagcccctagttacttgttgggaaagagcggcaatggtagtgttctgtacagcatgtgtctgtgaggtcagggaggggagaaacttggcatagccagttgtggtcttaagaatagtttgtgcctttggttagagtgagttgtgtaaatgtgaagggccaaaatatctttaacagaatcattgctacaaagctgtaaagaatgggtggccttatttgttgtcgcgggtttatagtaatagtttacaatacaataagaaagctctttcagtttctttgtgatactgaatctctgtgaaaatggtaggatgctttcttccattttacaaaataggaaatttaggcataaggagagaacttctccaaggccgcatgttaaattggtgacaaagttggaactgtaactcccatattttcactactactgcagcagtatattcagcataccatggtgcctcaggaagtctttgtcggcaaatctgagtatgctggaaagataggagcacataagactggttggcttgtatttgggggagaccgattgtgtcagatatgtatgtggaacgtagctgtccttgccgagtctgacctgtatgaaatgcatatccatggctatattattttggatttatggaggaagcagagcatttctgacacttaaggttgtatgcgtgagggagaaggctttcacagcttaacttgtaccagagcagctgcatgggtgctgacagcttaacttgaaatctgtgggaggaaggatcctttttcactcattcaacaaatataaccattcaatgaatggtccatgccttgaggtgaggatcatcaaggtgtctctgtaaatagcctggatgcaatctgaggggagttgttttgacggtggtaggtattaagttgagggaggcagtgtggaattaaaaccagagaactgtttttgggtactggtaattgttaatatatgtgcctgtggatgttggaacttcttggctgggctgaaggaatcctttgaaagactgatttcggcagggcgcggtggctcacacctgtaatcccagcactttgggaggccgaggtgggcggatcacgaggtcaggagatcgaatcacgaggtcaggagatcgagactatcctggctaacaggatgaaaccccgtctctactaaaaatacaaaaaattagccgggcgtggtggcgggcgcctgtagtcccagctactcggggaggctgaggcaggagaatggcgtgaacccgggaggcagagcttgcagtgagctgagattgcgccactgcactccagcctgggccacagaggagactccatctccaaaaaaaaaaaaaaaaaaaaaaaaaagactgatttcatgtagtaaggatcccgtctatgaactctatgaatatgaggtaagaatgcatgaactaagccaacttagctgtattcttctggaaaatgggatgtttcttgataggctagattagtggttcttaaaagttttttggggtcacttatccttcagagaatcggatgaaagacactgggccctcaagttagaagatgagcataagcgcaatcacatgatttatatatatgattttaggaacttaaactgtaatgaaatagagccaatttatatttagatctcatttgaaaacctttcattttcattgttcgggtgtgtggatgttagtatgagtttaaggtgaaggagtctatgttagtatttgaacatgttgacaggatccatatttttaatttattctttttatcgtctgcaaacatttctgcagtattagtaaatgactctgtatttggtaaaaagggaagctaatgtcgcacaagtatctatggctttgttctttgtcagtatctttttgttctcaaactctgagaagcgtctttttttcagttttggattgggcctgaggtgatttgaagctcctgtcttggagtttaacttagttataacaaacactgagttaatcctatgcaggagacacaaagataattaatatatggtctctgtgcttgaagagacgctaattttctgtggttgaagagatgctgtgaattgtgtgatagtggcagctctcaaaaggacaaggaagagggaaacatattcctagaagctgaaattttattacccaattgcaaagactttttgtcactacttattcttaggaataaccataaagtgtttattttattctgtatggaactttgtactttaaaaaaatatgttttgtatcatctggtgtttttgtataaaggaactgttggtttgaaaagaaggtaaacatcatttatattccttaccttgttttgggatgtatctctacagtgagtttatgtaaaaaggtcttaatgtcatttttgggtatacatacatgtagaaagccctcctgatataaaatccagtagctatttgacagactacccattaatttattactggaacttaaaaataattactgtacttttaaaagaacaagaaattggtcaggtggggtggctcacgcctgtaatcctagcactttgggaggacgaggcggatggattgtcagagctcagaagatcgagaccagcctgggcaacacggtgaaaccccgtctctactaaaatacaaaaaattagctgcatgtgttggagtgcacctgtagtcccagctactcgggaagctgaggcacgagaattgcttgaaccaagaattgcttgaactgggagggggaagttgcagtgagctgaaatcatgccactgcactctagcctcggcatcagagcaacactctgtctcacaaaaaaaaaaaaaaaagcaagaaatgtaaaaaggtgttttaataggacagattataggattcagtgagataatggagaagttttaggaaaaattgtctgatagtcctttctttctattgacatggcccctgtataagaatgctatgtaaatttgtgaaaagtttaatattttctctaatttttaacgggtagtaggttcatggtgttatttttctcaaaacgtacatgtgatatgtgtgtgtagtgtgcatatatgtgcatgtatgtgtatacaatttctttatttttttaattgagattaggtctcgctatggttttttgtttttgtttttgtttttgagagagagtttcgctctcctcgcccaggctggagtacaatggcacaatcttgcctcactgcaacctctgcctcccaggttcaagtgattctctttcctcagcttcccaaatagctgggattacaggcgcgtgccaacacgccctgctgatttttgtatttttagttgagacagggtttccccacgttggccaggctggtcacgaactcctaacctcaagttctccagccgtctcggccttccaaagtgctgggattataggagtgagccactgcacctggcccaggtcttgctatgtagatcaatctggtcttgaactcctggcctcaagccatcctcctgtcttggcctcccagtttgctgggattacagatgtgagccagcatgcccagctctttttacctgcttaccaaatccaagattttctccaaaatgaactggaatagccttcttactgtgttaattttgccttggtggggaagcctaagtcttggaactaaattggggtggttatgacagttctctttttaaagctgatcagtatttcagtatttcacttgttgttgttttttttgttttgttttgttttttttgagatggagtcttgctctgtagcccagtttggaatgcagtggcaggattttgactcactgtagcctctgccacccggattcaagtgattctcctgcctcaatgtcctgagcagctgggtttacaggcacgcaccactacacctggctaatttttgtattgttagtagagacagggtttcaccatgttagccagtagccaagctgttctcatactcctgacctcaagtgatccacctgcctcagcctcccaaagtgctgggattacaggtgtgagccaccacgcctagccaaacccatctctttcattaaaccacctcattttggttcagaaacaagactgccatgtatgtatttaatgcttattatgtgccaagcactattccaggtactaagatacagtgatggacaaaacaagatcccttctcctctatctcaggacttattaatttgggcattttcattttccaatataggatcttttagtactggtataggattcctgaaggaattcctgaaatataattatttttctgctagagcaaatcaattttgttttttgttttttttttgagatggagtttcgctcttgtcgcccaggctggagtgcaatggcgcaatctcggctcactgcaacctccgactcccgggttcaagcgattctcctgcctcagcctcccaagtagctgggattacaggcattagccaccacgctaggctaatttttgtatttttagtagagacagggtttcaccaggttggccaggctggtctcgaactcctgacctcaggtgatcctccaggctcagcctcccaaagtgctaggattacaggcaggagccaccacgcccagaagagcaaaattcttctgttgacaaaaatttctttcctctgaggaagagacactgtgtgcctgtgttttatccaggaattccattggatagtttgtcctttgggatgtcagtggattaaatcctccattaagaatcaaagtacttggctgggtgcagtggctcatgcctgtaatccctgcactttgggaggctgaggcaggtggatcacctgaggtcaggagttggagaccaacctggccaacatgatgaaaccccatctctactaaaaatacaaaaaattatccaggtgttgtggcaggtgcctgtaatcccagctactctcgaaaaaacagaaacaaaaactctgacatgtagagtatgtagatgtagagaaaaaagtaaaatgattgttgaaaaaaatgtctattttttatcttctaaatagctttgtgtgtcagagatcagaacgctcattttacatgatatcaagaaccagaatgctagatagctagaatggttgttaacttcctagataaccattgtagaggaacacataaggtaaaacaaatgaataaaaattaaaaaaaaatgagatagccaaagatttgaagctctttacccattaacatgataatcatttcgactttgaatatttgtagaacaagagtcagaactcagaacaaagatctctgaggaaataaaaaaaaatcaagctgcctcctaatttctcatttagtctgtcattgggcattgtcaaactgtcaaactatatttagagattctggttttcatctggagacttagtgagttgtgtaatatcttgaatacacatataagatcttgccaggtggggtggctcatgtctgtaatcccagcactttgggaggatgaggtgggaggatcgctggagcccaggagttcaagaccagcctgggcaacatagcaagtccctggctctatttaaaaaaaaaaaaaaaaaaaaatcctcaatgtagaactttaaatttatccttacgtgttacatccagttgatttgagaaaatatgattctgaattttccatcaattggattggcagtccctttcagctttacagctttacatcatctacagatttgttaagtatgttctcttggtcttctaattcactgatggagtttttgaataggtcgggtccaaagatagagtcctatgaaacactgttggaaacttgtctctgtctgtctcttttttttttggagacagtgtcttgctctgtcgttcaggctggaatgcagtgggacggtctcagctcactacagcctctgcttcttggactcaaagagattctctcacctcagcctctcaagtatatgggactatatgcatgtgcgaccaagcccagataaatttttttttagagatatgttgacattttgcccaggttgggagacttgtctcttgattccattcagtattgtgtgggtttggataggccatctaattataaaatcattgggctggtcatggtggctcatgcctgtaatcccagcactttgggaggctgaggtgggcggatcacctgaggtcaggagtttgagaccagcctgaccaatatggagaaaccccatctctactaaaaacacaaaattagctgggcgtggtggtgcatgcctgtaatcccagctacttgggaggctgaggcaggagaatagcttgaacctgggaggcggaggttgcagtgagccaaaatcgtgtcatcgcactccagcctgggcaacaagagcgaaactccgtctcaaaaaaaaaaaaaaatcatctagctcacattttctccttgtcttcttcctattagaatttaagttcaatgagattagaactctctctctctctcattctctcatatatcccaagcatctaaaacagggattgaaacatagtaagtactcaataaatgtttttgaataaatgaatgaaggatagctgggcgtggtggctcatgcctgtaaccccagcactttgggaagccaaggtgggtggatcactggagctcaggagttcaagaccagcttgggcaacatggggaaaacccatctctacaaaatatggaagaattagccgggcatgacagcacactcctgttgccccagctacttggagggctgaagtgggaggatcgcttgagcctgggaagcagagattgcagtgagccgagatcaagccactgccctccagcccgggtgacagagtgagaccctgtctcaggaataaggatagatatgaagaattcgtcagatgccttgttgaaaacatcatacattgtctacatggaattcctccatattgtaaaatgaatctaatttataccaacaacgtttggcttttttgcagaaaaggaagcaaatgagctgatggaagatctgtttgaaactgtgagtaatgatcctcaagtgagaacatgggattgtaagttggttctccaacaaaatgtgtcctttgatctctgtgatgctccttctagaagagggactgaaccaattctccttttagtctacctgggaaagaatataatgacaaaagaaatttgctaactgctagactcttgattatccacatgtaggttattcttactaaaattttccttgaagctttttttttttttttttgaggcaaagtcttgctctgtcacccaggctctggagaatacagtggtgaaatctcagctcacagcagcctcgacctccagggctcaaaacaattctctcatctaagcctcctgagtagctgggactacaggcacacacctacaggcccggctaattattttatttttttgtagagacagggtcttgccatgttctggaactcataggctcaagtaatcttcctgcctcaacctcccaaagtgctggaattacaggtgtgagccagcacatcttgccccttgaaaacttttgatggcttcccctactgtcatttggtgtgtccttaaagattgccaactagttttaaagtattttgcacacaaataattaccttttccataaatttgtctaaaaagatatttctgtttaagaaattgatcattttgagttatcctagctctgtgcttactgatacaagttgactggttgagcaacttctttcctggcataatagtcattccatatgtgggtttgtaggagtcctgaagtgagaaaggttctgatgtaggctctttctgggtgccagcattattaaagtattgtttatagttttcacttttccttcccaacactggagcaacattcaaaagcccattccccaggaaaaccctccctttcctttgcccacagttccaagatgagatgggattctccaacatggaagatgatggcccagaagaggaggagcgtgtggctgagcctcaagctaactttaacacccctcaagctctacggtaggctagttgaagaccttgagatttggaatagaggaagagtttatttctgaaaaggttttcagaagttgcagttaacaatttttcatccccagccagcttctgttactgatgtaaggatgcagagtcctgtcaggagttaggtgtcaagtgaagtctccttgttatggggcagtgcagctgtaggccaagctgtatctgtttgggaagggagaaaaaacagtagctggcatccatatccacttctccgggtgagtggtgctggagaggtatgtaggactcaatgtggccagccacacaaactaccctatattgtaatatccagtctgtcccttttgttctttttatgtgccattaatatctgctaaatgtgactgaaaatttgttagtcacctaggcattagtggagcaaaccctgaagcacctgcagtaaggagtctgaaacatacgtgctgacctttttgcctaaagttggcacttgtgttacagcatccagaaagtagaggctttaattttttcctcattttgtggtggatttgcatctgcactttattctgttgtagcagcatataatcattaggtcgatggcgagaggtcaggatgcagtttgtgccataagtggaacaaagcaaagagaatagtccctgtaattagtcctgtgtttgaacttaacagcactactaagcagagagcttgggttccatctgaaagctagacctttagggattttccaatttagtgaaaaaagataagataggccaaccaatgtcttaaaaactagaactactagtcattctccattacaacaaatatcacaatacaactacatcaaaaatctcaagattgctaagtcagtatttgacccattattttaatttatagttcatagaacaaaattctggtatagcagaatggaaccattcatcctgggaacgtataataggatctgattaataaatattttggttttgctgatcaactctttataacttcttaaaatttggaaaatatagaactaatttaaaattcctgttagaatccagttaccttctggtattcaatggaatatagtcatatatcatctcatggtcataccctctgtgaaatctatcattaaacgattcatcattgtgtaaacatcgtagaatgtacttacataaacctaaatggtttagcctactgcatacctattgctcccaggctacaaaacctgtacagtgtgttactgtactgtactgaatactgtaggcagttgtaacacaatggtaagtacatatgtatgtaaacatagaaaaggtacagtaatcttatggagccacctctgactatgtggttcgttattgactgaaacattctgtggcgcatgactgtacttgggcagcttctgcttctctttcgattgcaaatacaaacctgtttttgttttaatctttgactaaataaaaatccctctgtaagtccatagagagtaagcacatcttaaaacacaataaggaagagagaggagaaaaagacagtcaaaacaaaaactctggggcttcccttatcaattacctaaataatccttgttaaaactaagtgcaggctatgtttccattttctacttttttatgcttcttctcttctgttccttcagtggtggtagcgcggatgttcaaattttcagttctcagtaaagattgtatagacagtcccacggtcttcaggtttttactctgtgctacccaaacctacagtaaatactataaaagaaaacttattcaaacgtaatctttatctgcaaaaactattgaaaaacgttaccatttaactattgctgtaatatagggggttccttgaaatatgataacctgcttgttatagctacttcagcagatcttatcctgttgcatagggtatcagcatatgcttaatcatttaggtatattattctccctttatttctttctatgtaaacatagaaaaggtatagtaatcatacatagaactgacatgctaggtattggaatttttgcttcagccctgcaaacaatctttcaggagggtatggatgggaagttagggttaggaaccttggaagaggaatttaaagggctaaaagaagatagccttcatggataatattttaactaacttctccgttctgttcatttgaactaccatgtacttcagttattttggtatatccttttcctgcttcatgctagaaagtctttgacttgttaagaaagcagggcagtgcagcctgagtagataggataatgggacaagctggacctgggatgggagtaacatcccagggagtaacaagtaatgagagaagaaatgagaatgatgagttcccaccagctccttggctgctttcttacccatatatttctctgtccctagttttttgtttaattttttcttcatttgtatattatttggaagaggaattgtagaggaatgggatggggtgtaatacagaatcatttgatgcatgctaactactttgggaaaagatttgtgtaaggctgggagtttgactgttggctaaagtgaaaaggggggattagtagggaatgaaaattgttcaggctctttgctcatcattgcaaagaattggatgtgttgtggacctaggaaaacactcaaattcagtcatccccgtttgggataggtttgaggaactactggccaacctactaaatgaacaacatcagatagcgaaggaactatttgaacagctgaagatgaagaaaccttcagccaaacagcagaaggaggtagagaaggttaaaccccagtgtaaggaagttcatcagaccctgattctggacccagcacaaaggaagagactccagcagcagatgcagcaggtaacactttccttggtcatattaatattgaattataccaaggcctaactctgaggctttggtataatctaaaattagcagctttgtaaatgtcagagatagttaccttactacgtattaaaaccgtagtatcttcacatcagttaggagcttgagaagtcatcatgttcatgtcctgtggctcagggaagacagcacataaggaccctaatggtattcggaattacagatttcaaagagtcctcagtaatctattctgaaatttaaccttcactgtgacaagtagttttttttcccttttcccttttcttttttcttttttttttgagacgtagtctcgctctgtcacccaggctggagtgcagtggctcaatctcagctcactgcaagctctgcctcccgggttcacgccattctcctgcctcagcctcccgagtagctgtgactacagggactcgccaccacacccagctaattttttgtatttttagtagagacagggttcactgtgttagccaggatggtctcgatctcctaacctcgtgatccacccgcctcggcctcccagagtgctgggattacacgcgtgagtcactgcgcccggccttttccttttctaatctcagttcctcctctgtttagaggttaaacttcctctggttctgtcattttgttcaagggaacatgtctgagaaatttatgccaagatcctacgttgttctcacactctttgcagaaagcaaaatttgtgtcataaagttgcaaacatcttagttaatgactctctggtggctgggtgcagtggctcacacatgtaatcccagcactttgggaggctgaggtgggaggattgcttgagcaggggagttcaaaagcagcctggacaacatagtgagactctgtctctacaaaaaataaaaataaggctgggcacagtggctcacacctgtaatcccagcactttgggaggccaaggcgggtgaatcatgaggtcaggagtttgaggcaagcctggccaacatggtgaaaccccgtctctacgaaaacaaaaaattagctgggtgtggcggcgggcacctgtaatcccagctactcgggaggttgaggcaagagaatcacttgaacctgggaggcagaggttacagtgagccgagatcacgccattgcactccagcccaaaagtcagtgcgagactctgtctaaaaataataataataataataataaaataaattagccaggcattgtggtcacagctacttgggaggctgaggtgggaagattgcttgagcacaggtggttgagagggcattgagtcatggttgcaccactgcactccaagctgtgtgacagagcaagaccctgtctccagggggaaaaaaaaatatctctgggctcctgaaatggcagtgtcataacatatcactgcattattttctttctctccccagcatgttcagctcttgacacaaatccaccttcttgccacctgcaaccccaatctcaatccggaggccagtagcaccaggatatgtcttgtaagtttccaaattgccgtaattctatagactagaatataaaattagcttggcaggttatttctcacagttattctctcaggtatttttgattgctgtggcttcctatgtttgctgagtgaacataagccactgattcacatgaaaggacaaagagtgtattcaattttttcttttcttttttgagacagggtcttgctctttcacccaggatggagtgcggtggaacaatttcagttcactgcaacccctgcctcccgggttcaagtgattctcctgcctcagcctcccaagtagctgggactacaggcgggcaccaccacgggtaattttttttgtatttttagtagagacagggttttgccatgttggccaggctggtctcgaattcctgacttcaagtgatctgcccacctctacctcccaaagtactgggattacagccatgagccactgcgcctggcctgtccttctgatatttttattgggtcctcctcctcatctttagattcaccctgacttcttaggtttttggtaccgctattcatttcatagatgttgaggctgggcatagtggctcacacctgtaattccagcactttgggaggctgaggtgataggatcacttgagcccagtggtcaagaacagcctgggcaacatagtaagacccggtctgtgttttttttgttttgttttgttttaatttaaataatgaagtaaatatacatgtagatgttgaattcattatccattcatgaagctcaatattagtgttttatgtgtagagctagttttgctcatgacgttttgaggtattttgagctttttttttttttttttttttttttgagacggagtctcgctctgtcgcccaggctggagtgcagtggcgggatctcggctcactgcaagctccgcctcccgggttcacgccattctcttgcctcagcctcccaagtagctgggactacaggcacccgccactatgcccggctaattttttgtatttttagtagagacggggtttcaccgttttagccgggatggtctcgatctcctgacctcgtgatccgcccacctcggcctcccaaagtgctgggattacaggcgtgagccaccgcgcccggcctattttgagattttaaatttgaaatttggccaggtatggtggctcatgcctgtagtcccagcactttggtaggtcaaggtgggaggattgcttgagcccaggagtttgagaccagcctgggcaacatagtaagaccccatccctaccaaaaaaataaaaaataaaaaaattagctggggatggtgccgagtgcctgtagtcccagcaacttgggagactgaggtaggaggatcacttgagcctgggacgttgagactgtagggagccgtgcttatatatcactccagcctgggtgacagagtgagaacctgtctcacaaaaacaaaaccatactttacctcataaaaattgcctcaaacttttggacaggtaatgataatactctcagcttcttcagtaagtcttctttggattttgaagagtacatttgctagtattctaaaacttccttggtgatcaacaggatgtcttcatctcttactgtattcagaggaggatgaggagtacttggttgtaggcattattctgagaccaaaagacaaaacaattttaaaagtaatggtcctggtcgggtgaggtgactcatccctgtaatcccagcactatgagaggccgaggcaggcggattgtgagcccaggagttcgagatcagcctggccaagatgggaaaacgctgtctctgcaaaaaatacaaaaatcagctaggtttggaggtgtatgcctatagtcccagcttctcaggaggcagtgggaggatggcttgagcctgggagggggagtttgcagtgagctgagatcatgccactgcagtccagcctgagcggcagagtgagaccatgtctcaaaataaattaattaattaaattaaagtaatagtccccattcttgagactcttaattctagctcgggagctagaccatgtattccttagtgagaaacagtttaaaaataaaacaagaatataatccctgaatatctgagaactcaggcataatcttaacagtagtttattgtgaaagactttatgattatttttacctgtttttatcctgtagtaggaaggtcagcttctcatttagattctgaaggctattggtattaattgtctggaattgtcttagatcttccttgtgtcgtgttttcccagaaagagctgggaacctttgctcaaagctccatcgcccttcaccatcagtacaaccccaagtttcagaccctgttccaaccctgtaacttgatgggagctatgcagctgattgaagacttcagcacacatgtcagcattgactgcagccctcataaaactgtcaagaagactggtaggagacagatgtgtcagctttaagtttttacttgcggtgagaggtggtgggaatcttatcccatagataacttcctaggatacttgcctaggaatggaggacacaggacatttgtaatttcttccttctctcttttatcctccctttgtactcattatccaagttctagaattacatgataatctccgggcctgggtaaggcatggaggcagtggacagtataggaatatgggaggtagagatctgaggctcagtgctaagaattggactacagcaatatgaggggtaagtattaggaatcagatcaagataaactggggcctggtaaagatgaaagtcaggtggtaaagttcggtcatgtttagctttttattctcttcattaagatcaactaactttatttaccataatgattgtagcataggtgatatctccattctgaatgaaatgttgacttgcaagttaggcgtaaattagagattgtacatttgccgtgttcagtattttaaagaaatttgccggtttagattctaccttgcattggtttagtattttttgagaaaatatttgctatttacttaagccaaatatttacttctgatttgtttgctgacttagcaaattagttgtggtttgttctggatttgggtttgtctttggattctattttaaatccctaagtcttatcattacattgaatgtagttgaatttaagtgtactatatcatagacacagatcccaaactactttaatagctatattatatgaaatggtaatgaaaacgtgatttaataccaaattatagtattatcttacacatctagtgtcctgtgtttttcttctggagatataaaaatgacacttatggaaggagaaatatggatatagtagttttgtctctagaaatgcagaggtgcctaaaattgagaggctgagagagggagacagaaatgaatgagactgaattgtctcattccttttatggttcttttgttcccaacctcaggaggaatctgggagaacttaatgaaagttaagaaagaatgaaataaaagtaaaatttggaataccaggtttgtgagggagattaaagaagttggaatcttttttcttttttttttttttaagatggagtctcgctctgtcacctaggctggagtgcagtggggtgatctcggctcactgcaacctccgcctcccaggttcaaacaattctcctgcctcagcctcccaagtagctggaattacaggtgcgtgccaccatgcctggctaatttttacatttttggtagagatggggtttcactatgttggccaggctggtcttgaactcctgacctcaggtgatccacctgcctcggcctcccaaagtgctgggattacaggcgtgagccagcacgcctggcctggaatcttatcctggaagaaaaaagcattgttgaaggtctgttatccttcagagatttaaaggggaaaggaggtaaaacatttttgagcatacactatgtgacaggtattactaggtactttttaagtgtttgttttactttgtgaataaagtgttacacgtaagaaagagtaagagaggccgggcgccgtggcttacgcctgtaatccaacactttaggaggccgaggctgtcggatgacaaggtcaggagatcaagaccatcctgtctacagtgaaaccccgtctctactaaaaatacaaaaaatcagccaggcgtggtggcaggcgcctgtagtcccagctactcaggaggctgaggcaggagaatggcctgaacccgggaggcggagcttgcagtgagccaagattgcgccacgcactccagtctgggcgacagagccagactccgtctaaaaaaaaaaaaaaaaaaagtcaacttttattgccagtgaatgggactccctttagacctaatgttagttgaggaaagactgtggaaactctttggggagtggtaggcagatgggagggaatcaagttagataaggacagctctacctaaatgcaaaaatgcattcacaggctttttgaagccctcttttttcctagaagttgatttatcagagatttattttcttatagccaatgaatttccctgtttgccaaagcaagtggcttggatcctggccacaagcaaggttttcatgtatccagagttacttccagtgtgttccctgaaggcaaagaatccccaggataagatcctcttcaccaaggctgagg

SEQ ID NO: 15021 - DNA, 1037 bp, Homo sapiens
tggaggaggaggcgagccgcagcgccgcggcgacgaacccagggagttccaagatgagatgggattctccaacatggaagatgatggcccagaagaggaggagcgtgtggctgagcctcaagctaactttaacacccctcaagctctacggtttgaggaactactggccaacctactaaatgaacaacatcagatagcgaaggaactatttgaacagctgaagatgaagaaaccttcagccaaacagcagaaggaggtagagaaggttaaaccccagtgtaaggaagttcatcagaccctgattctggacccagcacaaaggaagagactccagcagcagatgcagcagcatgttcagctcttgacacaaatccaccttcttgccacctgcaaccccaatctcaatccggaggccagtagcaccaggatatgtcttaaagagctgggaacctttgctcaaagctccatcgcccttcaccatcagtacaaccccaagtttcagaccctgttccaaccctgtaacttgatgggagctatgcagctgattgaagacttcagcacacatgtcagcattgactgcagccctcataaaactgtcaagaagactggtaggagacagatgtgtcagctttaagtttttacttgcggtgagaggtggtgggaatcttatcccatagataacttcctaggatacttgcctaggaatggaggacacaggacatttgtaatttcttccttctctcttttatcctccctttgtactcattatccaagttctagaattacatgataatctccgggcctgggtaaggcatggaggcagtggacagtataggaatatgggaggtagagatctgaggctcagtgctaagaattggactacagcaatatgagggccaatgaatttccctgtttgccaaagcaagtggcttggatcctggccacaagcaaggttttcatgtatccagagttacttccagtgtgttccctgaaggcaaagaatccccaggataagatcctcttcaccaaggctgagg

SEQ ID NO: 15022 - DNA, 14212 bp, Homo sapiens
cccaatctcaatccggaggccagtagcaccaggatatgtcttgtaagtttccaaattgccgtaattctatagactagaatataaaattagcttggcaggttatttctcacagttattctctcaggtatttttgattgctgtggcttcctatgtttgctgagtgaacataagccactgattcacatgaaaggacaaagagtgtattcaattttttcttttcttttttgagacagggtcttgctctttcacccaggatggagtgcggtggaacaatttcagttcactgcaacccctgcctcccgggttcaagtgattctcctgcctcagcctcccaagtagctgggactacaggcgggcaccaccacgggtaattttttttgtatttttagtagagacagggttttgccatgttggccaggctggtctcgaattcctgacttcaagtgatctgcccacctctacctcccaaagtactgggattacagccatgagccactgcgcctggcctgtccttctgatatttttattgggtcctcctcctcatctttagattcaccctgacttcttaggtttttggtaccgctattcatttcatagatgttgaggctgggcatagtggctcacacctgtaattccagcactttgggaggctgaggtgataggatcacttgagcccagtggtcaagaacagcctgggcaacatagtaagacccggtctgtgttttttttgttttgttttgttttaatttaaataatgaagtaaatatacatgtagatgttgaattcattatccattcatgaagctcaatattagtgttttatgtgtagagctagttttgctcatgacgttttgaggtattttgagctttttttttttttttttttttttttgagacggagtctcgctctgtcgcccaggctggagtgcagtggcgggatctcggctcactgcaagctccgcctcccgggttcacgccattctcttgcctcagcctcccaagtagctgggactacaggcacccgccactatgcccggctaattttttgtatttttagtagagacggggtttcaccgttttagccgggatggtctcgatctcctgacctcgtgatccgcccacctcggcctcccaaagtgctgggattacaggcgtgagccaccgcgcccggcctattttgagattttaaatttgaaatttggccaggtatggtggctcatgcctgtagtcccagcactttggtaggtcaaggtgggaggattgcttgagcccaggagtttgagaccagcctgggcaacatagtaagaccccatccctaccaaaaaaataaaaaataaaaaaattagctggggatggtgccgagtgcctgtagtcccagcaacttgggagactgaggtaggaggatcacttgagcctgggacgttgagactgtagggagccgtgcttatatatcactccagcctgggtgacagagtgagaacctgtctcacaaaaacaaaaccatactttacctcataaaaattgcctcaaacttttggacaggtaatgataatactctcagcttcttcagtaagtcttctttggattttgaagagtacatttgctagtattctaaaacttccttggtgatcaacaggatgtcttcatctcttactgtattcagaggaggatgaggagtacttggttgtaggcattattctgagaccaaaagacaaaacaattttaaaagtaatggtcctggtcgggtgaggtgactcatccctgtaatcccagcactatgagaggccgaggcaggcggattgtgagcccaggagttcgagatcagcctggccaagatgggaaaacgctgtctctgcaaaaaatacaaaaatcagctaggtttggaggtgtatgcctatagtcccagcttctcaggaggcagtgggaggatggcttgagcctgggagggggagtttgcagtgagctgagatcatgccactgcagtccagcctgagcggcagagtgagaccatgtctcaaaataaattaattaattaaattaaagtaatagtccccattcttgagactcttaattctagctcgggagctagaccatgtattccttagtgagaaacagtttaaaaataaaacaagaatataatccctgaatatctgagaactcaggcataatcttaacagtagtttattgtgaaagactttatgattatttttacctgtttttatcctgtagtaggaaggtcagcttctcatttagattctgaaggctattggtattaattgtctggaattgtcttagatcttccttgtgtcgtgttttcccagaaagagctgggaacctttgctcaaagctccatcgcccttcaccatcagtacaaccccaagtttcagaccctgttccaaccctgtaacttgatgggagctatgcagctgattgaagacttcagcacacatgtcagcattgactgcagccctcataaaactgtcaagaagactggtaggagacagatgtgtcagctttaagtttttacttgcggtgagaggtggtgggaatcttatcccatagataacttcctaggatacttgcctaggaatggaggacacaggacatttgtaatttcttccttctctcttttatcctccctttgtactcattatccaagttctagaattacatgataatctccgggcctgggtaaggcatggaggcagtggacagtataggaatatgggaggtagagatctgaggctcagtgctaagaattggactacagcaatatgaggggtaagtattaggaatcagatcaagataaactggggcctggtaaagatgaaagtcaggtggtaaagttcggtcatgtttagctttttattctcttcattaagatcaactaactttatttaccataatgattgtagcataggtgatatctccattctgaatgaaatgttgacttgcaagttaggcgtaaattagagattgtacatttgccgtgttcagtattttaaagaaatttgccggtttagattctaccttgcattggtttagtattttttgagaaaatatttgctatttacttaagccaaatatttacttctgatttgtttgctgacttagcaaattagttgtggtttgttctggatttgggtttgtctttggattctattttaaatccctaagtcttatcattacattgaatgtagttgaatttaagtgtactatatcatagacacagatcccaaactactttaatagctatattatatgaaatggtaatgaaaacgtgatttaataccaaattatagtattatcttacacatctagtgtcctgtgtttttcttctggagatataaaaatgacacttatggaaggagaaatatggatatagtagttttgtctctagaaatgcagaggtgcctaaaattgagaggctgagagagggagacagaaatgaatgagactgaattgtctcattccttttatggttcttttgttcccaacctcaggaggaatctgggagaacttaatgaaagttaagaaagaatgaaataaaagtaaaatttggaataccaggtttgtgagggagattaaagaagttggaatcttttttcttttttttttttttaagatggagtctcgctctgtcacctaggctggagtgcagtggggtgatctcggctcactgcaacctccgcctcccaggttcaaacaattctcctgcctcagcctcccaagtagctggaattacaggtgcgtgccaccatgcctggctaatttttacatttttggtagagatggggtttcactatgttggccaggctggtcttgaactcctgacctcaggtgatccacctgcctcggcctcccaaagtgctgggattacaggcgtgagccagcacgcctggcctggaatcttatcctggaagaaaaaagcattgttgaaggtctgttatccttcagagatttaaaggggaaaggaggtaaaacatttttgagcatacactatgtgacaggtattactaggtactttttaagtgtttgttttactttgtgaataaagtgttacacgtaagaaagagtaagagaggccgggcgccgtggcttacgcctgtaatccaacactttaggaggccgaggctgtcggatgacaaggtcaggagatcaagaccatcctgtctacagtgaaaccccgtctctactaaaaatacaaaaaatcagccaggcgtggtggcaggcgcctgtagtcccagctactcaggaggctgaggcaggagaatggcctgaacccgggaggcggagcttgcagtgagccaagattgcgccacgcactccagtctgggcgacagagccagactccgtctaaaaaaaaaaaaaaaaaaagtcaacttttattgccagtgaatgggactccctttagacctaatgttagttgaggaaagactgtggaaactctttggggagtggtaggcagatgggagggaatcaagttagataaggacagctctacctaaatgcaaaaatgcattcacaggctttttgaagccctcttttttcctagaagttgatttatcagagatttattttcttatagccaatgaatttccctgtttgccaaagcaagtggcttggatcctggccacaagcaaggttttcatgtatccagagttacttccagtgtgttccctgaaggcaaagaatccccaggataagatcctcttcaccaaggctgaggacaagtaagtgtttactctgggggatcaaatatcccaaggagaagatgtagttcctttgaggagtttaggggaagtaagacttgtataataagacatggacacaaaaggaaaagcagtatagatgagcagagtcctctagaacgtgcttgttctagcagtgccaaatactgctttttggggggatgttacacacatttttaaaatgttttagactggacatggcggctcccacctgtaatcccagcactttgaaaggccaaggcaggaggttggcttttctaatgttattatttatttagagacaggatcttactctgtcacccaggctggagtacagtgttgcaatcacagctcactgcagccttgaactcctgggatcaagtgatcctcctgcctcagcctccatggagtagctgggaccacaagcgtgtgccaccatacatggctgattttttttgtacaggtgagggtatctctgtgttgcccaggctgctcttgaattcctgacctcaaatgatcctcccactcctggcctcccaaagtgctgggactataggcataagccaccacacccagctagattatgaacatttttatggccctttgtgtgtattgccacactgttaacagcaaatatgtatatatgtaaccatgattatatatgttatgttagagggtagtattggtgccagtttaatttgtctgacggggtacctattattcattttatatttgttttattagaatcattctccttcccatgtattctctttgaacttcctttgtgttgttaatatacagctcatcatgatctgacatttattgatgatttatgactagtttctcttgctcctacttaattgtgaactatttgattcttattcatagtacttaatcactactcactaaatacctgaaattttctactgagtagtcaccaacttgtagtagtcactacaagaattagttgtagaaaaagtagattggccagccatggtggctcacacctgtaatgacgacactttgggaggccgaggcaggaggatcacttgaggccagaagttcaagatcagcctaggcaacaaagtgagaactggtctctacaaataatgaaataaaacattagttaggcatggtagcaaacgtttatagccacagatactcaggaggctgaagtgcgggaatcgattgaacccaggcattcaagactgcagtgcactgtaatcatgccactgctctccagcctggacaacagagcaaaaccctgtctgaaaaaaatgaaaaagtagattgggccacacgccatgggctcatgcctgtaatctcagcactttgggaggctgagactggagaatcgcttcagcttaggaagtagcagctgcagtgggctgcgatcacgccactgcactccagcccaggtgacagagtgagaccttgttttaagaacaagtaagaaaaagtagattgtaaaatgtgttagtctggggaggccctttagaaggaaggactgtgaagtgagatttagtgttattgctcctttctcagtttgttagctttaggactgaagcattttgaagggactgagtttcttaaccctctaatcagcaagtaccttctaacctgcaagactgcccgccaactgacagtgagaatcaagaacctcaacatgaacagagctcctgacaacatcattaaagtgagtgtttcctgcatgcactatccaggcacctcaccaacacatatctgttcttttctcttgttattctcaaagaaaagaagaaccttcttttatctaaagctaatttctcctacttatatactagattaattcccctgttgccttttcagggacattgattcattcattacgttcctctggagtatcttcatcctcttaaaagattccacaaatccatgtttccctgtaataattctctttcttgaactttctagaaatgatatgcagtattccacttacatgctttgggtttttgttttgttttgtttttttggtcagacataatcttgcactgtcacccaggctggagtgcaggagtatagtggcatgatcttggctcactgcagcttccgcctcccgggttcaagtgattctcctgcctcagcctcccaaatagctgagattacaggcgtgcccaccacgctcagctaattttttgtatttttagtagatacgggtttcaccatgttggccaggctggtcttgaacttctgacctcaagtgatccaccagttttggcttcccagaggctaggattgcaggcataagccaccgtgcccagcctatatactttttctcaattttgtgtttgtatgtatgcatgtatgtgtgtgtgtgtgtgtgtgtgtgtttgtgtgtgtctgtgtctgtatgtatgtatgtatgtatgtatgtatgtattgagatggagtttcgctcttgtcgcccaggcccagcctatatactttttctcaactctttttacttattgattgattgattgagatggagtctcgctcttgacccccaggctggagtgcaatggtgcgatcttggctgactgcaacctctgcctcctgggttcaagtgattctcctgcctcagcctcccttgtagctgggattacaggcccctgccaccatgcccagctgatttttgtatttagtagagtcggggtttcaccatgttggccaggctggtctcgaactcctgacctcaggtgatccatctgcctcggcctccctaagtgctgggattacaaatgtgagccattgcccccagccttcttttttatttagatatttatttatgtttttttttttttttagagacaggttctcactctgtcatcctggctggagtgcatgggcacaatcataggtcactgcaacctcaaattcctgggtgatccttccacttcagccttccaagtagcttggactacaggtgcatgccaccaaggctagccgattattttattttgtgtgaagacagggtgtcattttgtttcccaggctggtcttgaagtcctgacctcaagcagtcctcttgcctcagctcggcctcccagagtgttgggattacaggcgtgagccatgatgcccagcctttggtttcattgtgtttttgtatttttcttgagacaaggtcttactctcctgcctaggctggagtacagtggtatagtcatagctcactgcagccttgaactcctaggctcaagcattcttccaacgtcagcctcccaaggagctgggattatatgcattagccactgtgcttggccattaaatttatttatttatttattttattttatttttttgagacagaatctgtctctgtcacccaggctggagtgcagtggcacaattttagctcactgcaacctccacctaccgggttcaagcaattttcatgccttagcctcctaagtagctgggactacaggcatgcgccaccacacctggctaatttttatatttttagtagaaacataatttcaccatgttggtcagtctgatcttgaactcctgatctcaggtgatctgcccacctcggcctcccaaagtgctggaattataggcgtgagcctctgtgcctggcaaaaaactttttttttttagggatggggtgtccctatattgcccaggctggtcttcaatttttggccttaggcaattctcctgtctcagcctctaattggtactgcctggtgtattggatttaggccttacttattaaccataaaccacggaagccgaagatttacctctctcctcactcccttactcccaccacaaacatgcacattttctgctctccaaactcctcactagtagttatggtagaattttggttagattgtattcagggtttacattgtaagattttaaggactgttggctgggcgcggtggctcacgcctgtaatcccagcactttgggaggccaaggcaggtggataacgaggtcaggaaatcgagaccatcctggctaacatggtgaaaccccagctctactaaaaatacaaaaaactggctgggcgtggtggcgggcgcctgtagtcccagctactcgggaggctgaggcaggagaatggtgtgaacccgggaggtggagcttgcagtgagccgagatcgcgccactgcactccagtcttgccagagcaagactccgtctcaaaaaaaaaaaatagattttaaggactgtataaatgctcttcacagctcagctatgttactgtgttaccttgcctttcctgctgaacattttgtttcccagatcatcttctttcagtgtgttcaggtattctagatattctgtcactttcatcttgaagaaattgctccctgagccctctgacattattccactttaagcgtgttgctctccatgttgctgcactgatgtcttcttgggctttttcttcaccatcatcccaggaattccttttgcctcatactgtgttagatcctcttatttcctgaattccacatctttgcttttgcattactttttttttttttttttttttttttgagacacagagtcttgctctgtcccccaggctggatctcggctcactgcaacctgcaaccttggtcttggtcttgaactcctgacctcaggggatccacccacctcagcctcccagagtgcggggattacaggcgtgagacaccacgcctggccttgttttttgttttgttttgcttttttttgagaccgagtctcgctttgttgcccaggctggagtccaaaggcgcgatgatcttggctcactgcaacgtccgcctcccgggttcaagcaattctcctgcctcagcctcccgagtagctgggattataggcacatgccactacgcctggctaattttttgtatttttagtagagacagggtttcaccatgttagccaggatggttttgatctcctgacctcttgatccacccgtttcggtctcccaaagtgctgggattacaggcgtgagtattacttctttactttagtggaacacattctagtagcttttttttaaaaaaaatttttttctgaattttaaaaaattgaggtgggggggtctcagttttttgcccaggctggtctcagactcctgggttcaagtgatcctcctgcttcagcatcccaaagtgctgagattataggcatgagccaccctgcatggccccattccagtagcatcctgagggagagtgcttgggaagggaattttcacatttaaaccatctccggggccgggcgcagtggctcacgcctgtaatcccagcactttgggaggctgaggcgggtggatcacgaggtcgggaaatcgagaccatcctggctaatgtggtgaaaccccgtctctactaaaagtacaaaaaaattagccgggtgtggtggcgggcgtctgtagtcccaggtactctggaggctgaggcaggagaatggcgtgaacctgggaggtggagcttgcagtgagccgagatctcgccactacactccagcctgggtgacagagcgagactccgtattaaaaaaaaaaaaaaaaaaatctccattcatggtcttttgattgtatcgatgtcagtttcctcgtttttgtttttgttttattttttttctttttttgagacagagtctcactgttgctcactgcagcctctgcctcctgggttcaagcgattctcctgcctcagcctcctgagtagctgggattagccaccacacccagctaatttttgtatttttagtagagatggggttttgccatgttggccaggtgatctcgaacccctgacctcaagtgatctgcccaccttggcctcccatagtgctgggattacaggcatgagccaccacatcctccatgtctggccagtttcctggtagtaatattgtactgtgtaccttgtttatatgtatagctcttgtttctatgtaacataaaaacattatattgggagaaactggttgaagggtacatgggacctcttggtactattttttgcaatttcctatgaatataattatttcaaaataaaaggaaaaaataatactctcctctgtcactgtatctagaattctagataggaaataatttttttaagaagcttttaagggcctcacttcattttcttctaactcctagtgtggtgttaagaaatttcatgccatttaactttttttttttttttccgagacagggtcccaccctgttgcccagtttggagcgtggctaaatcatggctcactggtgtctccaacccggtgtgcaccactatgcccagctaattttttttttttttttttttaagacatggtctcgttatgttggccaggctggtctcaaactcctggcctcaagtgctcgtcctgtcttggcctcccaaagtaatgggattataggcatgagccatggccccatttaactcttgagtctttgtgtaacacctgtttttctcaacctctgacagcatgcaggatttttcctttggcttcaatattttgaaaatgcatgataatatgccttagtatttgtctatttttatccatggttttttaaaaagtactttctttttgtttttgtttgtttgtttgttttgagacagagtctcgctccattgcccaggctggagtgcaatggcgtgatcttggctcactggaacctctgcctcccaggttcaagcaattgtcctgtttcagcgtcccgaggagctgggactacaggcgctcaccaccacaccctgctaatttttgtatttttagtagagacggggtttcaccttgttggtcaggctggtctcaaactcctgacctcgtgacccacccacctcagcctcccagagtgctgggattacaggtgtgggccaccatgcctggcgtatccatggttttaaggcacacgtgataaaccttattcttctgcagaaataatttttttttttttttttgagatggagtctcactctgttgccaggctggagtgcagtggcgtgatgtcggcccactgcactctccacctcctgggttcaagtgattctcgtgcctcagcctcccgagtagctgagattacaggcacgcgccaccacacttagctaatttttgtatttttagtagagatggggtttcaccatgttggccaggatggtcttgatctcctgaccttgtgatctgcctgcctcggcctcccaaagtgctgggattacaggcataagccaccacgcctggccagaagtaatttgtgtttaagttttagttttgtgtcatttttcgtgcacacctttgtacttttgttgggggatggggcggggtgtcggggttggagtcttgctctgttgcccaggctggagtgcagtggtgcagtcttggctcactgcaacctcttaattcctcagttcaagtgattctcctgcctcagcctgccaagtagctaggatcacaggcgtgcaccaccacacccagctaatttttttttgtactttattagagacagggtttcgccatgttggccaggctggtcatgaactcctgacctccagtgatccatcctcctcgttctcccaaagtgctggcattacaggcatgagccaccatgcccagccctttgtacattttttaatgtaggatgccatttgtccacttgactctcccactagtctgtaagctccatgagagcaggaattgcttcccttatgtgtgtgcttagcttttagcacagtgcctaggatatagaaaacatcttatgttcatcatgttggatgaacagatgcttattgtcatggtttaagttcagttcttatcttctttttttttttttgagatggagtctcaccctgttaccaacgctggagtgcagtggcatgatcttggctcactgcaatctccaccctaccacccccactgccaggttcaagcgattcttttgccccagcctcccaagtaactgggattacaggcacccaccaccacacccagctaatttttgtatttttagtagagatggagtttcaccatgttggccaggctggtctcaaactctcaatctcaagtgatctgcccgcctcagcctcacaaagtgctgggtttacagatgtgagccaccaaggccagcctatttactcttaaaactgaactgcctcggtctttttttttttccttcccttctgatgcccttcacaccatcatttgcttaaagtctttgatgtgtccattttatagattacgatgctgtctttgcagctgttgagcaggaacaaatcttacataagattgctcttagcatctgcttccttttctctctgtgacctaaactctccccttcctggcaaccagaatggagatcatcagttagaaaatattgaatagggctgggcgcggtggctgacgcctgtaatcctagcactttgggaggccgaggcgggtggatcacgaggtcaggagatcgagaccatcctggctaacacagtgaaaccctgtctctactaaaaatacaaaaaaatcagccgggtgtggtggcgggcacctgtagtcccagctactccggaggctgaggcaggagaatggcgtgaacctgggaggtggagcttgcagtgagcggagatcgcgccattgcactccatcctgggcgacagagcaagactccgtctcaaaaagaaaatactgaataactataaaatctttaaatagagattagtttaatttgaaatgtacaagtattcagcatatgctattcgtatatgtgtgttcatggatgtttgtgtatgtggtcttgtgtgtgtgtgtgtgtgtgtgtgtgtgtgtgtgtttctcttgatccaccaccaccccattcaccagcctgacagaagacagtgtttccagaaggaatgtaattcatgcgcatttttttcatgttaagttttataagaagaccaaacagctgccagtcctaggaaaatgctgtgaagagatccagccacatcagtggaagccacctatagagagagaagaacaccggctcccattctggttaaaggtacagccctcttcctcgaagtctgtaggaggcagaaggtcactgaaagttctgagagaatatcaaggacttccttaatcgtctaatgctttagttgtagaactaggacttcaggaatcttcctgattcacctttcttcccttacttttctgcccttctccgggtgattctacaacattttcaaaataatgggtaaaatggtaatttgctaaaggaaattcagagaagagtttctaaagtgtataattggactgtggtctttgtagaaatttcatatgcagagtcccttggaaagatgccttgagcttgtctcaggtccctaaacttagaaagtcctattctttttcccaaattctgacatgtgctggatcagagtgttctcatttccaataggccagtctgccatccatccaggaagaactgcggcacatggctgatggtgctagagaggtaggaaatatgactgg

SEQ ID NO: 15023 - DNA, 680 bp, Homo sapiens
cccaatctcaatccggaggccagtagcaccaggatatgtcttaaagagctgggaacctttgctcaaagctccatcgcccttcaccatcagtacaaccccaagtttcagaccctgttccaaccctgtaacttgatgggagctatgcagctgattgaagacttcagcacacatgtcagcattgactgcagccctcataaaactgtcaagaagactggtaggagacagatgtgtcagctttaagtttttacttgcgccaatgaatttccctgtttgccaaagcaagtggcttggatcctggccacaagcaaggttttcatgtatccagagttacttccagtgtgttccctgaaggcaaagaatccccaggataagatcctcttcaccaaggctgaggacaacaagtaccttctaacctgcaagactgcccgccaactgacagtgagaatcaagaacctcaacatgaacagagctcctgacaacatcattaaattttataagaagaccaaacagctgccagtcctaggaaaatgctgtgaagagatccagccacatcagtggaagccacctatagagagagaagaacaccggctcccattctggttaaaggccagtctgccatccatccaggaagaactgcggcacatggctgatggtgctagagaggtaggaaatatgactgg

SEQ ID NO: 15024 - DNA, 14335 bp, Homo sapiens
tccaccttcttgccacctgcaaccccaatctcaatccggaggccagtagcaccaggatatgtcttgtaagtttccaaattgccgtaattctatagactagaatataaaattagcttggcaggttatttctcacagttattctctcaggtatttttgattgctgtggcttcctatgtttgctgagtgaacataagccactgattcacatgaaaggacaaagagtgtattcaattttttcttttcttttttgagacagggtcttgctctttcacccaggatggagtgcggtggaacaatttcagttcactgcaacccctgcctcccgggttcaagtgattctcctgcctcagcctcccaagtagctgggactacaggcgggcaccaccacgggtaattttttttgtatttttagtagagacagggttttgccatgttggccaggctggtctcgaattcctgacttcaagtgatctgcccacctctacctcccaaagtactgggattacagccatgagccactgcgcctggcctgtccttctgatatttttattgggtcctcctcctcatctttagattcaccctgacttcttaggtttttggtaccgctattcatttcatagatgttgaggctgggcatagtggctcacacctgtaattccagcactttgggaggctgaggtgataggatcacttgagcccagtggtcaagaacagcctgggcaacatagtaagacccggtctgtgttttttttgttttgttttgttttaatttaaataatgaagtaaatatacatgtagatgttgaattcattatccattcatgaagctcaatattagtgttttatgtgtagagctagttttgctcatgacgttttgaggtattttgagctttttttttttttttttttttttttgagacggagtctcgctctgtcgcccaggctggagtgcagtggcgggatctcggctcactgcaagctccgcctcccgggttcacgccattctcttgcctcagcctcccaagtagctgggactacaggcacccgccactatgcccggctaattttttgtatttttagtagagacggggtttcaccgttttagccgggatggtctcgatctcctgacctcgtgatccgcccacctcggcctcccaaagtgctgggattacaggcgtgagccaccgcgcccggcctattttgagattttaaatttgaaatttggccaggtatggtggctcatgcctgtagtcccagcactttggtaggtcaaggtgggaggattgcttgagcccaggagtttgagaccagcctgggcaacatagtaagaccccatccctaccaaaaaaataaaaaataaaaaaattagctggggatggtgccgagtgcctgtagtcccagcaacttgggagactgaggtaggaggatcacttgagcctgggacgttgagactgtagggagccgtgcttatatatcactccagcctgggtgacagagtgagaacctgtctcacaaaaacaaaaccatactttacctcataaaaattgcctcaaacttttggacaggtaatgataatactctcagcttcttcagtaagtcttctttggattttgaagagtacatttgctagtattctaaaacttccttggtgatcaacaggatgtcttcatctcttactgtattcagaggaggatgaggagtacttggttgtaggcattattctgagaccaaaagacaaaacaattttaaaagtaatggtcctggtcgggtgaggtgactcatccctgtaatcccagcactatgagaggccgaggcaggcggattgtgagcccaggagttcgagatcagcctggccaagatgggaaaacgctgtctctgcaaaaaatacaaaaatcagctaggtttggaggtgtatgcctatagtcccagcttctcaggaggcagtgggaggatggcttgagcctgggagggggagtttgcagtgagctgagatcatgccactgcagtccagcctgagcggcagagtgagaccatgtctcaaaataaattaattaattaaattaaagtaatagtccccattcttgagactcttaattctagctcgggagctagaccatgtattccttagtgagaaacagtttaaaaataaaacaagaatataatccctgaatatctgagaactcaggcataatcttaacagtagtttattgtgaaagactttatgattatttttacctgtttttatcctgtagtaggaaggtcagcttctcatttagattctgaaggctattggtattaattgtctggaattgtcttagatcttccttgtgtcgtgttttcccagaaagagctgggaacctttgctcaaagctccatcgcccttcaccatcagtacaaccccaagtttcagaccctgttccaaccctgtaacttgatgggagctatgcagctgattgaagacttcagcacacatgtcagcattgactgcagccctcataaaactgtcaagaagactggtaggagacagatgtgtcagctttaagtttttacttgcggtgagaggtggtgggaatcttatcccatagataacttcctaggatacttgcctaggaatggaggacacaggacatttgtaatttcttccttctctcttttatcctccctttgtactcattatccaagttctagaattacatgataatctccgggcctgggtaaggcatggaggcagtggacagtataggaatatgggaggtagagatctgaggctcagtgctaagaattggactacagcaatatgaggggtaagtattaggaatcagatcaagataaactggggcctggtaaagatgaaagtcaggtggtaaagttcggtcatgtttagctttttattctcttcattaagatcaactaactttatttaccataatgattgtagcataggtgatatctccattctgaatgaaatgttgacttgcaagttaggcgtaaattagagattgtacatttgccgtgttcagtattttaaagaaatttgccggtttagattctaccttgcattggtttagtattttttgagaaaatatttgctatttacttaagccaaatatttacttctgatttgtttgctgacttagcaaattagttgtggtttgttctggatttgggtttgtctttggattctattttaaatccctaagtcttatcattacattgaatgtagttgaatttaagtgtactatatcatagacacagatcccaaactactttaatagctatattatatgaaatggtaatgaaaacgtgatttaataccaaattatagtattatcttacacatctagtgtcctgtgtttttcttctggagatataaaaatgacacttatggaaggagaaatatggatatagtagttttgtctctagaaatgcagaggtgcctaaaattgagaggctgagagagggagacagaaatgaatgagactgaattgtctcattccttttatggttcttttgttcccaacctcaggaggaatctgggagaacttaatgaaagttaagaaagaatgaaataaaagtaaaatttggaataccaggtttgtgagggagattaaagaagttggaatcttttttcttttttttttttttaagatggagtctcgctctgtcacctaggctggagtgcagtggggtgatctcggctcactgcaacctccgcctcccaggttcaaacaattctcctgcctcagcctcccaagtagctggaattacaggtgcgtgccaccatgcctggctaatttttacatttttggtagagatggggtttcactatgttggccaggctggtcttgaactcctgacctcaggtgatccacctgcctcggcctcccaaagtgctgggattacaggcgtgagccagcacgcctggcctggaatcttatcctggaagaaaaaagcattgttgaaggtctgttatccttcagagatttaaaggggaaaggaggtaaaacatttttgagcatacactatgtgacaggtattactaggtactttttaagtgtttgttttactttgtgaataaagtgttacacgtaagaaagagtaagagaggccgggcgccgtggcttacgcctgtaatccaacactttaggaggccgaggctgtcggatgacaaggtcaggagatcaagaccatcctgtctacagtgaaaccccgtctctactaaaaatacaaaaaatcagccaggcgtggtggcaggcgcctgtagtcccagctactcaggaggctgaggcaggagaatggcctgaacccgggaggcggagcttgcagtgagccaagattgcgccacgcactccagtctgggcgacagagccagactccgtctaaaaaaaaaaaaaaaaaaagtcaacttttattgccagtgaatgggactccctttagacctaatgttagttgaggaaagactgtggaaactctttggggagtggtaggcagatgggagggaatcaagttagataaggacagctctacctaaatgcaaaaatgcattcacaggctttttgaagccctcttttttcctagaagttgatttatcagagatttattttcttatagccaatgaatttccctgtttgccaaagcaagtggcttggatcctggccacaagcaaggttttcatgtatccagagttacttccagtgtgttccctgaaggcaaagaatccccaggataagatcctcttcaccaaggctgaggacaagtaagtgtttactctgggggatcaaatatcccaaggagaagatgtagttcctttgaggagtttaggggaagtaagacttgtataataagacatggacacaaaaggaaaagcagtatagatgagcagagtcctctagaacgtgcttgttctagcagtgccaaatactgctttttggggggatgttacacacatttttaaaatgttttagactggacatggcggctcccacctgtaatcccagcactttgaaaggccaaggcaggaggttggcttttctaatgttattatttatttagagacaggatcttactctgtcacccaggctggagtacagtgttgcaatcacagctcactgcagccttgaactcctgggatcaagtgatcctcctgcctcagcctccatggagtagctgggaccacaagcgtgtgccaccatacatggctgattttttttgtacaggtgagggtatctctgtgttgcccaggctgctcttgaattcctgacctcaaatgatcctcccactcctggcctcccaaagtgctgggactataggcataagccaccacacccagctagattatgaacatttttatggccctttgtgtgtattgccacactgttaacagcaaatatgtatatatgtaaccatgattatatatgttatgttagagggtagtattggtgccagtttaatttgtctgacggggtacctattattcattttatatttgttttattagaatcattctccttcccatgtattctctttgaacttcctttgtgttgttaatatacagctcatcatgatctgacatttattgatgatttatgactagtttctcttgctcctacttaattgtgaactatttgattcttattcatagtacttaatcactactcactaaatacctgaaattttctactgagtagtcaccaacttgtagtagtcactacaagaattagttgtagaaaaagtagattggccagccatggtggctcacacctgtaatgacgacactttgggaggccgaggcaggaggatcacttgaggccagaagttcaagatcagcctaggcaacaaagtgagaactggtctctacaaataatgaaataaaacattagttaggcatggtagcaaacgtttatagccacagatactcaggaggctgaagtgcgggaatcgattgaacccaggcattcaagactgcagtgcactgtaatcatgccactgctctccagcctggacaacagagcaaaaccctgtctgaaaaaaatgaaaaagtagattgggccacacgccatgggctcatgcctgtaatctcagcactttgggaggctgagactggagaatcgcttcagcttaggaagtagcagctgcagtgggctgcgatcacgccactgcactccagcccaggtgacagagtgagaccttgttttaagaacaagtaagaaaaagtagattgtaaaatgtgttagtctggggaggccctttagaaggaaggactgtgaagtgagatttagtgttattgctcctttctcagtttgttagctttaggactgaagcattttgaagggactgagtttcttaaccctctaatcagcaagtaccttctaacctgcaagactgcccgccaactgacagtgagaatcaagaacctcaacatgaacagagctcctgacaacatcattaaagtgagtgtttcctgcatgcactatccaggcacctcaccaacacatatctgttcttttctcttgttattctcaaagaaaagaagaaccttcttttatctaaagctaatttctcctacttatatactagattaattcccctgttgccttttcagggacattgattcattcattacgttcctctggagtatcttcatcctcttaaaagattccacaaatccatgtttccctgtaataattctctttcttgaactttctagaaatgatatgcagtattccacttacatgctttgggtttttgttttgttttgtttttttggtcagacataatcttgcactgtcacccaggctggagtgcaggagtatagtggcatgatcttggctcactgcagcttccgcctcccgggttcaagtgattctcctgcctcagcctcccaaatagctgagattacaggcgtgcccaccacgctcagctaattttttgtatttttagtagatacgggtttcaccatgttggccaggctggtcttgaacttctgacctcaagtgatccaccagttttggcttcccagaggctaggattgcaggcataagccaccgtgcccagcctatatactttttctcaattttgtgtttgtatgtatgcatgtatgtgtgtgtgtgtgtgtgtgtgtgtttgtgtgtgtctgtgtctgtatgtatgtatgtatgtatgtatgtatgtattgagatggagtttcgctcttgtcgcccaggcccagcctatatactttttctcaactctttttacttattgattgattgattgagatggagtctcgctcttgacccccaggctggagtgcaatggtgcgatcttggctgactgcaacctctgcctcctgggttcaagtgattctcctgcctcagcctcccttgtagctgggattacaggcccctgccaccatgcccagctgatttttgtatttagtagagtcggggtttcaccatgttggccaggctggtctcgaactcctgacctcaggtgatccatctgcctcggcctccctaagtgctgggattacaaatgtgagccattgcccccagccttcttttttatttagatatttatttatgtttttttttttttttagagacaggttctcactctgtcatcctggctggagtgcatgggcacaatcataggtcactgcaacctcaaattcctgggtgatccttccacttcagccttccaagtagcttggactacaggtgcatgccaccaaggctagccgattattttattttgtgtgaagacagggtgtcattttgtttcccaggctggtcttgaagtcctgacctcaagcagtcctcttgcctcagctcggcctcccagagtgttgggattacaggcgtgagccatgatgcccagcctttggtttcattgtgtttttgtatttttcttgagacaaggtcttactctcctgcctaggctggagtacagtggtatagtcatagctcactgcagccttgaactcctaggctcaagcattcttccaacgtcagcctcccaaggagctgggattatatgcattagccactgtgcttggccattaaatttatttatttatttattttattttatttttttgagacagaatctgtctctgtcacccaggctggagtgcagtggcacaattttagctcactgcaacctccacctaccgggttcaagcaattttcatgccttagcctcctaagtagctgggactacaggcatgcgccaccacacctggctaatttttatatttttagtagaaacataatttcaccatgttggtcagtctgatcttgaactcctgatctcaggtgatctgcccacctcggcctcccaaagtgctggaattataggcgtgagcctctgtgcctggcaaaaaactttttttttttagggatggggtgtccctatattgcccaggctggtcttcaatttttggccttaggcaattctcctgtctcagcctctaattggtactgcctggtgtattggatttaggccttacttattaaccataaaccacggaagccgaagatttacctctctcctcactcccttactcccaccacaaacatgcacattttctgctctccaaactcctcactagtagttatggtagaattttggttagattgtattcagggtttacattgtaagattttaaggactgttggctgggcgcggtggctcacgcctgtaatcccagcactttgggaggccaaggcaggtggataacgaggtcaggaaatcgagaccatcctggctaacatggtgaaaccccagctctactaaaaatacaaaaaactggctgggcgtggtggcgggcgcctgtagtcccagctactcgggaggctgaggcaggagaatggtgtgaacccgggaggtggagcttgcagtgagccgagatcgcgccactgcactccagtcttgccagagcaagactccgtctcaaaaaaaaaaaatagattttaaggactgtataaatgctcttcacagctcagctatgttactgtgttaccttgcctttcctgctgaacattttgtttcccagatcatcttctttcagtgtgttcaggtattctagatattctgtcactttcatcttgaagaaattgctccctgagccctctgacattattccactttaagcgtgttgctctccatgttgctgcactgatgtcttcttgggctttttcttcaccatcatcccaggaattccttttgcctcatactgtgttagatcctcttatttcctgaattccacatctttgcttttgcattactttttttttttttttttttttttttgagacacagagtcttgctctgtcccccaggctggatctcggctcactgcaacctgcaaccttggtcttggtcttgaactcctgacctcaggggatccacccacctcagcctcccagagtgcggggattacaggcgtgagacaccacgcctggccttgttttttgttttgttttgcttttttttgagaccgagtctcgctttgttgcccaggctggagtccaaaggcgcgatgatcttggctcactgcaacgtccgcctcccgggttcaagcaattctcctgcctcagcctcccgagtagctgggattataggcacatgccactacgcctggctaattttttgtatttttagtagagacagggtttcaccatgttagccaggatggttttgatctcctgacctcttgatccacccgtttcggtctcccaaagtgctgggattacaggcgtgagtattacttctttactttagtggaacacattctagtagcttttttttaaaaaaaatttttttctgaattttaaaaaattgaggtgggggggtctcagttttttgcccaggctggtctcagactcctgggttcaagtgatcctcctgcttcagcatcccaaagtgctgagattataggcatgagccaccctgcatggccccattccagtagcatcctgagggagagtgcttgggaagggaattttcacatttaaaccatctccggggccgggcgcagtggctcacgcctgtaatcccagcactttgggaggctgaggcgggtggatcacgaggtcgggaaatcgagaccatcctggctaatgtggtgaaaccccgtctctactaaaagtacaaaaaaattagccgggtgtggtggcgggcgtctgtagtcccaggtactctggaggctgaggcaggagaatggcgtgaacctgggaggtggagcttgcagtgagccgagatctcgccactacactccagcctgggtgacagagcgagactccgtattaaaaaaaaaaaaaaaaaaatctccattcatggtcttttgattgtatcgatgtcagtttcctcgtttttgtttttgttttattttttttctttttttgagacagagtctcactgttgctcactgcagcctctgcctcctgggttcaagcgattctcctgcctcagcctcctgagtagctgggattagccaccacacccagctaatttttgtatttttagtagagatggggttttgccatgttggccaggtgatctcgaacccctgacctcaagtgatctgcccaccttggcctcccatagtgctgggattacaggcatgagccaccacatcctccatgtctggccagtttcctggtagtaatattgtactgtgtaccttgtttatatgtatagctcttgtttctatgtaacataaaaacattatattgggagaaactggttgaagggtacatgggacctcttggtactattttttgcaatttcctatgaatataattatttcaaaataaaaggaaaaaataatactctcctctgtcactgtatctagaattctagataggaaataatttttttaagaagcttttaagggcctcacttcattttcttctaactcctagtgtggtgttaagaaatttcatgccatttaactttttttttttttttccgagacagggtcccaccctgttgcccagtttggagcgtggctaaatcatggctcactggtgtctccaacccggtgtgcaccactatgcccagctaattttttttttttttttttttaagacatggtctcgttatgttggccaggctggtctcaaactcctggcctcaagtgctcgtcctgtcttggcctcccaaagtaatgggattataggcatgagccatggccccatttaactcttgagtctttgtgtaacacctgtttttctcaacctctgacagcatgcaggatttttcctttggcttcaatattttgaaaatgcatgataatatgccttagtatttgtctatttttatccatggttttttaaaaagtactttctttttgtttttgtttgtttgtttgttttgagacagagtctcgctccattgcccaggctggagtgcaatggcgtgatcttggctcactggaacctctgcctcccaggttcaagcaattgtcctgtttcagcgtcccgaggagctgggactacaggcgctcaccaccacaccctgctaatttttgtatttttagtagagacggggtttcaccttgttggtcaggctggtctcaaactcctgacctcgtgacccacccacctcagcctcccagagtgctgggattacaggtgtgggccaccatgcctggcgtatccatggttttaaggcacacgtgataaaccttattcttctgcagaaataatttttttttttttttttgagatggagtctcactctgttgccaggctggagtgcagtggcgtgatgtcggcccactgcactctccacctcctgggttcaagtgattctcgtgcctcagcctcccgagtagctgagattacaggcacgcgccaccacacttagctaatttttgtatttttagtagagatggggtttcaccatgttggccaggatggtcttgatctcctgaccttgtgatctgcctgcctcggcctcccaaagtgctgggattacaggcataagccaccacgcctggccagaagtaatttgtgtttaagttttagttttgtgtcatttttcgtgcacacctttgtacttttgttgggggatggggcggggtgtcggggttggagtcttgctctgttgcccaggctggagtgcagtggtgcagtcttggctcactgcaacctcttaattcctcagttcaagtgattctcctgcctcagcctgccaagtagctaggatcacaggcgtgcaccaccacacccagctaatttttttttgtactttattagagacagggtttcgccatgttggccaggctggtcatgaactcctgacctccagtgatccatcctcctcgttctcccaaagtgctggcattacaggcatgagccaccatgcccagccctttgtacattttttaatgtaggatgccatttgtccacttgactctcccactagtctgtaagctccatgagagcaggaattgcttcccttatgtgtgtgcttagcttttagcacagtgcctaggatatagaaaacatcttatgttcatcatgttggatgaacagatgcttattgtcatggtttaagttcagttcttatcttctttttttttttttgagatggagtctcaccctgttaccaacgctggagtgcagtggcatgatcttggctcactgcaatctccaccctaccacccccactgccaggttcaagcgattcttttgccccagcctcccaagtaactgggattacaggcacccaccaccacacccagctaatttttgtatttttagtagagatggagtttcaccatgttggccaggctggtctcaaactctcaatctcaagtgatctgcccgcctcagcctcacaaagtgctgggtttacagatgtgagccaccaaggccagcctatttactcttaaaactgaactgcctcggtctttttttttttccttcccttctgatgcccttcacaccatcatttgcttaaagtctttgatgtgtccattttatagattacgatgctgtctttgcagctgttgagcaggaacaaatcttacataagattgctcttagcatctgcttccttttctctctgtgacctaaactctccccttcctggcaaccagaatggagatcatcagttagaaaatattgaatagggctgggcgcggtggctgacgcctgtaatcctagcactttgggaggccgaggcgggtggatcacgaggtcaggagatcgagaccatcctggctaacacagtgaaaccctgtctctactaaaaatacaaaaaaatcagccgggtgtggtggcgggcacctgtagtcccagctactccggaggctgaggcaggagaatggcgtgaacctgggaggtggagcttgcagtgagcggagatcgcgccattgcactccatcctgggcgacagagcaagactccgtctcaaaaagaaaatactgaataactataaaatctttaaatagagattagtttaatttgaaatgtacaagtattcagcatatgctattcgtatatgtgtgttcatggatgtttgtgtatgtggtcttgtgtgtgtgtgtgtgtgtgtgtgtgtgtgtgtgtttctcttgatccaccaccaccccattcaccagcctgacagaagacagtgtttccagaaggaatgtaattcatgcgcatttttttcatgttaagttttataagaagaccaaacagctgccagtcctaggaaaatgctgtgaagagatccagccacatcagtggaagccacctatagagagagaagaacaccggctcccattctggttaaaggtacagccctcttcctcgaagtctgtaggaggcagaaggtcactgaaagttctgagagaatatcaaggacttccttaatcgtctaatgctttagttgtagaactaggacttcaggaatcttcctgattcacctttcttcccttacttttctgcccttctccgggtgattctacaacattttcaaaataatgggtaaaatggtaatttgctaaaggaaattcagagaagagtttctaaagtgtataattggactgtggtctttgtagaaatttcatatgcagagtcccttggaaagatgccttgagcttgtctcaggtccctaaacttagaaagtcctattctttttcccaaattctgacatgtgctggatcagagtgttctcatttccaataggccagtctgccatccatccaggaagaactgcggcacatggctgatggtgctagagaggtaggaaatatgactggaaccactgagatcaactcagatcaaggcctagaaaaagacaactcagagttggggagtgaaactcggtacccactgctattgcctaagggtgtagtcctg

SEQ ID NO: 15025 - DNA, 863 bp, Homo sapiens
tccaccttcttgccacctgcaaccccaatctcaatccggaggccagtagcaccaggatatgtcttaaagagctgggaacctttgctcaaagctccatcgcccttcaccatcagtacaaccccaagtttcagaccctgttccaaccctgtaacttgatgggagctatgcagctgattgaagacttcagcacacatgtcagcattgactgcagccctcataaaactgtcaagaagactggtaggagacagatgtgtcagctttaagtttttacttgcgccaatgaatttccctgtttgccaaagcaagtggcttggatcctggccacaagcaaggttttcatgtatccagagttacttccagtgtgttccctgaaggcaaagaatccccaggataagatcctcttcaccaaggctgaggacaatttgttagctttaggactgaagcattttgaagggactgagtttcttaaccctctaatcagcaagtaccttctaacctgcaagactgcccgccaactgacagtgagaatcaagaacctcaacatgaacagagctcctgacaacatcattaaattttataagaagaccaaacagctgccagtcctaggaaaatgctgtgaagagatccagccacatcagtggaagccacctatagagagagaagaacaccggctcccattctggttaaaggccagtctgccatccatccaggaagaactgcggcacatggctgatggtgctagagaggtaggaaatatgactggaaccactgagatcaactcagatcaaggcctagaaaaagacaactcagagttggggagtgaaactcggtacccactgctattgcctaagggtgtagtcctg

SEQ ID NO: 15026 - DNA, 19597 bp, Homo sapiens
ctgtttgaaactgtgagtaatgatcctcaagtgagaacatgggattgtaagttggttctccaacaaaatgtgtcctttgatctctgtgatgctccttctagaagagggactgaaccaattctccttttagtctacctgggaaagaatataatgacaaaagaaatttgctaactgctagactcttgattatccacatgtaggttattcttactaaaattttccttgaagctttttttttttttttttgaggcaaagtcttgctctgtcacccaggctctggagaatacagtggtgaaatctcagctcacagcagcctcgacctccagggctcaaaacaattctctcatctaagcctcctgagtagctgggactacaggcacacacctacaggcccggctaattattttatttttttgtagagacagggtcttgccatgttctggaactcataggctcaagtaatcttcctgcctcaacctcccaaagtgctggaattacaggtgtgagccagcacatcttgccccttgaaaacttttgatggcttcccctactgtcatttggtgtgtccttaaagattgccaactagttttaaagtattttgcacacaaataattaccttttccataaatttgtctaaaaagatatttctgtttaagaaattgatcattttgagttatcctagctctgtgcttactgatacaagttgactggttgagcaacttctttcctggcataatagtcattccatatgtgggtttgtaggagtcctgaagtgagaaaggttctgatgtaggctctttctgggtgccagcattattaaagtattgtttatagttttcacttttccttcccaacactggagcaacattcaaaagcccattccccaggaaaaccctccctttcctttgcccacagttccaagatgagatgggattctccaacatggaagatgatggcccagaagaggaggagcgtgtggctgagcctcaagctaactttaacacccctcaagctctacggtaggctagttgaagaccttgagatttggaatagaggaagagtttatttctgaaaaggttttcagaagttgcagttaacaatttttcatccccagccagcttctgttactgatgtaaggatgcagagtcctgtcaggagttaggtgtcaagtgaagtctccttgttatggggcagtgcagctgtaggccaagctgtatctgtttgggaagggagaaaaaacagtagctggcatccatatccacttctccgggtgagtggtgctggagaggtatgtaggactcaatgtggccagccacacaaactaccctatattgtaatatccagtctgtcccttttgttctttttatgtgccattaatatctgctaaatgtgactgaaaatttgttagtcacctaggcattagtggagcaaaccctgaagcacctgcagtaaggagtctgaaacatacgtgctgacctttttgcctaaagttggcacttgtgttacagcatccagaaagtagaggctttaattttttcctcattttgtggtggatttgcatctgcactttattctgttgtagcagcatataatcattaggtcgatggcgagaggtcaggatgcagtttgtgccataagtggaacaaagcaaagagaatagtccctgtaattagtcctgtgtttgaacttaacagcactactaagcagagagcttgggttccatctgaaagctagacctttagggattttccaatttagtgaaaaaagataagataggccaaccaatgtcttaaaaactagaactactagtcattctccattacaacaaatatcacaatacaactacatcaaaaatctcaagattgctaagtcagtatttgacccattattttaatttatagttcatagaacaaaattctggtatagcagaatggaaccattcatcctgggaacgtataataggatctgattaataaatattttggttttgctgatcaactctttataacttcttaaaatttggaaaatatagaactaatttaaaattcctgttagaatccagttaccttctggtattcaatggaatatagtcatatatcatctcatggtcataccctctgtgaaatctatcattaaacgattcatcattgtgtaaacatcgtagaatgtacttacataaacctaaatggtttagcctactgcatacctattgctcccaggctacaaaacctgtacagtgtgttactgtactgtactgaatactgtaggcagttgtaacacaatggtaagtacatatgtatgtaaacatagaaaaggtacagtaatcttatggagccacctctgactatgtggttcgttattgactgaaacattctgtggcgcatgactgtacttgggcagcttctgcttctctttcgattgcaaatacaaacctgtttttgttttaatctttgactaaataaaaatccctctgtaagtccatagagagtaagcacatcttaaaacacaataaggaagagagaggagaaaaagacagtcaaaacaaaaactctggggcttcccttatcaattacctaaataatccttgttaaaactaagtgcaggctatgtttccattttctacttttttatgcttcttctcttctgttccttcagtggtggtagcgcggatgttcaaattttcagttctcagtaaagattgtatagacagtcccacggtcttcaggtttttactctgtgctacccaaacctacagtaaatactataaaagaaaacttattcaaacgtaatctttatctgcaaaaactattgaaaaacgttaccatttaactattgctgtaatatagggggttccttgaaatatgataacctgcttgttatagctacttcagcagatcttatcctgttgcatagggtatcagcatatgcttaatcatttaggtatattattctccctttatttctttctatgtaaacatagaaaaggtatagtaatcatacatagaactgacatgctaggtattggaatttttgcttcagccctgcaaacaatctttcaggagggtatggatgggaagttagggttaggaaccttggaagaggaatttaaagggctaaaagaagatagccttcatggataatattttaactaacttctccgttctgttcatttgaactaccatgtacttcagttattttggtatatccttttcctgcttcatgctagaaagtctttgacttgttaagaaagcagggcagtgcagcctgagtagataggataatgggacaagctggacctgggatgggagtaacatcccagggagtaacaagtaatgagagaagaaatgagaatgatgagttcccaccagctccttggctgctttcttacccatatatttctctgtccctagttttttgtttaattttttcttcatttgtatattatttggaagaggaattgtagaggaatgggatggggtgtaatacagaatcatttgatgcatgctaactactttgggaaaagatttgtgtaaggctgggagtttgactgttggctaaagtgaaaaggggggattagtagggaatgaaaattgttcaggctctttgctcatcattgcaaagaattggatgtgttgtggacctaggaaaacactcaaattcagtcatccccgtttgggataggtttgaggaactactggccaacctactaaatgaacaacatcagatagcgaaggaactatttgaacagctgaagatgaagaaaccttcagccaaacagcagaaggaggtagagaaggttaaaccccagtgtaaggaagttcatcagaccctgattctggacccagcacaaaggaagagactccagcagcagatgcagcaggtaacactttccttggtcatattaatattgaattataccaaggcctaactctgaggctttggtataatctaaaattagcagctttgtaaatgtcagagatagttaccttactacgtattaaaaccgtagtatcttcacatcagttaggagcttgagaagtcatcatgttcatgtcctgtggctcagggaagacagcacataaggaccctaatggtattcggaattacagatttcaaagagtcctcagtaatctattctgaaatttaaccttcactgtgacaagtagttttttttcccttttcccttttcttttttcttttttttttgagacgtagtctcgctctgtcacccaggctggagtgcagtggctcaatctcagctcactgcaagctctgcctcccgggttcacgccattctcctgcctcagcctcccgagtagctgtgactacagggactcgccaccacacccagctaattttttgtatttttagtagagacagggttcactgtgttagccaggatggtctcgatctcctaacctcgtgatccacccgcctcggcctcccagagtgctgggattacacgcgtgagtcactgcgcccggccttttccttttctaatctcagttcctcctctgtttagaggttaaacttcctctggttctgtcattttgttcaagggaacatgtctgagaaatttatgccaagatcctacgttgttctcacactctttgcagaaagcaaaatttgtgtcataaagttgcaaacatcttagttaatgactctctggtggctgggtgcagtggctcacacatgtaatcccagcactttgggaggctgaggtgggaggattgcttgagcaggggagttcaaaagcagcctggacaacatagtgagactctgtctctacaaaaaataaaaataaggctgggcacagtggctcacacctgtaatcccagcactttgggaggccaaggcgggtgaatcatgaggtcaggagtttgaggcaagcctggccaacatggtgaaaccccgtctctacgaaaacaaaaaattagctgggtgtggcggcgggcacctgtaatcccagctactcgggaggttgaggcaagagaatcacttgaacctgggaggcagaggttacagtgagccgagatcacgccattgcactccagcccaaaagtcagtgcgagactctgtctaaaaataataataataataataataaaataaattagccaggcattgtggtcacagctacttgggaggctgaggtgggaagattgcttgagcacaggtggttgagagggcattgagtcatggttgcaccactgcactccaagctgtgtgacagagcaagaccctgtctccagggggaaaaaaaaatatctctgggctcctgaaatggcagtgtcataacatatcactgcattattttctttctctccccagcatgttcagctcttgacacaaatccaccttcttgccacctgcaaccccaatctcaatccggaggccagtagcaccaggatatgtcttgtaagtttccaaattgccgtaattctatagactagaatataaaattagcttggcaggttatttctcacagttattctctcaggtatttttgattgctgtggcttcctatgtttgctgagtgaacataagccactgattcacatgaaaggacaaagagtgtattcaattttttcttttcttttttgagacagggtcttgctctttcacccaggatggagtgcggtggaacaatttcagttcactgcaacccctgcctcccgggttcaagtgattctcctgcctcagcctcccaagtagctgggactacaggcgggcaccaccacgggtaattttttttgtatttttagtagagacagggttttgccatgttggccaggctggtctcgaattcctgacttcaagtgatctgcccacctctacctcccaaagtactgggattacagccatgagccactgcgcctggcctgtccttctgatatttttattgggtcctcctcctcatctttagattcaccctgacttcttaggtttttggtaccgctattcatttcatagatgttgaggctgggcatagtggctcacacctgtaattccagcactttgggaggctgaggtgataggatcacttgagcccagtggtcaagaacagcctgggcaacatagtaagacccggtctgtgttttttttgttttgttttgttttaatttaaataatgaagtaaatatacatgtagatgttgaattcattatccattcatgaagctcaatattagtgttttatgtgtagagctagttttgctcatgacgttttgaggtattttgagctttttttttttttttttttttttttgagacggagtctcgctctgtcgcccaggctggagtgcagtggcgggatctcggctcactgcaagctccgcctcccgggttcacgccattctcttgcctcagcctcccaagtagctgggactacaggcacccgccactatgcccggctaattttttgtatttttagtagagacggggtttcaccgttttagccgggatggtctcgatctcctgacctcgtgatccgcccacctcggcctcccaaagtgctgggattacaggcgtgagccaccgcgcccggcctattttgagattttaaatttgaaatttggccaggtatggtggctcatgcctgtagtcccagcactttggtaggtcaaggtgggaggattgcttgagcccaggagtttgagaccagcctgggcaacatagtaagaccccatccctaccaaaaaaataaaaaataaaaaaattagctggggatggtgccgagtgcctgtagtcccagcaacttgggagactgaggtaggaggatcacttgagcctgggacgttgagactgtagggagccgtgcttatatatcactccagcctgggtgacagagtgagaacctgtctcacaaaaacaaaaccatactttacctcataaaaattgcctcaaacttttggacaggtaatgataatactctcagcttcttcagtaagtcttctttggattttgaagagtacatttgctagtattctaaaacttccttggtgatcaacaggatgtcttcatctcttactgtattcagaggaggatgaggagtacttggttgtaggcattattctgagaccaaaagacaaaacaattttaaaagtaatggtcctggtcgggtgaggtgactcatccctgtaatcccagcactatgagaggccgaggcaggcggattgtgagcccaggagttcgagatcagcctggccaagatgggaaaacgctgtctctgcaaaaaatacaaaaatcagctaggtttggaggtgtatgcctatagtcccagcttctcaggaggcagtgggaggatggcttgagcctgggagggggagtttgcagtgagctgagatcatgccactgcagtccagcctgagcggcagagtgagaccatgtctcaaaataaattaattaattaaattaaagtaatagtccccattcttgagactcttaattctagctcgggagctagaccatgtattccttagtgagaaacagtttaaaaataaaacaagaatataatccctgaatatctgagaactcaggcataatcttaacagtagtttattgtgaaagactttatgattatttttacctgtttttatcctgtagtaggaaggtcagcttctcatttagattctgaaggctattggtattaattgtctggaattgtcttagatcttccttgtgtcgtgttttcccagaaagagctgggaacctttgctcaaagctccatcgcccttcaccatcagtacaaccccaagtttcagaccctgttccaaccctgtaacttgatgggagctatgcagctgattgaagacttcagcacacatgtcagcattgactgcagccctcataaaactgtcaagaagactggtaggagacagatgtgtcagctttaagtttttacttgcggtgagaggtggtgggaatcttatcccatagataacttcctaggatacttgcctaggaatggaggacacaggacatttgtaatttcttccttctctcttttatcctccctttgtactcattatccaagttctagaattacatgataatctccgggcctgggtaaggcatggaggcagtggacagtataggaatatgggaggtagagatctgaggctcagtgctaagaattggactacagcaatatgaggggtaagtattaggaatcagatcaagataaactggggcctggtaaagatgaaagtcaggtggtaaagttcggtcatgtttagctttttattctcttcattaagatcaactaactttatttaccataatgattgtagcataggtgatatctccattctgaatgaaatgttgacttgcaagttaggcgtaaattagagattgtacatttgccgtgttcagtattttaaagaaatttgccggtttagattctaccttgcattggtttagtattttttgagaaaatatttgctatttacttaagccaaatatttacttctgatttgtttgctgacttagcaaattagttgtggtttgttctggatttgggtttgtctttggattctattttaaatccctaagtcttatcattacattgaatgtagttgaatttaagtgtactatatcatagacacagatcccaaactactttaatagctatattatatgaaatggtaatgaaaacgtgatttaataccaaattatagtattatcttacacatctagtgtcctgtgtttttcttctggagatataaaaatgacacttatggaaggagaaatatggatatagtagttttgtctctagaaatgcagaggtgcctaaaattgagaggctgagagagggagacagaaatgaatgagactgaattgtctcattccttttatggttcttttgttcccaacctcaggaggaatctgggagaacttaatgaaagttaagaaagaatgaaataaaagtaaaatttggaataccaggtttgtgagggagattaaagaagttggaatcttttttcttttttttttttttaagatggagtctcgctctgtcacctaggctggagtgcagtggggtgatctcggctcactgcaacctccgcctcccaggttcaaacaattctcctgcctcagcctcccaagtagctggaattacaggtgcgtgccaccatgcctggctaatttttacatttttggtagagatggggtttcactatgttggccaggctggtcttgaactcctgacctcaggtgatccacctgcctcggcctcccaaagtgctgggattacaggcgtgagccagcacgcctggcctggaatcttatcctggaagaaaaaagcattgttgaaggtctgttatccttcagagatttaaaggggaaaggaggtaaaacatttttgagcatacactatgtgacaggtattactaggtactttttaagtgtttgttttactttgtgaataaagtgttacacgtaagaaagagtaagagaggccgggcgccgtggcttacgcctgtaatccaacactttaggaggccgaggctgtcggatgacaaggtcaggagatcaagaccatcctgtctacagtgaaaccccgtctctactaaaaatacaaaaaatcagccaggcgtggtggcaggcgcctgtagtcccagctactcaggaggctgaggcaggagaatggcctgaacccgggaggcggagcttgcagtgagccaagattgcgccacgcactccagtctgggcgacagagccagactccgtctaaaaaaaaaaaaaaaaaaagtcaacttttattgccagtgaatgggactccctttagacctaatgttagttgaggaaagactgtggaaactctttggggagtggtaggcagatgggagggaatcaagttagataaggacagctctacctaaatgcaaaaatgcattcacaggctttttgaagccctcttttttcctagaagttgatttatcagagatttattttcttatagccaatgaatttccctgtttgccaaagcaagtggcttggatcctggccacaagcaaggttttcatgtatccagagttacttccagtgtgttccctgaaggcaaagaatccccaggataagatcctcttcaccaaggctgaggacaagtaagtgtttactctgggggatcaaatatcccaaggagaagatgtagttcctttgaggagtttaggggaagtaagacttgtataataagacatggacacaaaaggaaaagcagtatagatgagcagagtcctctagaacgtgcttgttctagcagtgccaaatactgctttttggggggatgttacacacatttttaaaatgttttagactggacatggcggctcccacctgtaatcccagcactttgaaaggccaaggcaggaggttggcttttctaatgttattatttatttagagacaggatcttactctgtcacccaggctggagtacagtgttgcaatcacagctcactgcagccttgaactcctgggatcaagtgatcctcctgcctcagcctccatggagtagctgggaccacaagcgtgtgccaccatacatggctgattttttttgtacaggtgagggtatctctgtgttgcccaggctgctcttgaattcctgacctcaaatgatcctcccactcctggcctcccaaagtgctgggactataggcataagccaccacacccagctagattatgaacatttttatggccctttgtgtgtattgccacactgttaacagcaaatatgtatatatgtaaccatgattatatatgttatgttagagggtagtattggtgccagtttaatttgtctgacggggtacctattattcattttatatttgttttattagaatcattctccttcccatgtattctctttgaacttcctttgtgttgttaatatacagctcatcatgatctgacatttattgatgatttatgactagtttctcttgctcctacttaattgtgaactatttgattcttattcatagtacttaatcactactcactaaatacctgaaattttctactgagtagtcaccaacttgtagtagtcactacaagaattagttgtagaaaaagtagattggccagccatggtggctcacacctgtaatgacgacactttgggaggccgaggcaggaggatcacttgaggccagaagttcaagatcagcctaggcaacaaagtgagaactggtctctacaaataatgaaataaaacattagttaggcatggtagcaaacgtttatagccacagatactcaggaggctgaagtgcgggaatcgattgaacccaggcattcaagactgcagtgcactgtaatcatgccactgctctccagcctggacaacagagcaaaaccctgtctgaaaaaaatgaaaaagtagattgggccacacgccatgggctcatgcctgtaatctcagcactttgggaggctgagactggagaatcgcttcagcttaggaagtagcagctgcagtgggctgcgatcacgccactgcactccagcccaggtgacagagtgagaccttgttttaagaacaagtaagaaaaagtagattgtaaaatgtgttagtctggggaggccctttagaaggaaggactgtgaagtgagatttagtgttattgctcctttctcagtttgttagctttaggactgaagcattttgaagggactgagtttcttaaccctctaatcagcaagtaccttctaacctgcaagactgcccgccaactgacagtgagaatcaagaacctcaacatgaacagagctcctgacaacatcattaaagtgagtgtttcctgcatgcactatccaggcacctcaccaacacatatctgttcttttctcttgttattctcaaagaaaagaagaaccttcttttatctaaagctaatttctcctacttatatactagattaattcccctgttgccttttcagggacattgattcattcattacgttcctctggagtatcttcatcctcttaaaagattccacaaatccatgtttccctgtaataattctctttcttgaactttctagaaatgatatgcagtattccacttacatgctttgggtttttgttttgttttgtttttttggtcagacataatcttgcactgtcacccaggctggagtgcaggagtatagtggcatgatcttggctcactgcagcttccgcctcccgggttcaagtgattctcctgcctcagcctcccaaatagctgagattacaggcgtgcccaccacgctcagctaattttttgtatttttagtagatacgggtttcaccatgttggccaggctggtcttgaacttctgacctcaagtgatccaccagttttggcttcccagaggctaggattgcaggcataagccaccgtgcccagcctatatactttttctcaattttgtgtttgtatgtatgcatgtatgtgtgtgtgtgtgtgtgtgtgtgtttgtgtgtgtctgtgtctgtatgtatgtatgtatgtatgtatgtatgtattgagatggagtttcgctcttgtcgcccaggcccagcctatatactttttctcaactctttttacttattgattgattgattgagatggagtctcgctcttgacccccaggctggagtgcaatggtgcgatcttggctgactgcaacctctgcctcctgggttcaagtgattctcctgcctcagcctcccttgtagctgggattacaggcccctgccaccatgcccagctgatttttgtatttagtagagtcggggtttcaccatgttggccaggctggtctcgaactcctgacctcaggtgatccatctgcctcggcctccctaagtgctgggattacaaatgtgagccattgcccccagccttcttttttatttagatatttatttatgtttttttttttttttagagacaggttctcactctgtcatcctggctggagtgcatgggcacaatcataggtcactgcaacctcaaattcctgggtgatccttccacttcagccttccaagtagcttggactacaggtgcatgccaccaaggctagccgattattttattttgtgtgaagacagggtgtcattttgtttcccaggctggtcttgaagtcctgacctcaagcagtcctcttgcctcagctcggcctcccagagtgttgggattacaggcgtgagccatgatgcccagcctttggtttcattgtgtttttgtatttttcttgagacaaggtcttactctcctgcctaggctggagtacagtggtatagtcatagctcactgcagccttgaactcctaggctcaagcattcttccaacgtcagcctcccaaggagctgggattatatgcattagccactgtgcttggccattaaatttatttatttatttattttattttatttttttgagacagaatctgtctctgtcacccaggctggagtgcagtggcacaattttagctcactgcaacctccacctaccgggttcaagcaattttcatgccttagcctcctaagtagctgggactacaggcatgcgccaccacacctggctaatttttatatttttagtagaaacataatttcaccatgttggtcagtctgatcttgaactcctgatctcaggtgatctgcccacctcggcctcccaaagtgctggaattataggcgtgagcctctgtgcctggcaaaaaactttttttttttagggatggggtgtccctatattgcccaggctggtcttcaatttttggccttaggcaattctcctgtctcagcctctaattggtactgcctggtgtattggatttaggccttacttattaaccataaaccacggaagccgaagatttacctctctcctcactcccttactcccaccacaaacatgcacattttctgctctccaaactcctcactagtagttatggtagaattttggttagattgtattcagggtttacattgtaagattttaaggactgttggctgggcgcggtggctcacgcctgtaatcccagcactttgggaggccaaggcaggtggataacgaggtcaggaaatcgagaccatcctggctaacatggtgaaaccccagctctactaaaaatacaaaaaactggctgggcgtggtggcgggcgcctgtagtcccagctactcgggaggctgaggcaggagaatggtgtgaacccgggaggtggagcttgcagtgagccgagatcgcgccactgcactccagtcttgccagagcaagactccgtctcaaaaaaaaaaaatagattttaaggactgtataaatgctcttcacagctcagctatgttactgtgttaccttgcctttcctgctgaacattttgtttcccagatcatcttctttcagtgtgttcaggtattctagatattctgtcactttcatcttgaagaaattgctccctgagccctctgacattattccactttaagcgtgttgctctccatgttgctgcactgatgtcttcttgggctttttcttcaccatcatcccaggaattccttttgcctcatactgtgttagatcctcttatttcctgaattccacatctttgcttttgcattactttttttttttttttttttttttttgagacacagagtcttgctctgtcccccaggctggatctcggctcactgcaacctgcaaccttggtcttggtcttgaactcctgacctcaggggatccacccacctcagcctcccagagtgcggggattacaggcgtgagacaccacgcctggccttgttttttgttttgttttgcttttttttgagaccgagtctcgctttgttgcccaggctggagtccaaaggcgcgatgatcttggctcactgcaacgtccgcctcccgggttcaagcaattctcctgcctcagcctcccgagtagctgggattataggcacatgccactacgcctggctaattttttgtatttttagtagagacagggtttcaccatgttagccaggatggttttgatctcctgacctcttgatccacccgtttcggtctcccaaagtgctgggattacaggcgtgagtattacttctttactttagtggaacacattctagtagcttttttttaaaaaaaatttttttctgaattttaaaaaattgaggtgggggggtctcagttttttgcccaggctggtctcagactcctgggttcaagtgatcctcctgcttcagcatcccaaagtgctgagattataggcatgagccaccctgcatggccccattccagtagcatcctgagggagagtgcttgggaagggaattttcacatttaaaccatctccggggccgggcgcagtggctcacgcctgtaatcccagcactttgggaggctgaggcgggtggatcacgaggtcgggaaatcgagaccatcctggctaatgtggtgaaaccccgtctctactaaaagtacaaaaaaattagccgggtgtggtggcgggcgtctgtagtcccaggtactctggaggctgaggcaggagaatggcgtgaacctgggaggtggagcttgcagtgagccgagatctcgccactacactccagcctgggtgacagagcgagactccgtattaaaaaaaaaaaaaaaaaaatctccattcatggtcttttgattgtatcgatgtcagtttcctcgtttttgtttttgttttattttttttctttttttgagacagagtctcactgttgctcactgcagcctctgcctcctgggttcaagcgattctcctgcctcagcctcctgagtagctgggattagccaccacacccagctaatttttgtatttttagtagagatggggttttgccatgttggccaggtgatctcgaacccctgacctcaagtgatctgcccaccttggcctcccatagtgctgggattacaggcatgagccaccacatcctccatgtctggccagtttcctggtagtaatattgtactgtgtaccttgtttatatgtatagctcttgtttctatgtaacataaaaacattatattgggagaaactggttgaagggtacatgggacctcttggtactattttttgcaatttcctatgaatataattatttcaaaataaaaggaaaaaataatactctcctctgtcactgtatctagaattctagataggaaataatttttttaagaagcttttaagggcctcacttcattttcttctaactcctagtgtggtgttaagaaatttcatgccatttaactttttttttttttttccgagacagggtcccaccctgttgcccagtttggagcgtggctaaatcatggctcactggtgtctccaacccggtgtgcaccactatgcccagctaattttttttttttttttttttaagacatggtctcgttatgttggccaggctggtctcaaactcctggcctcaagtgctcgtcctgtcttggcctcccaaagtaatgggattataggcatgagccatggccccatttaactcttgagtctttgtgtaacacctgtttttctcaacctctgacagcatgcaggatttttcctttggcttcaatattttgaaaatgcatgataatatgccttagtatttgtctatttttatccatggttttttaaaaagtactttctttttgtttttgtttgtttgtttgttttgagacagagtctcgctccattgcccaggctggagtgcaatggcgtgatcttggctcactggaacctctgcctcccaggttcaagcaattgtcctgtttcagcgtcccgaggagctgggactacaggcgctcaccaccacaccctgctaatttttgtatttttagtagagacggggtttcaccttgttggtcaggctggtctcaaactcctgacctcgtgacccacccacctcagcctcccagagtgctgggattacaggtgtgggccaccatgcctggcgtatccatggttttaaggcacacgtgataaaccttattcttctgcagaaataatttttttttttttttttgagatggagtctcactctgttgccaggctggagtgcagtggcgtgatgtcggcccactgcactctccacctcctgggttcaagtgattctcgtgcctcagcctcccgagtagctgagattacaggcacgcgccaccacacttagctaatttttgtatttttagtagagatggggtttcaccatgttggccaggatggtcttgatctcctgaccttgtgatctgcctgcctcggcctcccaaagtgctgggattacaggcataagccaccacgcctggccagaagtaatttgtgtttaagttttagttttgtgtcatttttcgtgcacacctttgtacttttgttgggggatggggcggggtgtcggggttggagtcttgctctgttgcccaggctggagtgcagtggtgcagtcttggctcactgcaacctcttaattcctcagttcaagtgattctcctgcctcagcctgccaagtagctaggatcacaggcgtgcaccaccacacccagctaatttttttttgtactttattagagacagggtttcgccatgttggccaggctggtcatgaactcctgacctccagtgatccatcctcctcgttctcccaaagtgctggcattacaggcatgagccaccatgcccagccctttgtacattttttaatgtaggatgccatttgtccacttgactctcccactagtctgtaagctccatgagagcaggaattgcttcccttatgtgtgtgcttagcttttagcacagtgcctaggatatagaaaacatcttatgttcatcatgttggatgaacagatgcttattgtcatggtttaagttcagttcttatcttctttttttttttttgagatggagtctcaccctgttaccaacgctggagtgcagtggcatgatcttggctcactgcaatctccaccctaccacccccactgccaggttcaagcgattcttttgccccagcctcccaagtaactgggattacaggcacccaccaccacacccagctaatttttgtatttttagtagagatggagtttcaccatgttggccaggctggtctcaaactctcaatctcaagtgatctgcccgcctcagcctcacaaagtgctgggtttacagatgtgagccaccaaggccagcctatttactcttaaaactgaactgcctcggtctttttttttttccttcccttctgatgcccttcacaccatcatttgcttaaagtctttgatgtgtccattttatagattacgatgctgtctttgcagctgttgagcaggaacaaatcttacataagattgctcttagcatctgcttccttttctctctgtgacctaaactctccccttcctggcaaccagaatggagatcatcagttagaaaatattgaatagggctgggcgcggtggctgacgcctgtaatcctagcactttgggaggccgaggcgggtggatcacgaggtcaggagatcgagaccatcctggctaacacagtgaaaccctgtctctactaaaaatacaaaaaaatcagccgggtgtggtggcgggcacctgtagtcccagctactccggaggctgaggcaggagaatggcgtgaacctgggaggtggagcttgcagtgagcggagatcgcgccattgcactccatcctgggcgacagagcaagactccgtctcaaaaagaaaatactgaataactataaaatctttaaatagagattagtttaatttgaaatgtacaagtattcagcatatgctattcgtatatgtgtgttcatggatgtttgtgtatgtggtcttgtgtgtgtgtgtgtgtgtgtgtgtgtgtgtgtgtttctcttgatccaccaccaccccattcaccagcctgacagaagacagtgtttccagaaggaatgtaattcatgcgcatttttttcatgttaagttttataagaagaccaaacagctgccagtcctaggaaaatgctgtgaagagatccagccacatcagtggaagccacctatagagagagaagaacaccggctcccattctggttaaaggtacagccctcttcctcgaagtctgtaggaggcagaaggtcactgaaagttctgagagaatatcaaggacttccttaatcgtctaatgctttagttgtagaactaggacttcaggaatcttcctgattcacctttcttcccttacttttctgcccttctccgggtgattctacaacattttcaaaataatgggtaaaatggtaatttgctaaaggaaattcagagaagagtttctaaagtgtataattggactgtggtctttgtagaaatttcatatgcagagtcccttggaaagatgccttgagcttgtctcaggtccctaaacttagaaagtcctattctttttcccaaattctgacatgtgctggatcagagtgttctcatttccaataggccagtctgccatccatccaggaagaactgcggcacatggctgatggtgctagagaggtaggaaatatgactggaaccactga

SEQ ID NO: 15027 - DNA, 958 bp, Homo sapiens
ctgtttgaaactttccaagatgagatgggattctccaacatggaagatgatggcccagaagaggaggagcgtgtggctgagcctcaagctaactttaacacccctcaagctctacggtttgaggaactactggccaacctactaaatgaacaacatcagatagcgaaggaactatttgaacagctgaagatgaagaaaccttcagccaaacagcagaaggaggtagagaaggttaaaccccagtgtaaggaagttcatcagaccctgattctggacccagcacaaaggaagagactccagcagcagatgcagcagcatgttcagctcttgacacaaatccaccttcttgccacctgcaaccccaatctcaatccggaggccagtagcaccaggatatgtcttaaagagctgggaacctttgctcaaagctccatcgcccttcaccatcagtacaaccccaagtttcagaccctgttccaaccctgtaacttgatgggagctatgcagctgattgaagacttcagcacacatgtcagcattgactgcagccctcataaaactgtcaagaagactggtaggagacagatgtgtcagctttaagtttttacttgcgccaatgaatttccctgtttgccaaagcaagtggcttggatcctggccacaagcaaggttttcatgtatccagagttacttccagtgtgttccctgaaggcaaagaatccccaggataagatcctcttcaccaaggctgaggacaattttataagaagaccaaacagctgccagtcctaggaaaatgctgtgaagagatccagccacatcagtggaagccacctatagagagagaagaacaccggctcccattctggttaaaggccagtctgccatccatccaggaagaactgcggcacatggctgatggtgctagagaggtaggaaatatgactggaaccactga

SEQ ID NO: 15028 - DNA, 8095 bp, Homo sapiens
aaaaggaagcaaatgagctgatggaagatctgtttgaaactgtgagtaatgatcctcaagtgagaacatgggattgtaagttggttctccaacaaaatgtgtcctttgatctctgtgatgctccttctagaagagggactgaaccaattctccttttagtctacctgggaaagaatataatgacaaaagaaatttgctaactgctagactcttgattatccacatgtaggttattcttactaaaattttccttgaagctttttttttttttttttgaggcaaagtcttgctctgtcacccaggctctggagaatacagtggtgaaatctcagctcacagcagcctcgacctccagggctcaaaacaattctctcatctaagcctcctgagtagctgggactacaggcacacacctacaggcccggctaattattttatttttttgtagagacagggtcttgccatgttctggaactcataggctcaagtaatcttcctgcctcaacctcccaaagtgctggaattacaggtgtgagccagcacatcttgccccttgaaaacttttgatggcttcccctactgtcatttggtgtgtccttaaagattgccaactagttttaaagtattttgcacacaaataattaccttttccataaatttgtctaaaaagatatttctgtttaagaaattgatcattttgagttatcctagctctgtgcttactgatacaagttgactggttgagcaacttctttcctggcataatagtcattccatatgtgggtttgtaggagtcctgaagtgagaaaggttctgatgtaggctctttctgggtgccagcattattaaagtattgtttatagttttcacttttccttcccaacactggagcaacattcaaaagcccattccccaggaaaaccctccctttcctttgcccacagttccaagatgagatgggattctccaacatggaagatgatggcccagaagaggaggagcgtgtggctgagcctcaagctaactttaacacccctcaagctctacggtaggctagttgaagaccttgagatttggaatagaggaagagtttatttctgaaaaggttttcagaagttgcagttaacaatttttcatccccagccagcttctgttactgatgtaaggatgcagagtcctgtcaggagttaggtgtcaagtgaagtctccttgttatggggcagtgcagctgtaggccaagctgtatctgtttgggaagggagaaaaaacagtagctggcatccatatccacttctccgggtgagtggtgctggagaggtatgtaggactcaatgtggccagccacacaaactaccctatattgtaatatccagtctgtcccttttgttctttttatgtgccattaatatctgctaaatgtgactgaaaatttgttagtcacctaggcattagtggagcaaaccctgaagcacctgcagtaaggagtctgaaacatacgtgctgacctttttgcctaaagttggcacttgtgttacagcatccagaaagtagaggctttaattttttcctcattttgtggtggatttgcatctgcactttattctgttgtagcagcatataatcattaggtcgatggcgagaggtcaggatgcagtttgtgccataagtggaacaaagcaaagagaatagtccctgtaattagtcctgtgtttgaacttaacagcactactaagcagagagcttgggttccatctgaaagctagacctttagggattttccaatttagtgaaaaaagataagataggccaaccaatgtcttaaaaactagaactactagtcattctccattacaacaaatatcacaatacaactacatcaaaaatctcaagattgctaagtcagtatttgacccattattttaatttatagttcatagaacaaaattctggtatagcagaatggaaccattcatcctgggaacgtataataggatctgattaataaatattttggttttgctgatcaactctttataacttcttaaaatttggaaaatatagaactaatttaaaattcctgttagaatccagttaccttctggtattcaatggaatatagtcatatatcatctcatggtcataccctctgtgaaatctatcattaaacgattcatcattgtgtaaacatcgtagaatgtacttacataaacctaaatggtttagcctactgcatacctattgctcccaggctacaaaacctgtacagtgtgttactgtactgtactgaatactgtaggcagttgtaacacaatggtaagtacatatgtatgtaaacatagaaaaggtacagtaatcttatggagccacctctgactatgtggttcgttattgactgaaacattctgtggcgcatgactgtacttgggcagcttctgcttctctttcgattgcaaatacaaacctgtttttgttttaatctttgactaaataaaaatccctctgtaagtccatagagagtaagcacatcttaaaacacaataaggaagagagaggagaaaaagacagtcaaaacaaaaactctggggcttcccttatcaattacctaaataatccttgttaaaactaagtgcaggctatgtttccattttctacttttttatgcttcttctcttctgttccttcagtggtggtagcgcggatgttcaaattttcagttctcagtaaagattgtatagacagtcccacggtcttcaggtttttactctgtgctacccaaacctacagtaaatactataaaagaaaacttattcaaacgtaatctttatctgcaaaaactattgaaaaacgttaccatttaactattgctgtaatatagggggttccttgaaatatgataacctgcttgttatagctacttcagcagatcttatcctgttgcatagggtatcagcatatgcttaatcatttaggtatattattctccctttatttctttctatgtaaacatagaaaaggtatagtaatcatacatagaactgacatgctaggtattggaatttttgcttcagccctgcaaacaatctttcaggagggtatggatgggaagttagggttaggaaccttggaagaggaatttaaagggctaaaagaagatagccttcatggataatattttaactaacttctccgttctgttcatttgaactaccatgtacttcagttattttggtatatccttttcctgcttcatgctagaaagtctttgacttgttaagaaagcagggcagtgcagcctgagtagataggataatgggacaagctggacctgggatgggagtaacatcccagggagtaacaagtaatgagagaagaaatgagaatgatgagttcccaccagctccttggctgctttcttacccatatatttctctgtccctagttttttgtttaattttttcttcatttgtatattatttggaagaggaattgtagaggaatgggatggggtgtaatacagaatcatttgatgcatgctaactactttgggaaaagatttgtgtaaggctgggagtttgactgttggctaaagtgaaaaggggggattagtagggaatgaaaattgttcaggctctttgctcatcattgcaaagaattggatgtgttgtggacctaggaaaacactcaaattcagtcatccccgtttgggataggtttgaggaactactggccaacctactaaatgaacaacatcagatagcgaaggaactatttgaacagctgaagatgaagaaaccttcagccaaacagcagaaggaggtagagaaggttaaaccccagtgtaaggaagttcatcagaccctgattctggacccagcacaaaggaagagactccagcagcagatgcagcaggtaacactttccttggtcatattaatattgaattataccaaggcctaactctgaggctttggtataatctaaaattagcagctttgtaaatgtcagagatagttaccttactacgtattaaaaccgtagtatcttcacatcagttaggagcttgagaagtcatcatgttcatgtcctgtggctcagggaagacagcacataaggaccctaatggtattcggaattacagatttcaaagagtcctcagtaatctattctgaaatttaaccttcactgtgacaagtagttttttttcccttttcccttttcttttttcttttttttttgagacgtagtctcgctctgtcacccaggctggagtgcagtggctcaatctcagctcactgcaagctctgcctcccgggttcacgccattctcctgcctcagcctcccgagtagctgtgactacagggactcgccaccacacccagctaattttttgtatttttagtagagacagggttcactgtgttagccaggatggtctcgatctcctaacctcgtgatccacccgcctcggcctcccagagtgctgggattacacgcgtgagtcactgcgcccggccttttccttttctaatctcagttcctcctctgtttagaggttaaacttcctctggttctgtcattttgttcaagggaacatgtctgagaaatttatgccaagatcctacgttgttctcacactctttgcagaaagcaaaatttgtgtcataaagttgcaaacatcttagttaatgactctctggtggctgggtgcagtggctcacacatgtaatcccagcactttgggaggctgaggtgggaggattgcttgagcaggggagttcaaaagcagcctggacaacatagtgagactctgtctctacaaaaaataaaaataaggctgggcacagtggctcacacctgtaatcccagcactttgggaggccaaggcgggtgaatcatgaggtcaggagtttgaggcaagcctggccaacatggtgaaaccccgtctctacgaaaacaaaaaattagctgggtgtggcggcgggcacctgtaatcccagctactcgggaggttgaggcaagagaatcacttgaacctgggaggcagaggttacagtgagccgagatcacgccattgcactccagcccaaaagtcagtgcgagactctgtctaaaaataataataataataataataaaataaattagccaggcattgtggtcacagctacttgggaggctgaggtgggaagattgcttgagcacaggtggttgagagggcattgagtcatggttgcaccactgcactccaagctgtgtgacagagcaagaccctgtctccagggggaaaaaaaaatatctctgggctcctgaaatggcagtgtcataacatatcactgcattattttctttctctccccagcatgttcagctcttgacacaaatccaccttcttgccacctgcaaccccaatctcaatccggaggccagtagcaccaggatatgtcttgtaagtttccaaattgccgtaattctatagactagaatataaaattagcttggcaggttatttctcacagttattctctcaggtatttttgattgctgtggcttcctatgtttgctgagtgaacataagccactgattcacatgaaaggacaaagagtgtattcaattttttcttttcttttttgagacagggtcttgctctttcacccaggatggagtgcggtggaacaatttcagttcactgcaacccctgcctcccgggttcaagtgattctcctgcctcagcctcccaagtagctgggactacaggcgggcaccaccacgggtaattttttttgtatttttagtagagacagggttttgccatgttggccaggctggtctcgaattcctgacttcaagtgatctgcccacctctacctcccaaagtactgggattacagccatgagccactgcgcctggcctgtccttctgatatttttattgggtcctcctcctcatctttagattcaccctgacttcttaggtttttggtaccgctattcatttcatagatgttgaggctgggcatagtggctcacacctgtaattccagcactttgggaggctgaggtgataggatcacttgagcccagtggtcaagaacagcctgggcaacatagtaagacccggtctgtgttttttttgttttgttttgttttaatttaaataatgaagtaaatatacatgtagatgttgaattcattatccattcatgaagctcaatattagtgttttatgtgtagagctagttttgctcatgacgttttgaggtattttgagctttttttttttttttttttttttttgagacggagtctcgctctgtcgcccaggctggagtgcagtggcgggatctcggctcactgcaagctccgcctcccgggttcacgccattctcttgcctcagcctcccaagtagctgggactacaggcacccgccactatgcccggctaattttttgtatttttagtagagacggggtttcaccgttttagccgggatggtctcgatctcctgacctcgtgatccgcccacctcggcctcccaaagtgctgggattacaggcgtgagccaccgcgcccggcctattttgagattttaaatttgaaatttggccaggtatggtggctcatgcctgtagtcccagcactttggtaggtcaaggtgggaggattgcttgagcccaggagtttgagaccagcctgggcaacatagtaagaccccatccctaccaaaaaaataaaaaataaaaaaattagctggggatggtgccgagtgcctgtagtcccagcaacttgggagactgaggtaggaggatcacttgagcctgggacgttgagactgtagggagccgtgcttatatatcactccagcctgggtgacagagtgagaacctgtctcacaaaaacaaaaccatactttacctcataaaaattgcctcaaacttttggacaggtaatgataatactctcagcttcttcagtaagtcttctttggattttgaagagtacatttgctagtattctaaaacttccttggtgatcaacaggatgtcttcatctcttactgtattcagaggaggatgaggagtacttggttgtaggcattattctgagaccaaaagacaaaacaattttaaaagtaatggtcctggtcgggtgaggtgactcatccctgtaatcccagcactatgagaggccgaggcaggcggattgtgagcccaggagttcgagatcagcctggccaagatgggaaaacgctgtctctgcaaaaaatacaaaaatcagctaggtttggaggtgtatgcctatagtcccagcttctcaggaggcagtgggaggatggcttgagcctgggagggggagtttgcagtgagctgagatcatgccactgcagtccagcctgagcggcagagtgagaccatgtctcaaaataaattaattaattaaattaaagtaatagtccccattcttgagactcttaattctagctcgggagctagaccatgtattccttagtgagaaacagtttaaaaataaaacaagaatataatccctgaatatctgagaactcaggcataatcttaacagtagtttattgtgaaagactttatgattatttttacctgtttttatcctgtagtaggaaggtcagcttctcatttagattctgaaggctattggtattaattgtctggaattgtcttagatcttccttgtgtcgtgttttcccagaaagagctgggaacctttgctcaaagctccatcgcccttcaccatcagtacaaccccaagtttcagaccctgttccaaccctgtaacttgatgggagctatgcagctgattgaagacttcagcacacatgtcagcattgactgcagccctcataaaactgtcaagaagactggtaggagacagatgtgtcagctttaagtttttacttgcggtgagaggtggtgggaatcttatcccatagataacttcctaggatacttgcctaggaatggaggacacaggacatttgtaatttcttccttctctcttttatcctccctttgtactcattatccaagttctagaattacatgataatctccgggcctgg

SEQ ID NO: 15029 - DNA, 714 bp, Homo sapiens
aaaaggaagcaaatgagctgatggaagatctgtttgaaactttccaagatgagatgggattctccaacatggaagatgatggcccagaagaggaggagcgtgtggctgagcctcaagctaactttaacacccctcaagctctacggtttgaggaactactggccaacctactaaatgaacaacatcagatagcgaaggaactatttgaacagctgaagatgaagaaaccttcagccaaacagcagaaggaggtagagaaggttaaaccccagtgtaaggaagttcatcagaccctgattctggacccagcacaaaggaagagactccagcagcagatgcagcagaaagagctgggaacctttgctcaaagctccatcgcccttcaccatcagtacaaccccaagtttcagaccctgttccaaccctgtaacttgatgggagctatgcagctgattgaagacttcagcacacatgtcagcattgactgcagccctcataaaactgtcaagaagactggtaggagacagatgtgtcagctttaagtttttacttgcggtgagaggtggtgggaatcttatcccatagataacttcctaggatacttgcctaggaatggaggacacaggacatttgtaatttcttccttctctcttttatcctccctttgtactcattatccaagttctagaattacatgataatctccgggcctgg

SEQ ID NO: 15030 - DNA, 18153 bp, Homo sapiens
ggaggcggtggtgtcccggctgcggggtaggagtccgcggcagcctccgggtaagccaagcgccgcgcagtgctgagttcccgcacgccgcagagccatggagatcggcaccgagatcagccgcaagatccggagtgccattaaggggaaattacaagaattaggagcttatgttgatgaagaacttcctgattacattatggtgatggtggccaacaagaaaagtcaggaccaaatgacagaggatctgtccctgtttctagggaacaacacaattcgattcaccgtatggcttcatggtgtattagataaacttcgctctgttacaactgaaccctctagtctgaagtcttctgataccaacatctttgatagtaacgtgccttcaaacaagagcaatttcagtcggggagatgagaggaggcatgaagctgcagtgccaccacttgccattcctagcgcgagacctgaaaaaagagattccagagtttctacaagttcgcaggagtcaaaaaccacaaatgtcagacagacttacgatgatggagctgcaacccgactaatgtcaacagtgaaacctttgagggagccagcaccctctgaagatgtgattgatattaagccagaaccagatgatctcattgacgaagacctcaactttgtgcaggagaatcccttatctcagaaaaaacctacagtgacacttacatatggttcttctcgcccttctattgaaatttatcgaccacctgcaagtagaaatgcagatagtggtgttcatttaaacaggttgcaatttcaacagcagcagaatagtattcatgctgccaagcagcttgatatgcagagtagttgggtatatgaaacaggacgtttgtgtgaaccagaggtgcttaacagcttagaagaaacgtatagtccgttctttagaaacaactcggagaaaatgagtatggaggatgaaaactttcggaagagaaagttgcctgtggtaagttcagttgttaaagtaaaaaaattcaatcatgatggagaagaggaggaagaagatgatgattacgggtctcgaacaggaagcatctccagcagtgtgtctgtgcctgcaaagcctgaaaggagaccttctcttccaccttctaaacaagctaacaagaatctgattttgaaggctatatctgaagctcaagaatccgtaacaaaaacaactaactactctacagttccacagaaacagacacttccagttgctcccagaactcgaacttctcaagaagaattgctagcagaagtggtccagggacaaagtaggacccccagaataagtccccccattaaagaagaggaaacaaaaggagattctgtagaaaaaaatcaaggaactcaacagaggcaattattatcccgactgcaaatcgacccagtaatggcagaaactctgcagatgagtcaagattactatgacatggaatccatggtccatgcagacacaagatcatttattctgaagaagccaaagctgtctgaggaagtagtagtggcaccaaaccaagagtcggggatgaagactgcagattcccttcgggtactttcaggacaccttatgcagacacgagatcttgtacaaccagataaacctgcaagtcccaagtttatagtgacgctggatggtgtccccagccccccaggatacatgtcagatcaagaggaggacatgtgctttgaaggaatgaaacccgtaaaccaaactgcagcctcaaacaagggactcagaggtctcctccacccacagcagttgcacttgctgagcaggcagcttgaggacccaaatggtagcttttctaacgctgagatgagtgaactgagtgtggcacagaaaccagaaaaacttttggagcgctgcaagtactggcctgcttgtaaaaatggggatgagtgtgcctaccatcaccccatctcaccctgcaaagccttccccaattgtaaatttgctgaaaaatgtttgtttgttcacccaaattgtaaatatgatgcaaagtgtactaaaccagattgtcccttcactcatgtgagtagaagaattccagtactgtctccaaaaccagcagttgcaccaccagcaccaccttccagtagtcagctctgccgttacttccctgcttgtaagaagatggaatgtcccttctatcatccaaaacattgtaggtttaacactcaatgtacaagaccggactgcacattctaccatcccaccattaatgtcccaccacgacatgccttgaaatggattcgacctcaaaccagcgaatagcacccagtcctgcctggcagaagatcatgcagtttggaagttttcatgtactgatgaaagatactctacagaacttgtcaaatctttgaaacttggaatatattgctttcataatatgaagttttattgcctatctatctgaagtgtctaatttttcaagtttgtaagtttattatgtggttttaacattgggtgtttttgttttgtttttactatgaaaagacagcttaaggaagagctaaattctgttaaaatatttggggcatgtttgtgcactgctgttgtgaggatcagcatatgaaattgacatcatggttagtcatggtactgcagcttagggggctacacggttgctgtgtgagtggagagatgcagtgaggcagttgtcattattctaaaaattgtactactttcacttttcccaaagattatataatgttcataatccaccatgaaaacagcattggccaaaggtactgaggctgcttaaaatattcaattctgctttttaatttttaagtgaatttagtttgaaaagcatgattatacaggcctctcaggctgagtgctactttggtaaagttcccagttttcctgccttctgtgacaggatgaatgaggtgggtatggacagtggaggcagctggaatggcaagtgcagaaaataggaacagttctatacagtgctctcatttactaataacataatgccttctaaataatttttttgggaaactacattatcacaaaattatacaaatttttttacaagtatttacatactgtatctgaaaacagactttaaagtcacaagattataaatgtacatatatattctcacattctgaaaaataacattctcagaatccacagaaaatatacttagttactactgaagataatttttgaaatgtaaaaattagatttaaatagtatattttaaatgacagaactataattacagagatcagatcagataggtaaactgcaagatagataggatgaaacttttggcctactgtattacttacagagtttttttgtgtgtggtttttaaaactgttaaggcaagaagtgtcaaatgctttagagttaaataacagatcactgatttcaaagacttggtgtatagtgttaaaaattaaagcttaaaaggtggttagaaaagtggattaatgcaaaaggggtaataaagactgcaacattctcaggaccaaattaaactgctaaaaaaaaaaaaaaagttcattgacttgcttagtcgtatactcaaatgatgataaacctacatgtgcaaaggctcacgtttaagattgtcaagccagcagtctactgttgtgttgccattgcttttccattgggagaagaaagaattaaccagtcattaaaccatttggtaagttgcactttgctgtgctgatcccacaggaaaggcttgaaacacgagaagcagcaaagacagagcacacaagtgcataaggctgttgtcttcggcttgggtgaaatgacagttcctcttcattctaaaggtttactccattgaatttaaggcatttgttcattccagtgttgagatgctttgcatctctgcagaagaaatttattttaaattgtttaaatatctggaaatacttttagctatcatttataaagatagttttgttctcagtttcactataaattatagaacaaatgggaaacaagggtttaatttagttcagccattttacaaggaaataataaaatactaaaatctgattgttttttgctatttaatagccactgcccagacacatatttaagagtttaatctttcagttgctatggcttatgaacaagctaaggttgaccataaaacatttgttggatgacgtggtttaaaatgatcaccacaaaaagggaccacaaaaaaaggaaggaaatgagcatggttggcgattggaagcaagggtaccagagggcacagtgtgctttggcatgcattttatacataaaatgaatggaacaaaaggtgccagaagtcccaggttacacaatcaggagcttagatactgcacacaaaaataattatctgggttaaaaaagtaaacatagggcagattctatatggcctatcatgtttcttcaccttcccctcgttgctggctgatacagcgaggtggtcagctgatgactacttagtcaatatgacctttagtcgtgaaactgacagcagcagtgattaaggctgacttaatcaggttggccactttgaaggacagaaatgcagtggaaacagttttattctatgtagtttacatgcttaaggttacagagtttctacctgcactgtaatggaaatataatttctctgtagccaaaagctggcaaacttgacccagagggaaaatttaaaactgcagcaggctcaaatgtagagtatttttctttttatgggcaggttgttcagggatttttttcctcctttaatttattgactgactgtaaatacatgagtagaaacttaatagtcatgtatttcaaaatttggcttaatttaggagaatccactgatgaacaagtaccaacttacgtttcaagcttcttagccccataatcagtccttcagccacagctatttagagctttaaaactaccaggttcaatcactggttatgctttctgtgatgtaatttagtcatttctatttttagtattaaccaagtattagacacagaaaataggtattaagaatcttcatatatcctgtcagaccaaatgggattccaggaacctaaagcgatctattatgctataaagataattaacacattaaaaactcatagggtcaatacagcatcttaaacctcacacttagaaaaatatatttttaaatagcagtctacataattttcaatcttcaggaaactacagataggctagacagcgaattcctgaatgatgagtagtgatctttggcagcatttaaagtgaaaagaaataaggatctaagaattcagccctaatccactaaaaaaaggaattctaactgacaagtttttacaaatggagttgggctcattcattttggaaataaacctatggagtggcacacatctaaacaaattttcccaatagaaaaaaggctataaaaattttattccaagagtgattaaattgtataatgttgtatatgtgaatttaacacttttgtttacatgttaaacaaatgtgtatatattagactacattaaatatgcaattctttcttccagttaaatactgttgctccctaaaacccttacattgtacaccattgggaatgattgttcatcatactacttttccattagtgaggctacagttatgttttaaatgtgcgattacagagatggcatctgaacataaactgatggctcgaaaatgaaaatggaaatgtagcagccatatactgctaactttggatctgttcctgaattcaaaactactaggagaaaagtgtcctttataaaaaaggaccttattaatgcctaaaaaacatcatattctctaggaaagcttgtgtctgtttccttagggaaaatgtttgccttttaaaaactgtgatcctttaggatgatcatgactttccctttccttatggaaatgcaagaataaaatatttcattaaacaatgaaccttgaaaataaaatataaacattaagaaaccattttgctaaaaagataatgaaaattatccaaattgggtttttgagttcttctgtaaagagtgctctaccctaaattttcccagcaggtctgccgaaatcacacacttcccaatacagggggacttggcctttaccatcaagtattcgatccttccttgaaatggcattatctggcagtgtatggattacggattatacccagtgcatatagcaaatattttgaacagatcagtctttcactattttgatgattctgggcatttctccctgttacagtcttgggttagcaccacttgaccatgcagggttgggttttggtttttcttctctgtaattctggtctcaaagttaatttctgtagtcatctcagcatctctcagtgaggtgtatgtacacatttccagacaaataagctgcaatcagagaagaaaattgcagggagttaattatgtttttagattttcataacagtttaatatttttcagttgtgctttcaggttacatgtgtaatatttttcctctttaactccttttattctgtatttgcataaatatgagattctgaagagccatctggttatactaccttctactaatgttgactagctgatttcataaaccaaagctgtaggagttgttgtattaagtctcttaactagtaacatagtctgctcttcatgggctgagaaagttactaacctgcagtcatcacctccagcactaacaacatgtcgatcaccactggtaaatcgaatatttgtcacatggggcgaatgacccaagaaccttttgtgttttgcctaaaaaacaatgacagacaagctcagggcatttggtgcacacagaagtcaaaggctcttattaggaactataatctctatgacaagagctgtggagagagtagggagttagcaccgcagccagtgattagaatgcttttcagcatgagtagtggatctgcaaaaccaggctgtgtgggcagtcagatgtctccaggtactctgaccatttttctctaaggaaaagcatttgaaatttgataactgattataggtttggtgaaaagctaattacagcttttgtaggatggttccaaagatggtattactcgagggagaggatttgtttctaatagcttttatttcaaagtaaatagatttagaaagtttggggaaaaatttagaaattaggacaaaacattttaaatatatggggaaaagtgctgatgataagacatcaaaattaggagtaaactgataatagtaaacaaaacacaaacttacaaatttttctggacatgggaagtcaaataacttaaccatgccaaagtcatctcctgtaacaagactgattcctgaatgagatacacaggcacagttgacatcagctttctcagcatgtctggaccagattcccaaaacctcatctcctagaatactagagggaaggaacaaaagaaaactcatcatggcaagtgcgggcaggttgactatattcaaaaagtttcttggcaattaatctctaagtaccctatcatgttacttaaaatacaggaagtaaattatggtaagttgtttggagacctgaatttcatcaggatatcaactcctgccttttaaaaatgacattttataatttgaagggtttctagattaatctttttaagattaaagtagtactttatgaaaactgatagaactattttttctttttttttttttgagacggagttttcgctcttgttacccaggctggagtgcaatggcatgatctcggctcaccgcaacctctgcctcctgggttcaagcaattctcctgcctcagcctcccgagtagctgggatcacaggcatgcgctaacatgcccggcttattttgtatttttagtagagacagggtttctccatgttggtcaggctagtctcgaactcccgacctcaggtgatcacccccgctcggcctcccaaagtgctgggattacaggctgagccaccgcgcctgactgaaaactgatagaactatttttcaaattaaaagtgctacttggctgggtccagcagcacataccagtaatcccaacattttgggaggctgaggcaggaggactgcttgaggccaagagtttgagaccagcctgggcaatattgtgagatccctatctctacaaaaataaaaatgacttatgacataggaattaaaaaaatttcagagatggggtcttgctatgttgcccaggctggtatcaaaacttctaggctcaagtgatcctcccacctcggcctgctacatcagagattacaggcatgagccactatatgcctggctgatacaggaatttgatggcatttttcattggccaaaaaaatggatagtcatggttacctgtcatacagccaggaaatttgaacaaatttggaagctttgacttctaatagattcaagatagcattcctttagatagagaattaataacagttgcttaacagcacccaatacctttttgccagtcattaaatttagcattaagaaaaatatcagggtatctttaaagttaaaactttgatttccttaaaaaaaaaacttgataaatcatggaaactgataaaacatggaaatatattcaataaaaaggggtcccaacatgaacataccatttcaaaatatggtaacaaaaacttgaaactcaattactattccttattggaatggctctaacagttcagaaataggattttctaactggccttcaaagtcagttcttgccttgtgaatatataagtatttacctagtccatgtagcccaagtaattctgtcaatagcggcatgatccataagatgttttcctgaaggcacttcatagacatgccgtttatagcagccactagagacctttttcatcagattaaaatgggacaagaattccattaggtgagagacaaaatccacagggggtttacagaatactagcatattgctacttgatttacatgtctaacattattaagtatgcaaaagatcactacaaaaacttaataggagaaaagctctgataagtgggggaggaaaggggagctgtaggtcagaaggtacaaagggaggagttgagaagctggagctctggagctcaggaactttaaatgcattcactaacacgaaatgtaaaagcagaagaacttgccacctgggtatacagtattggtactgtacctggagataactgctatctgcagagaagtccatttgaatgacaaagcttggaatgtctttgcagtagctgattctgttaagagtggggcccagcgttaggtcataaaaatccactgagttctcactagaacctactgccagataccgggaatccggactaaatctgaatcaaaacaaaacgtaaaaagtattagaccacatgaagtattataaatacttaagatcagtgacttttcctttctagttcttaaaagtaacgtgtgataaggcctcaaatagatttacctgtcagacacaactgatcatgtatactgagattgtctgggttacatgaaataaggaagctttatattttacttaaattttaaatatttccccaattgtcatctcccaattcctttaaaaacgtctaatggcttaaaaaaactttcttaggccaggcccagtggctcacacctataatcccagaactttgggaagcggaggcgggcagatcacctgaggtcgagagtttgagaccagcctgaccaacatagagaaaccctgtctctactaaaaatacaaaattagccaggcatggtggtgcacgcctgtaatcccatctactcgggaggctgaagcaggagaatcgcttgaacccaggaggcacaggttgtggtgagctgagattgcaccattgcacttcagcatgggcaacaagagcaaaactccaactcaaaacaaaacaaaacaaaatttaattttttaaatagaggcggggtctcactatggtcccaaactcctggcctcaagcaatccttcccccttggcctcccaaggtactgggattacaggtgtgagccacaacacccagtcagaacatctcagcttttaaaagccattagcattacataattaataagctaacaattcattaagatagttttcttccatctggaaaaaacgttgtcttaatattaagcaaagaacacagcccagcttaactaacctccagttattaaggtgaaatgacacaacttgaatcttggaagaagaattttttttttttgagacgaagtctcgctcttgtctcccaggctggagtgcgatggcgcaacctccgcctcccgggttcaagcgattctcctgtttcagccccctgagtagctgggattacaggcgcctgccaccacgcccggctgatttttgtatttttagttgagatggggtttcactatgttggccaggctggtcgagtactcctgacttcaggtgatctgcctgcctcggcctcccaaagtgctgggattacaggcatgagccaccgcgcccggcctgaagaacttatttaaaagacaaagtgaaatgctatttgcctagcaatctttggagtcatatgggacaattcagtctcttgaaatggcccatgagtcttactgaggtacgatagagacatgtaaaagctaagggaagccactgttactattttatatattgaagttctgaggaaggtttcatttgtaaaaggattttactgatgaaaagtgtacaagcttttgacagacctagattcaataatcttatctactgatcacacggaagtactccgtaaatggtagccactgttgaaaaatgcttaagcactgaaaaacaaaggtttaagaaacatttaaattaatttggattctggaacatttaatcaataggtattgattaaattaatgaactacatattcccaaactgaggttactaagagaagatatgtttgaaatcacaactttagttttccagggtgacaacttttgaagggcagatagctctcttgtattacagtgggagatacctcttggtgggatgaacttaatggacatggctaagtgttaacatgaattcatcaaacattacctactagtacttgctattatagttggtgcccagtgggtttataatttagcaagaagaattaagtagtatacaaacagccatattttagcatacaatttataatacgggaaatgctacaggccctggggacctctttttgaaggcaaggctatggaaaattttacaaatggaagttaaatcaagtatatactagaaactctattccatttgttcactaacctgatatcatggattgcacatctcctgtctctcttctttccccatatttttagagaactcactagtaaaatgataaattctccatttttcattccaatagccaccatgtccccttcagggctgtaacacacagtacgagcagcatgtcccaaattcactttgtttaacatcttctgcatttaaaaaaaaaaaaaaaaagagtcataggaaacattaagtgaagtacttctaaattataccagtttcccctcaaaatgctcaacagaattctggcagttctttaagtactagcaatttagaacttccaacttttctttttagaagttgtaacctcttttaaaaaaattatctgtacttactttatcagcaatatcccaaagtctcactgtcccatcttctgcagcagaaaggaaaaaatccctggaaggatgtgttgctagtccccagattggcccatccacatgaccgttaactaaaatattacaagctgcatttttctctccaacttcgattatttcagcattccttgtcccaacaaggatcttgccctgaaacacaagcaggaccaatacagtgaatgtaatacaacagctgcttttcttcttcataatataaaaatgaccctattgacctgctttcagagaactttttgctttgagctaatctagtagcaaggcagtcattagctcatgcaaatttttctatgactacaggcacacatctatctgtaagcacaatgggctagattacatattagagtccatgctacagaatagaacttttctgtggcagtacacctggattcttcaataatcaaagtttttatttgataatcttaggatttccaaactggggtcagtgcagtgggatataggaaaaaataatagaatttattttttagttaaaaagtaaaagcttaactacaatttaatatgcaggctgaagataatatccgtatgatttataaatacacttaataagtacaaacacgctcaaaaattttcataggagttgtagttttgaatttttattttgaaattgacacataattatacatatctatagggcatagggtaatacgcataaccatcacctcagacatttatcatttctttgtgatggaaactttcaaaatcctctcttgtaaatacctgaaaatacataaatacgtgattcttaactatagtcatcctacagtactacagaatactaaaacatactattcctatctggctgtgtaaacttgtatcctttaaccagtccttccctatccccctccccctcccccttgtccgcctccagtaaccactattctactctccacctctgtgggatcaacttttttagtttctgcacaggagtgagaacatgtatttatctttctgtgcctggcttatttcacttcacatcatgtcctccagtctcatccatgttgccaccaagaatgacagaatttcattattttttatggctgagtagtatttcattgtttgtttactgcacgttttatctagggaatgtgtgtttttttaaaaaatggagacagctgtcctaatatgagtcaactgccaagggctttcaattatgtctactagagttgttaaattggcagattctagaaaatattggaggtttacatacagtatttagacagaatagcttcctagcttatgcaccacactggtgctaactttggcaaagaaagcagcaaagacagagtaatgttggcaagcaaatccatcgttatgcattattaagtattgttcattaggctgcaaagggtgagggaatcacagtaataaccactttctgttttctgctgcactgtatcagctcatggaacatcttactttgcctctgcacacagaacgaacacaatctgtggcttgtcctgtctcaagcctgaaggcacggcaccgcctcagttcctgatcccacagtttaaccgctcctccttcttttgacctaagtaaataaccaagccagagtaagtgttcattattggctactataatttttattataaacaaataccaagttataagcagaatcttttttttttaaaaaggccctgatatttataatttacctctaatattcttgtaaactttctatggcaatttgaggatatactatatctcagtcaaaataaacatccagtttcagtgaattttattttgagaaatactctttttttctgacatgagcataattttatttagcctctacaatacattacaatacattatcctctctcataatacttttttttttttttttaagatgtagtctcgctctgtctcccaggcttgagtgcagtggcatgatctaggcttattgcaacctctgcctcccaggttcaagcgattctcctacctcagcctcccgagtagctagcattacaggtgtgcaccaccacacccagctaatttctgtatttttagtagagatggggtttcaccatgttggccaggctggtctcaaataccttgacctcaggtgatctgcctgcctcggcctcccaaagtgctgggattccaggtatgagccactgtgcctggcctcataatacttcttgattaggaagatgtaaaaaaacaattttattaaaaggataatggaaatgtaaggcaaaataatagaattacaaatgctatgctacagagttgatttatttatttttttgagacagagtgtcgctctgtcacctggcctggagtgcagtggtgtgatctcggctcactgcaacctgtgcctcccaggttcaagcgattcttctccttcagcctcccaagtagctgggattacaggcaccatgcctggctaatttttgtatttttagtagagatggagtttcaccatattggccaggctgatcccaaactcctgacctcgtgatccgcccacctcggcctcccaaagtgttgggattacaggcgtgagccactgcaactggcccagagcttatttttgaaggccaaaacagaagcatatttattccctatcaggtgttaaaatatctcactggaacagtttagcaggcttctagtgagtgggggtgtgcaggagtaaatgacgtgggaaatacaagtgttggaggacgaaatagagcccatttatggattttattcctggaagggctgaaaaatgtattccttccttttctgctagatgaattgcttgtctgaaagcatgcctatgtgcattcttcctttatgtaaaaggcacaaattctgcgcttgtgtttaattaacatatgtgggttctttcaatcctgtattgaaatgtacttcttagtcaactatatgtcacatttttttttgtttttgtttttgttttttaaatggggtctcactctgtcacccaggctggagtgcagtggcaccatcacagctcactaaagccttgacctccccaggctcaagtgatcctcccacctcagcctcctgagtagcagggactacaggcatgtgccaccacacccggctaattgttgttttttatagcgatggggtttcaccatgttgcccaggctggtcttgaactcctgggctcaagcgatccacctgcctcagcctcccaaagtgataagattacaggtgtgagccactgtgcctggcctacatgtcatgtttcaacatgcatatgactatgttggtgacaaatcaaatcataagtatctggttactgttgggagatttgaaaatcactcagaagagacctcttctcaaattttgaggtcttgtataaaacagtttaaatttgcctcaagcaaaaggaaacaaggcagttctctctagttccctcatccttttctaaagcaacaatgtgcattctactccttagaatccattctgaacaaaaagagagcaggcagtcaaaatacaaccctggctccagattcccccatgggcctcctactcagcaaatcatacacaggcatacagacattaagaaaagtaactcaacttgtaggacaactacctatccacacctcagaaaaagtatcaccccaacatgaaaaaaattggaagtgaattaagaccagaaatgagaatcaaatagaaggcacataaaaggtaataaaggagaagcatatgaggaggaaggtcggagaggacactctgtgtagcctagaaacaactagaataattaactgcaaacctcaggtaggtcacaaatgcataaatattctgtgaaaagaaagaggactcacggcctttcctttcccccagtcacgataagtccatctcgcagggtggtgtacatggcaaacacaggcccgttgtgagctctcgccacgattctacacaatatgtgatctttccacacacagacatcaccactgatggtacctgtaaacgtcaagttattctgaaaaggagtgggggagggggagacaaactcatcaaaagttcaaatagagtttaaatagataattttctatgtatgtgtaatgctgtctcacccttgatacaaagagcatgcatcgtgtagtggcagcagcactgaattcacgagtcaggaaacctgaacgggaggcttagctttgtcaggaccttttcctttccaagtctgttgcttattagctagaataaccttagacaattcttcccttccaattctaacatactataattctagggtttattttttatttttttgagacggagtttcgctctttgttgcccaggctggagtgcaatggtgcgatctcagctcaccacaacctctgcttcccaggttcaagtgattctcctgtctcagcctcccaagtagctgggattacaagcgccagccaccacgcccggctaatttttgtatttttagtagagacagagtttcaccttgttagccaggctggtcttgaactcctgacttcaggtgatcttcccgccttggcctccctaagtgctgggattataggtgtgagccactgtgcccggcctgagccacggtgcctggcctggtcttatattaagaatacccaaaatgttcaactgaaatttgacatggcacaaacatttcaatagtctttttctcaaaaatgtaagtgtacttaaatattctaaaattataacttttcctataagtattgcataatcacaaaaacaaaaaatgcacttagtttttcgatgcaccaaaggatttatacagcctagccaatgcaggatattaaaggaaagagatgtggattggaagccacaggtccagatgagatggaataaagtgagaggagagcaggtctcctgaacacccttctgtcagggccaggaattgtgctatttccttctgtctcactacctccttcttccctcgaagtagagacactggcccagagcacttccagctgtatgataagcagtgtgttaaatgataaaaagcaaaggaaatcctaaaccctagtaccaccttaaatcatttgaaaatcatgtttcttgatttacctttctctctgacaaatttttaggactatgaagaactactaggaagacagaaattttaggatatttagggtgacaattagaagattaaggaaggcttttgagtataacagtagtccaaggaatcaaatgttcatcagaatccttattatggtggctcatgcctgtaaacccagcactttgggaggtcaagatgggaggatcacatagcttaggagcttgagaccacctaggcaacatagcgaaaccctgtctctactaaaaatgaaagaaaaattagcctagcatggtggttcctgccctgtagtcccagctactaaggaggctgaggatcacttgaacctgggagatggaggctacagtgagctataatcgcaccattgcaccccagcccaggcgacagagtgagatactgtgtcaaaaaaaaaaaaaaatccttttccccctctcattaacattcttttcactccctaatttctgaaagaactagatttttgaaagatgaaatatatgcttgaccagggcatgtaatgattagcagatcacagtatcatctcaacaacattcatgtggctgatgatctaaggcaagagaatgtaaagtagtcaaagtcacactatgtgcattttaagagacatactgcaccaaatgcaatagcgagcatggtctgcatccgggcatcttccagtgtgctcagtagcccttttttgctaagaagagctcttcctgccagggtccagaacttcacatgttttactcccactgagacaaactgggtatctgaatctggtcggaattctgccacaaaaatacgttgattgtgaccagctctgctggcaattttggcacctgacaagatacaacaaaattatctaggttattacaagaaccaagctaatcaacagcatcaaacaaatatgtaaaatacatagttcaaaaaacaaaggcttagaagagaggccaatggcccctgctctactacctagcaatacatgatttacaattatttgtgtattgagtccttttcacttatcttcgctccattaacttttctttatataacgtaaatgttttgtctaaagtgtggtaggtaatattatcctgctgatctgccattatcattagaaatatacataattttcataagaatctccaaaaccaatcaaatcattaataataaatacatagtttcttgctggaagaaaatagcagtgaatcatttataatgctaataatggtttcattaatttatctgttttgtgaggttacagttccactgggcttttaaagtgaaatatacctacagtaccactgtgtacagtatattgcataggcctccactgaatgattgtttcaaccaccaactttaagacaaatattaaatacagaattcctacta

SEQ ID NO: 15031 - DNA, 2560 bp, Homo sapiens
actccggcgcgcagtgccggccggggcggggatacgccgtgtgcgcggccgggggcggaacggaggaggaggcggtggtgtcccggctgcggggtaggagtccgcggcagcctccgggtaagccaagcgccgcgcagtgctgagttcccgcacgccgcagagccatggagatcggcaccgagatcagccgcaagatccggagtgccattaaggggaaattacaagaattaggagcttatgttgatgaagaacttcctgattacattatggtgatggtggccaacaagaaaagtcaggaccaaatgacagaggatctgtccctgtttctagggaacaacacaattcgattcaccgtatggcttcatggtgtattagataaacttcgctctgttacaactgaaccctctagtctgaagtcttctgataccaacatctttgatagtaacgtgccttcaaacaagagcaatttcagtcggggagatgagaggaggcatgaagctgcagtgccaccacttgccattcctagcgcgagacctgaaaaaagagattccagagtttctacaagttcgcaggagtcaaaaaccacaaatgtcagacagacttacgatgatggagctgcaacccgactaatgtcaacagtgaaacctttgagggagccagcaccctctgaagatgtgattgatattaagccagaaccagatgatctcattgacgaagacctcaactttgtgcaggagaatcccttatctcagaaaaaacctacagtgacacttacatatggttcttctcgcccttctattgaaatttatcgaccacctgcaagtagaaatgcagatagtggtgttcatttaaacaggttgcaatttcaacagcagcagaatagtattcatgctgccaagcagcttgatatgcagagtagttgggtatatgaaacaggacgtttgtgtgaaccagaggtgcttaacagcttagaagaaacgtatagtccgttctttagaaacaactcggagaaaatgagtatggaggatgaaaactttcggaagagaaagttgcctgtggtaagttcagttgttaaagtaaaaaaattcaatcatgatggagaagaggaggaagaagatgatgattacgggtctcgaacaggaagcatctccagcagtgtgtctgtgcctgcaaagcctgaaaggagaccttctcttccaccttctaaacaagctaacaagaatctgattttgaaggctatatctgaagctcaagaatccgtaacaaaaacaactaactactctacagttccacagaaacagacacttccagttgctcccagaactcgaacttctcaagaagaattgctagcagaagtggtccagggacaaagtaggacccccagaataagtccccccattaaagaagaggaaacaaaaggagattctgtagaaaaaaatcaagctgagatgagtgaactgagtgtggcacagaaaccagaaaaacttttggagcgctgcaagtactggcctgcttgtaaaaatggggatgagtgtgcctaccatcaccccatctcaccctgcaaagccttccccaattgtaaatttgctgaaaaatgtttgtttgttcacccaaattgtaaatatgatgcaaagtgtactaaaccagattgtcccttcactcatgtgagtagaagaattccagtactgtctccaaaaccagttgcaccaccagcaccaccttccagtagtcagctctgccgttacttccctgcttgtaagaagatggaatgtcccttctatcatccaaaacattgtaggtttaacactcaatgtacaagaccggactgcacattctaccatcccaccattaatgtcccaccacgacatgccttgaaatggattcgacctcaaaccagcgaatagcacccagtcctgcctggcagaagatcatgcagtttggaagttttcatgtactgatgaaagatactctacagaacttgtcaaatctttgaaacttggaatatattgctttcataatatgaagttttattgcctatctatctgaagtgtctaatttttcaagtttgtaagtttattatgtggttttaacattgggtgtttttgttttgtttttactatgaaaagacagcttaaggaagagctaaattctgttaaaatatttggggcatgtttgtgcactgctgttgtgaggatcagcatatgaaattgacatcatggttagtcatggtactgcagcttagggggctacacggttgctgtgtgagtggagagatgcagtgaggcagttgtcattattctaaaaattgtactactttcacttttcccaaagattatataatgttcataatccaccatgaaaacagcattggccaaaggtactgaggctgcttaaaatattcaattctgctttttaatttttaagtgaatttagtttgaaaagcatgattatacaggcctctcaggctgagtgctactttggtaaagttcccagttttcctgccttctgtgacaggatgaatgaggtgggtatggacagtggaggcagctggaatggcaag

SEQ ID NO: 15032 - DNA, 17488 bp, Homo sapiens
gggtttactggaagaggagctatacagatggtacttagaggatgtagggccctacgtattagggcttcttagttgtagcgaagagcaattggtctggtacgtttagctttttcacatttagttttgaattctgactctagaaatgtacaaccccatcttttgaattacaggttttaagatgttatttgctcttaatacgtcttaaggtaacagccttgatcactgcttttactttcgatgaaataacttaatgagctgtgaagaaaaaattatcagattttaagggagagaattttatgaaaatgtctttgaggttcctgtcacctttatgagaatgtcttcaaagtttccatcaccacctctaccaatttttcttccaccggagccagtggacttaggttccataacaagctcctcttgttcactgaatgagctagacaatatttcccaccttttaaggaaaatatcagctgatatcaatgaaattaaaggaatgaaagcagctattttgacagtggaagcaaatctttttgatctaaatgttagagtgtccaagaatgaagcaaaaatttcatctttggaggttaaaatgaatgaatattcaacaacatatgaatgcaacagacagtttgaagatcaagaagaagatactgaatcacagtcaagaactactgatgtaaaaataatcggcttccttagaaacgttgagaaaggtaaactcttaatatatgatatgttctaggtacccatcctttgatctgtatctttccacgtatgttgactgtagctctgatgtggagggagcaagttacagagaacttgaatttttcatggacctttaatgacaaatttggattctgcttgatttagcttagcaatctagaattgatcagaattccatcctctttaatggagctctctaaaacgatgttttgaaaagacagatgaacctagagcaatgaagcaaaacttgaaatgtggaagtgtggtctttcatgtgtcttgtgaaattattttaaaatgtctcattctttcatcatgtactgttgatgtgaaggagacctgttgcagtatttggatggaaagagcattcttcctgtaacttttcacctcagttttccaagcttcccacaggaatgcaacttgacctaagtgtcatcttcgttacagttcctcagaatgtgtgtttttttatggtaataattctggaaggaattgacttttttgggacgcaccagtaaaatttcatataacttatgttttaaaggaaactaactgatacaatttcaaatcgagtataggttttaaaatttaaaaacaccttttaatgaaatgtggtgcttggtgggagatggcccacttaacatctttgcactgagtaagcaaagcctgtccttgtgaagccacctgtaatggatatacccaaaatcagcatgtgggcatcttagtaagatttcagtatttgcaaccctatcagttacatccctttgtacactgtagtgcagtaccttataatgagcaagtgagtgcctgatgtctgctaagcgctgtgggggctacagaaaagtgtgacattctcccatcctcaaggagcttaacatcaaatcgaggatggaaaaaaatcagttctttgtccctattttgtgcagtcagactgctgggcatattattgttaggaatagtgaacctaataggaattaatgttaggagcctattttagaagaaataagtagttgaacatcttttcttgtggaagaggcaaagaattattatcatgctttgctaacatagggtgtggattgtagagctgagtgtcttattgttttctttgcatgcatcgaagcccagagtttgtcttttaggaactcttgtttagatgatgagagtgttttgttttgctatttcgattatcttcaaaggtcatgagtgagtcgtgatggtaagagctcaggtgatggagggaggtgcttgccatgcttattgtgcagttggctgtgatgcgagctgctgggccacaaggtgccttttcctggattttccacccgtttgccacctttactttccccgcagaattcaaattcaggaaaactgatgtcctcatagagggagaaccaggagtgttttaaattggcatttgtggtttaaccctgagtacagccttttttgtcttacaggatatgtctttggtctataaatactattaaattgaattgttgaagctttaagttacttttaagacttcaagttaagaacccagaaggattgatttttgggaaccacatgctggtattgtctgtgttgtaagcttagtgaagttttaaaatttatattctaggaactcaacagaggcaattattatcccgactgcaaatcgacccagtaatggcagaaactctgcagatgagtcaaggttggtaatgtttcaagttgtactgtaatccagccatttcagttgccatttccatttcttacaccccatttaacgtatctcggatctcttagatcctgccctaagatgttatatttagatctgtgaaaatattttagggccaggagataagatctgcatttctttcatgttatatagtgttataattttttgcctcattggaaaactttgttcctttcacaccattccaagtgtgtccctagcactgtcggctgtcactctcctgctgtcaggagtgacctgcgtttctgatttaccctcccactctacccagcttttgtcattgccatgagtggcttttgtatcctgtttttcacctggttagccttatcctcttgtacttcattttggagtcttatcaccagggccacacctggaacttgttgttctagtgttctagagccactctagtttgcctgtctcctttcctctccccacagacacacatgccaggggctactccaggactggagctgacgccttcatttttattatctctgtcctcagtgcccagcccctgccagatgcatgttcaatgtcttaaaaatgactgcaggataaacacaggcaaccatgagagacccggaatcatctcagtccttctgtttcccctaagtctgtcttttgtgggaagctctggtccctagacccctctcagtcaggactccacagtcagtcactctgttccccgaccctcccccagctttccagctcagaaagtgtgcttttcctccctaagggtcagcctccaccagaggccagatcccactgggttggtgagccactggcatgtcacccactcctccaacttcattctctgcctcctgtcttctctctgtagaggtgttcagacattctctgcccgtgattttgctctctcatctcccagcagtccgtcctgcttcctccacaggagtatttgaaaaggttgacagccgagatctgtgtgtgggatccacttcatcagctcttgtgcatgttttctcttctgcctccttcagcttttcattgtacccatggtgcacgcagtttgaaatagcaagtagttctgtgaggcttatgaatgactgcagtccttagctcctatcacattttttattctaagatccctttgtttctgcatattctattaattttctaaaaacatactgattttgtgtacacaatactctttgttatttctctgtggtctgaaaggtggttttgacatttttcccctccctgcttcgtcttgttttctctaagtggtctgttttggctgtcttttatgctggaggttcccctctgatgtctggggatcctaggtggtcttacatttaagagtggagcactcagaaggtcactggtattctgggttcatgagttggggcatggggcactttgactttctgtttgaaactagaccctgtggtggaaagtgatttgtcctgcctgtctggtttgtgggcaccctgatgtcactgccttcaagactttcctctcaggctggtcagcttctccaaaacaaagtttttcaagtaatagcctggtagtcagagttctgcgagcttaagtggggaaagaaggctgggggaggcacctcaccattaattattatgtaatgtttatttaaccctcccccaaccattgtcagtccagtacttctttcatcatggctggtgtctcttggtccagggactctgttcttatcctctgaagagtctaaagctccactttctccaagggagaatgcatgcagtgggtaaagatttatcaggaaatctaattgcctttaaaaatttttaacagtgtaccttcaggtgattttgtcgtagcatctttctggcagagaccctaatgcttcatccataggcctctccgaagattatctacaggaaagcacatcaccagtcatcccaggtgtcttcagtgtagaggtcgggattggtgtggcaagcatcaaaaccaagaaaacagtggccaggtgcagtggctcacgcccataatcccagcacttggggaagccaaggcaggcagatcacttcaggtcaggagttccagaccagcctggccaacatggcgaaacccaatctctactaaaaaatacaaaaattagccaggcgtggtggtgcacatctgtaatcccagctactaaggaggctgaggcaggagccttgcttgaacccaggaggcggaggttgcagtgagctgagctcgcaccactgcactccagcctgggtgacagagcaagactgtctcaaacaaagaaaacagatacatggaattagagttgaagaagaactaactgcttcttggacacatctaatacacctcttttttgcctgccatttcttccatttcttcctaaggtccttttactgccagttcctgagcctttggagaatcttgtggtctgaattggattgcttcattattgccttagaattcagcttttacagatcccctgagttcttaatcatctgttttccactttgaaaatttctttttacacttattttctttgtgagtttatgctttcaaaacaaaaacaaaacccttattgacatttctgtgggctttcaggagggaacaaaaagtaaatgcatggggtcagcctgtggtctctactcagaagatgttacttactcccccgtctgtctggtctccatgtgacctgggctgctaacgttccgcttgcagagaggtgtgcgggagggaccggtgcacgctttcctcaaccctggagcatgttacacttgggttcccatactttctccaagctttgacctttcggcttccagttcactctgtctttattcttctcattccctttcattctcatgtgtcagcgcatctcctccattcctcctcaaaaggttagctttgctctctcccaccttcagcattattttcatctcttctgtgttcacccaacctatgaactggtagaactccttcgtctcagaaagtgcagagtggtgggaaggagtgaagcagcccctgggccactgttgggacccacctttgacagttgtgagacctcggtgaatcatttaataacttggagctgcaaacagtcatctgtaacatgggaggaaaccgactttgtaggctttgagtgaggattcagtgagagacggccaccctgaatatgttaaacacttctgtcaccttcggttttgactcagcatcttatttctgtccccccacctacaggtcaaatctgaattttctacttcctcttaaacatgggagagtcccacaaagactttaaatctaacatggaaatgtatctttgccccttttaactttgctctttttcttttgctaagtttctcatcccagctttctcttccgcctgtctccctttaccatctgtactgcccttgctggggaaggcgggcacgccccttcccaggatggagcatgtcttctcttcctgtcaggtgtgtgagaccaggacagacagcagagaatcttttcattcagagcctcaccctctgtcccgggcaacagcaggtcgagaactctggttcttccttaacactgtttttctaaaaaccagtttgatcaggccacttccttccttaggaacctctcttgatttcttttctcttttttttttttttggtttgagatggagtctccctctgtcactcgtgctggagtgcagtggcacaatcctgctcattgcagccttgacctcctgggcccaagcacttctcccacctcagcctcccaagtagctgggactgcgggcatgtgctcccacgcctggctaattttatttatttatttattttctggttgatgggaggtctcactatgttgcctaggccggtctcaaactcctgggcttatggaatccttgtgccttggcctcccagaatgttgggattacagacatgaaccgccacaccaggccacttgatttcttactaattatagaccagaatcgagagtcactgagacatagaagaacctttattatatgtgtcagccttccttggtatgtactgctgagcccaccacacacacccttccagccattccacattctaacctttctcagatgccttcggccttgtgaaagcccctttccttctacgtgcgttttcctctgcctgaagtgctgtgttcgtttctccgagtctctctccttgtttattcctgcttgttcctttactgctgacttcagatgttcctccttgctaagcttttcgttggttcttggctggagtgggctgttctgtattctcagcaccttgttcacatcccttttgggtcatgctattctgaaattgtatatgtgtctgtttttctttttttctttgtgtatctagctcagttctcttagttgttcagtaaatactcagtgaatgaacataaatgaataccctgtaaattttggtctctaagctttaaaagaagtgtattaacttcagtccgttgatggcgtattgataggtcagccattctgggttgtaggtcttggcatattttataaaatagtagatgatgtgagcttatggttatttgcattaaaggccagtgtttttcttgatacatatgtttaagtgtccattcacctttcagttaccttttaaagtagtcctcggtttataaccaactggaaattataccacttgaattctttttatcaggacatgattctaagtggtactgtgcgaagtgaacaaaccagattttggaaaagtggttcagcagtctgtgtattctaattatagggagcattaggactcaaattctccaggtttttagaaaagatttttgtactttaagggtatattgttaatatctgttgagatgcctcacctgagaacctttctctgctgtggttagggagtgttaatcagaatcacttgtgccgtgccctacgcgagaaggactccttgagttctttgaaaacatgtttggaatagaattatagccctgttttcctgagtggaaccagttgtgattttcctttgaaataatttgaatatataaaagattgacattcttctcacatatataatgttgggaatgtaaggtatattcaaaagtaaacatttgtggccaatttttttggctcagattactatgacatggaatccatggtccatgcagacacaagatcatttattctgaagaagccaaagctgtctgaggaagtagtagtggcaccaaaccaagagtcggggatgaagactgcagattcccttcgggtactttcaggacaccttatgcagacacggtagatggtttctttttcttgtgtagttaatttgtgtgattagatagtaaaggttaaccattcgtttgcagcttccctcctccccgccctaaccgctagcgtagagtgctttcattgattcagtagctagcccatgaatagttagccaaattcagttttcaagaattccagttcatctttcttgttcagaaatccattaacctacaaattacaactcagtgtatgatttaactctattaaagattcttttctttatgcaaattcaggaaatgcaagtttaaaagccagctgaccataatcaggtcagctctaaagagagttggcagatcaggtttgggtgatttttcccttagaaaattgactgtttctataaaagaagaaacatacagataattagcataaatgctgctggcccttgtgttctgagcattgatgctaattttttggtttgtttccatgttgaccctatgaagatcgaatgggtgatggggtcaggcttgaggggagattgtccttagtaagtacaggctggagggtcactggtgatgccactgtgactgttcatggccatcgtgtgttagcagagaacccaccagtgctgcacctggtagccctacctagtctttttttattgaaccaaacgcaaagccaagggagtgatagttctgctgaagagcactttagggggctcagcgttttgtgtttgtttccctaattctatggtattttttatctgtctggcagagatcttgtacaaccagataaacctgcaagtcccaagtttatagtgacgctggatggtgtccccagccccccaggatacatgtcagatcaagaggaggacatgtgctttgaaggaatgaaacccgtaaaccaaactgcagcctcaaacaagggactcagaggtctcctccacccacagcagttgcacttgctgagcaggcagcttgaggacccaaatggtagcttttctaacggtgtgttgagagctcagattttcagggtgctgtcattgtgaagggaatctttgacttgtttctctaccttgaatgaatattggttaaaggccttgcttttatttatattcagtaatggccttttttcttctttcagacaaacccaccaagtacatttcagactctttttcctgtgtctttttcataggtgggctgttactccagtttgaaaacggagttcagccatggaacctgagagacctcttccgcttatgctggctaaaggatgaaccaccattcttgttgccttctttacctttgtattttcttcagaaactgtactgccactttgcccttttatcagcaatagtctcttgcaattaacttgagagaaaaatttagatttgatgctatttctacctcagtgaaatttctttgaaaggagtttctcacctaatctatcaagatcttggaactgtttaaattaatgttgaagagtaatatttagcagaactcagatgaactcatttcagatagcaccatagtttttggcaggtgacagtttcttatcaccgtttctttcactgggtatcagtggtagctgcaacgccactgatcatttccattcatgatagagaatggtaattatgttccttatatcttctaaaatatttagaagcacctcttcattggcaggagggataattactcaatcttaaaagcgtacagattcaaaggaaaaacagtaatggattttgaaacatttccttgagtaatcctcttcttggaagagatatgaaaatgtattgaatacctttctcgatcattaaaaatagaatagacttcagagggaaatcatatgttagtggagcaataacacttagctttattttaattggttgcgtttcctactgtgaatcaatgacgtagtgtcgtggttttgattagtggagggagttgaaaatctgaccctatcaacaggaagaaaaacttaaaaaatagtaaaagctgcagtaggcagtcccgatttattgactctgtatgttttgtctaaagagaagactccagtgttttcactactcttgattttcaatttggtaccttaattttttggtctattaggatctggtttcatttaaatgtaggtgtccatatgaggctttatggggtatacatgtagcagcagtgacaccataaataatatgttagtaaaaattcttgccagtgctgtggccattgtgctgacagccatgatgagtggtgagcctcctttcccattgctttgactggggactcagtgtttccctgctgctcaaggatgaagctttgtaagattagcataggggtgtggctggagagactcctgcagaacagttctcaggagtctctagtctctgcaccacttcccctgtgagcagggagtttgaaactgcaattgcttctggttggttttatgttgggttgtttcaaggatgctaccaacaacaacatctgttttaacctgctgtcttttcactcactgtcatatggcagcacagattttatagcttgctttctttgttttttttttttttgagatagagtctctctgtcccccaggctggagtgcaatggagccatctcagctcactgcaacttctgccttccaggttgaaagccattcttctgcctcagtctcccaagtagctgggattacaggcatgcaccatcacacctggctaattttgtagtttaagtagagacggggttttaccatgttggtcaggctaatctccaactcctgacctcaagtgatccaccaacctcggcctcccaaagttctgggattacaggtgtgagccaccgtgcctggcctatagctttcaataaaaggtgaatttgcctcttaaaatttgaacagaaagttttaatagtttacaaagtcggtgtcagccagtgaagactaggggcatgaccttcgtatgacttaatgtttttaaaagaaagataaagtttctttgtaaggtattattgtaataatcacatttctttgtaaagtattatattgttcctgagtatctagctactttgctttccagctaggcttctcttgggtattctcttaatcttttatttgtactgggttcttgtgtatatattatagtctgctgtgtgtaatttattataggaaaagggtaagacacatttactttgcggggatgacacaaaaaacctgtaaaaattagagaaacttccagtcatctcacattttctttggaaccgattattcttgtatcttagaactaaaatgacttatactgttttgtttttagaaagggtatccctcctgttgcccaggctggagtgcattggcacagtcatggctcactgcagcctccacctcccaggctcaagtgattctcccacctcagcctcctgagtagttggttactacaggtgcacaccaccatgcctggctaattttttgtattttttgtagagatggggtttcaccatgttgcccaggctggtctgaaactcctgagctcaagtgatctgcccgcctcggcctcccaaagtgctggggttacaggcatgagccaccacatcctatttaaagcttaaataggacttttactatttttaaagtagcatagaaaactgtttgtatcaggcatagtcataattgctctttgatgctgctcctatctgggctgcatgactacatttgtgtgccttgttctcctgtagtgaggacagaatgtgggtcactggaacagtaagtactcatagaactagctgctgctgctattacgactggttgcctgttttgcattttttccgtttaatcatcagactctaaggaagacattattttctctttgtatagatgaggaaacagaattccaaaaagttagctaacatttgcacagagtgtctggctgagcaactaagtggcagagtcagattttaactgacctctggcaagaggactagaggaatacagttgaagtgatacttgctttcatgaacatgaatgtgaaccataatacataatacccatgatgctattttgtggggagtttaaggtgtctcagtccagaaattagcagctgattattgcctgtagctgtaattttacttattcagtgttatttaataaattgccagcattacaatttcgatgaaggcagatttttggcttactgaaacaggataaaaatctggcaacaggggtcccactttgccctgtcatagtaatcgaagctgtgattggatgtggcacagggagtggagtggatgggtgtgcacttgctttccaggctgctgctccccgtctgtcccttattgcatttatcatcttcagcccagtcagtcttgctgttaggggaactgcccagtctctgtaagtgatggcatttgtgaccccattgtaggtaaaaatgttttcccctttttagacattgctggctgagcgcggtggctcatgcctataatcccagcactttgggaggccgaggtgggtggatcgcttaagtcctggagttcaagaccagcctgggcaacgtggggaaaccctgtagccaggcgtggtggcacgtgctacttggtaggggctgaggtgggagtatcacttgagcctgggaggcagaggttgcagtgagccgagattacaccactggcacaccactgtactccatcctgggtgacagagcaggaccctgtcgtaaaaaaaaaaaaaaaaaaaaaaagtaaaagacattgctgagtttcgcacctggacttacagctcagcaggtgggaatccttttgtatttgggccactcatcatcttgctggcgtgtgaggattcacatctccttatcaccttacctgttttcagtttttatttaattttattagttccccacttgacgtccttctctatttttaattcagctatgaattagtattgagaattagaatttttggtgaaaaatttggccgtagttgcagagtcactgtcctctttccttttcacagtgagaactgttgtcttcttcctggcaaccttttataggattctatggccagtgttaatcccataatttgagctcacttattttatatgactgtacatttaacagaagattctaagacaggtttgagggaaatatgttaaaggtgctgtgtactgaattgatcataatgaatgaaatacttttatttcctttccctttgtagctgagatgagtgaactgagtgtggcacagaaaccagaaaaacttttggagcgctgcaagtactggcctgcttgtaaaaatggggatgagtgtgcctaccatcaccccatctcaccctgcaagtgagtaccatccccccatctcaccctgcaagtgagtaccatccccccatctcaccctgcaagtaccatcccccatctcacctggcaagtaccatcccatctcacccagcaagtaccatcccccacatctcaaccctcaagtgagtaccatcccatctcaccctgcaagtaccatcccatttcaccctgcaagtaccatcccccatctcaccctgcaagtaccatctccccatctcaccctgtaactaccatcccatctcaccctgcaagtgagtaccatccctgcatttcaccctgcaagtaccatctcatctcaccctgcaagtaccaccccctcatctcaccctgcaagtatcatcccccatctagccctgtaagtgcgagtaccatcccccatcttaccctgcaagtaccatcacccacttcaccctgcaagtaccatcccccacctcagcctgcaagtaccatcccccacctcagcctgcaagtaccatcccctatctcaccctgcaagtaccatccccatctcaccctgcaagtatcatcccccacctcaccctgcaagtaccatcccccatctcaccctgcaattgagtaccatcccccatctcaccctgcaagtaccatcccccatctcaccctgcaagtgagtaccatcccccatctcaccttgcaagtaccatcccccatctcaccctgcaagtaccatcccccatctcaccctgcaagtatcatctcaccctgcaagtgagtaccatccccccatctcatcctgcaagtaccatcccccatctcaccctgcaagtaccatcccccatctcaccctgcaagtaccatcccccatcttaccctgcaagtgaataccatccccatctcaccctgcaagtgaataccatccccatctcaccctgcaagtgaataccatcccccatctcaccctgcaagtgaataccatccccatctcatcctgcaagtgaataccatccccatctcaccctgcaagtcatagccagctgattttggctttcagtttagtgtctgtatcttacaccttattttgtttttgtttttctgtggacaagtttttagttttataactaaatggagtgacaattaccatggccctctccagagtagcgtatttcttgttcatgtatgtttgttgagaggcaagggtgggggggctttgtttgtgcctcggacctgtgagatactgaaatacctggggttccttaagaattctgtacgtttaagcagatgggtatatggtaactgccccagtttgtatgcattttggccacacgcagtatacacagattttgaggagttgagggaaaagttagttatgggtaatgaaaacattttggacttgggttaaatttttccttacaagctggctggctcaatgtaatgagctttatgagatggctttttggggcttcttttttttgccgggggtaggtcctatggatggaatcttcatttttaattcttttaaggaaatgatgtgggaataatacagctgtacatataaggagagtatgggatgagtctttttgtatcacaaagccttgcatagaggatgtgtttattgtattaatgagttcactgcataaaatatataccttttttattaagtggtgtgatttttatcacaaaagcttgtctttcttggtggcttggcttgagttaaaagcctgtgtttgtgttatcccaagctttggaataaatgattgtgtcctattttgatatatggtcttattttaaaatattctttttgttgctgttttttttgcatttctcaaaacaagtagtgatggggagtgtaaagagcccttatacacagaactaataatgcattgagaagattgaatatgaaatatgctttttttttgttttgtagagccttccccaattgtaaatttgctgaaaaatgtttgtttgttcacccaaattgtaaatatgatgcaaagtgtactaaaccagattgtcccttcactcatgtgagtagaagaattccagtactgtctccaaaaccaggtgagtgagtgactgtgctactacatttgggtaaaaaatataaaatggcattttgtgactgtaaatggaattgaacaaacaaaagatggtttcagaaataattttggcaggatcagttaatccaaccagtctttaaagagcaagtgtgcctatctgtagtattccgaagtattttgactagtgaatatataaaccttaccattctaatttaaaaatggttttcactttcaaaaaaaacatcagtagactgcattaaaaatgggttttccaaacagattggagatcagtcctggtttttattttgttagcagttgcaccaccagcaccaccttccagtagtcagctctgccgttacttccctgcttgtaagaagatggaatgtcccttctatcatccaaaagtaagaacttctattttctcaaatcaatttagtgacaacatctcaatttcctcatttaacttcttttttgtcagagttactacattggtgcaaaagtaattgcgatttttgccagtaaaactattaagttgttcctcgtcactgaacctccatctggccccttaggccaagtggtctgaaactgttcaatgttagtatcccaagcactcagtggggggaagcatatctttgctagtcacattttccattattccctgcatttaagtatatggatgggttttagcgggggctggggggcagtttgaacctaatgtcagaactgagatgaagaaatccagtaggtactgcttaaaaccatccaaacttgtactgatgatggttgatgaatctccagatgtttagttggtcaaaatgaattatctccttcttgccccggtagcttgaggaccatatgaaggccttcacttgcccccatctgtaactgggcgtagatgagggtactcagtgaagagtgtaagggataattagaagtttttgtggtatgctaaactaccttttgaaattgtacttgctgtgattctttgactagaattttgtgtctcaaggttaagtccatttttcaaggcttcactagtattaaaatggtccttatagatggaatctcttactctgttaatggttagggtgggctggttattgtctcctaagttgtatgttggccaggtgaggtgggtcaggcctgctatcctagtactttgggaggtagaggcagaagtggaaggatcgtttgagcccgggagtttgaaaccagcctaggcaacatttaagagaccccatctcttaaaaaaaaaaaaaacaggcttggtagcacacgcctgtagtcccagctactcgggagactgaggcaagaggtcatgccacttcactccagcctgggtgacagagtgagaccctgtctcaaataataaaataatgtgtttacttatattagccttgtggatattgttgaagctctgttatctctattcagcattgtaggtttaacactcaatgtacaagaccggactgcacattctaccatcccaccattaatgtcccaccacgacatgccttgaaatggattcgacctcaaaccaggtaaacattcaaattcgtttttctcatgtcagttcaaattcttttttctaatttgcagtttctaaatttataagcacacaaaattggaaactagactgttactttgaatttttttctttgctgtttaattatagaaggctcctttggcaaaataatttactacatgggctaaattttacattatccagtggttacttttttaacctagattatcttgctctgttgcccaggttggagtgcagtcacactatcatagctcactgcagcctcaaacccctgggttcaatccatcctcccacctgtagctgagactacaagcgtgtgcctctatacctggctaattttttttattttaagtagagatggggtcttgaactcctgagctgaagcgatatccttccaccgtggccttccaaagtaccaggattacaggcatgagccaccacacccagccagattttaacttctcattatatactacgcaaacatatactaaggccagcaggagtatatatatgtgtactgtacttgaatttcacatccattttcttcgacattagcaactgggagatactgaaaggaagtttcaaaatattttagtgtggccagaaaatttaattacatatggtattatcttttatctacctgacataattgaattatttttaaaaatctgccatttatattgtaatcttatgaccaaatatttattgcttaaaactagtcaactttttaaactgagatatatggtatatatggatacaaagcagataattaaaacaatttttggttctgttcattcagcgaatagcacccagtcctgcctggcagaagatcatgcagtttggaagttttcatgtactgatgaaagatactctacagaacttgtcaaatctttgaaacttggaatatattgctttcataatatgaagttttattgcctatc

SEQ ID NO: 15033 - DNA, 1384 bp, Homo sapiens
gggtttactggaagaggagctatacagatggtacttagaggatgtagggccctacgtattagggcttcttagttgtagcgaagagcaattggtctggtacgtttagctttttcacatttagttttgaattctgactctagaaatgtacaaccccatcttttgaattacaggttttaagatgttatttgctcttaatacgtcttaaggtaacagccttgatcactgcttttactttcgatgaaataacttaatgagctgtgaagaaaaaattatcagattttaagggagagaattttatgaaaatgtctttgaggttcctgtcacctttatgagaatgtcttcaaagtttccatcaccacctctaccaatttttcttccaccggagccagtggacttaggttccataacaagctcctcttgttcactgaatgagctagacaatatttcccaccttttaaggaaaatatcagctgatatcaatgaaattaaaggaatgaaagcagctattttgacagtggaagcaaatctttttgatctaaatgttagagtgtccaagaatgaagcaaaaatttcatctttggaggttaaaatgaatgaatattcaacaacatatgaatgcaacagacagtttgaagatcaagaagaagatactgaatcacagtcaagaactactgatgtaaaaataatcggcttccttagaaacgttgagaaaggaactcaacagaggcaattattatcccgactgcaaatcgacccagtaatggcagaaactctgcagatgagtcaagctgagatgagtgaactgagtgtggcacagaaaccagaaaaacttttggagcgctgcaagtactggcctgcttgtaaaaatggggatgagtgtgcctaccatcaccccatctcaccctgcaaagccttccccaattgtaaatttgctgaaaaatgtttgtttgttcacccaaattgtaaatatgatgcaaagtgtactaaaccagattgtcccttcactcatgtgagtagaagaattccagtactgtctccaaaaccagttgcaccaccagcaccaccttccagtagtcagctctgccgttacttccctgcttgtaagaagatggaatgtcccttctatcatccaaaacattgtaggtttaacactcaatgtacaagaccggactgcacattctaccatcccaccattaatgtcccaccacgacatgccttgaaatggattcgacctcaaaccagcgaatagcacccagtcctgcctggcagaagatcatgcagtttggaagttttcatgtactgatgaaagatactctacagaacttgtcaaatctttgaaacttggaatatattgctttcataatatgaagttttattgcctatc

SEQ ID NO: 15034 - DNA, 2007 bp, Homo sapiens
cggagcgtggctgcggctgaagtagccgccgggaaatggaaggacaggcgcaggcccggctggagccaccaccgcggcgcacggcgccgctttggatccgctgcgggagagtgccattaaggggaaattacaagaattaggagcttatgttgatgaagaacttcctgattacattatggtgatggtggccaacaagaaaagtcaggaccaaatgacagaggatctgtccctgtttctagggaacaacacaattcgattcaccgtatggcttcatggtgtattagataaacttcgctctgttacaactgaaccctctagtctgaagtcttctgataccaacatctttgatagtaacgtgccttcaaacaagagcaatttcagtcggggagatgagaggaggcatgaagctgcagtgccaccacttgccattcctagcgcgagacctgaaaaaagagattccagagtttctacaagttcgcaggagtcaaaaaccacaaatgtcagacagacttacgatgatggagctgcaacccgactaatgtcaacagtgaaacctttgagggagccagcaccctctgaagatgtgattgatattaagccagaaccagatgatctcattgacgaagacctcaactttgtgcaggagaatcccttatctcagaaaaaacctacagtgacacttacatatggttcttctcgcccttctattgaaatttatcgaccacctgcaagtagaaatgcagatagtggtgttcatttaaacaggttgcaatttcaacagcagcagaatagtattcatgctgccaagcagcttgatatgcagagtagttgggtatatgaaacaggacgtttgtgtgaaccagaggtgcttaacagcttagaagaaacgtatagtccgttctttagaaacaactcggagaaaatgagtatggaggatgaaaactttcggaagagaaagttgcctgtggtaagttcagttgttaaagtaaaaaaattcaatcatgatggagaagaggaggaagaagatgatgattacgggtctcgaacaggaagcatctccagcagtgtgtctgtgcctgcaaagcctgaaaggagaccttctcttccaccttctaaacaagctaacaagaatctgattttgaaggctatatctgaagctcaagaatccgtaacaaaaacaactaactactctacagttccacagaaacagacacttccagttgctcccagaactcgaacttctcaagaagaattgctagcagaagtggtccagggacaaagtaggacccccagaataagtccccccattaaagaagaggaaacaaaaggagattctgtagaaaaaaatcaaggaactcaacagaggcaattattatcccgactgcaaatcgacccagtaatggcagaaactctgcagatgagtcaagctgagatgagtgaactgagtgtggcacagaaaccagaaaaacttttggagcgctgcaagtactggcctgcttgtaaaaatggggatgagtgtgcctaccatcaccccatctcaccctgcaaagccttccccaattgtaaatttgctgaaaaatgtttgtttgttcacccaaattgtaaatatgatgcaaagtgtactaaaccagattgtcccttcactcatgtgagtagaagaattccagtactgtctccaaaaccagcagttgcaccaccagcaccaccttccagtagtcagctctgccgttacttccctgcttgtaagaagatggaatgtcccttctatcatccaaaacattgtaggtttaacactcaatgtacaagaccggactgcacattctaccatcccaccattaatgtcccaccacgacatgccttgaaatggattcgacctcaaaccagcgaatagcacccagtcctgcctggcagaagatcatgcagtttggaagttttcatgtactgatgaaagatactctacagaacttgtcaaatctttgaaacttggaatatattgctttcataata

SEQ ID NO: 15035 - DNA, 2195 bp, Homo sapiens
atggagatcggcaccgagatcagccgcaagatccggagtgccattaaggggaaattacaagaattaggagcttatgttgatgaagaacttcctgattacattatggtgatggtggccaacaagaaaagtcaggaccaaatgacagaggatctgtccctgtttctagggaacaacacaattcgattcaccgtatggcttcatggtgtattagataaacttcgctctgttacaactgaaccctctagtctgaagtcttctgataccaacatctttgatagtaacgtgccttcaaacaagagcaatttcagtcggggagatgagaggaggcatgaagctgcagtgccaccacttgccattcctagcgcgagacctgaaaaaagagattccagagtttctacaagttcgcaggagtcaaaaaccacaaatgtcagacagacttacgatgatggagctgcaacccgactaatgtcaacagtgaaacctttgagggagccagcaccctctgaagatgtgattgatattaagccagaaccagatgatctcattgacgaagacctcaactttgtgcaggagaatcccttatctcagaaaaaacctacagtgacacttacatatggttcttctcgcccttctattgaaatttatcgaccacctgcaagtagaaatgcagatagtggtgttcatttaaacaggttgcaatttcaacagcagcagaatagtattcatgctgccaagcagcttgatatgcagagtagttgggtatatgaaacaggacgtttgtgtgaaccagaggtgcttaacagcttagaagaaacgtatagtccgttctttagaaacaactcggagaaaatgagtatggaggatgaaaactttcggaagagaaagttgcctgtggtaagttcagttgttaaagtaaaaaaattcaatcatgatggagaagaggaggaagaagatgatgattacgggtctcgaacaggaagcatctccagcagtgtgtctgtgcctgcaaagcctgaaaggagaccttctcttccaccttctaaacaagctaacaagaatctgattttgaaggctatatctgaagctcaagaatccgtaacaaaaacaactaactactctacagttccacagaaacagacacttccagttgctcccagaactcgaacttctcaagaagaattgctagcagaagtggtccagggacaaagtaggacccccagaataagtccccccattaaagaagaggaaacaaaaggagattctgtagaaaaaaatcaagattactatgacatggaatccatggtccatgcagacacaagatcatttattctgaagaagccaaagctgtctgaggaagtagtagtggcaccaaaccaagagtcggggatgaagactgcagattcccttcgggtactttcaggacaccttatgcagacacgagatcttgtacaaccagataaacctgcaagtcccaagtttatagtgacgctggatggtgtccccagccccccaggatacatgtcagatcaagaggaggacatgtgctttgaaggaatgaaacccgtaaaccaaactgcagcctcaaacaagggactcagaggtctcctccacccacagcagttgcacttgctgagcaggcagcttgaggacccaaatggtagcttttctaacgctgagatgagtgaactgagtgtggcacagaaaccagaaaaacttttggagcgctgcaagtactggcctgcttgtaaaaatggggatgagtgtgcctaccatcaccccatctcaccctgcaaagccttccccaattgtaaatttgctgaaaaatgtttgtttgttcacccaaattgtaaatatgatgcaaagtgtactaaaccagattgtcccttcactcatgtgagtagaagaattccagtactgtctccaaaaccagcagttgcaccaccagcaccaccttccagtagtcagctctgccgttacttccctgcttgtaagaagatggaatgtcccttctatcatccaaaacattgtaggtttaacactcaatgtacaagaccggactgcacattctaccatcccaccattaatgtcccaccacgacatgccttgaaatggattcgacctcaaaccagcgaatagcacccagtcctgcctggcagaagatcatgcagtttggaagttttcatgtactgatgaaa

SEQ ID NO: 15036 - DNA, 17517 bp, Homo sapiens
agaggatgtagggccctacgtattagggcttcttagttgtagcgaagagcaattggtctggtacgtttagctttttcacatttagttttgaattctgactctagaaatgtacaaccccatcttttgaattacaggttttaagatgttatttgctcttaatacgtcttaaggtaacagccttgatcactgcttttactttcgatgaaataacttaatgagctgtgaagaaaaaattatcagattttaagggagagaattttatgaaaatgtctttgaggttcctgtcacctttatgagaatgtcttcaaagtttccatcaccacctctaccaatttttcttccaccggagccagtggacttaggttccataacaagctcctcttgttcactgaatgagctagacaatatttcccaccttttaaggaaaatatcagctgatatcaatgaaattaaaggaatgaaagcagctattttgacagtggaagcaaatctttttgatctaaatgttagagtgtccaagaatgaagcaaaaatttcatctttggaggttaaaatgaatgaatattcaacaacatatgaatgcaacagacagtttgaagatcaagaagaagatactgaatcacagtcaagaactactgatgtaaaaataatcggcttccttagaaacgttgagaaaggtaaactcttaatatatgatatgttctaggtacccatcctttgatctgtatctttccacgtatgttgactgtagctctgatgtggagggagcaagttacagagaacttgaatttttcatggacctttaatgacaaatttggattctgcttgatttagcttagcaatctagaattgatcagaattccatcctctttaatggagctctctaaaacgatgttttgaaaagacagatgaacctagagcaatgaagcaaaacttgaaatgtggaagtgtggtctttcatgtgtcttgtgaaattattttaaaatgtctcattctttcatcatgtactgttgatgtgaaggagacctgttgcagtatttggatggaaagagcattcttcctgtaacttttcacctcagttttccaagcttcccacaggaatgcaacttgacctaagtgtcatcttcgttacagttcctcagaatgtgtgtttttttatggtaataattctggaaggaattgacttttttgggacgcaccagtaaaatttcatataacttatgttttaaaggaaactaactgatacaatttcaaatcgagtataggttttaaaatttaaaaacaccttttaatgaaatgtggtgcttggtgggagatggcccacttaacatctttgcactgagtaagcaaagcctgtccttgtgaagccacctgtaatggatatacccaaaatcagcatgtgggcatcttagtaagatttcagtatttgcaaccctatcagttacatccctttgtacactgtagtgcagtaccttataatgagcaagtgagtgcctgatgtctgctaagcgctgtgggggctacagaaaagtgtgacattctcccatcctcaaggagcttaacatcaaatcgaggatggaaaaaaatcagttctttgtccctattttgtgcagtcagactgctgggcatattattgttaggaatagtgaacctaataggaattaatgttaggagcctattttagaagaaataagtagttgaacatcttttcttgtggaagaggcaaagaattattatcatgctttgctaacatagggtgtggattgtagagctgagtgtcttattgttttctttgcatgcatcgaagcccagagtttgtcttttaggaactcttgtttagatgatgagagtgttttgttttgctatttcgattatcttcaaaggtcatgagtgagtcgtgatggtaagagctcaggtgatggagggaggtgcttgccatgcttattgtgcagttggctgtgatgcgagctgctgggccacaaggtgccttttcctggattttccacccgtttgccacctttactttccccgcagaattcaaattcaggaaaactgatgtcctcatagagggagaaccaggagtgttttaaattggcatttgtggtttaaccctgagtacagccttttttgtcttacaggatatgtctttggtctataaatactattaaattgaattgttgaagctttaagttacttttaagacttcaagttaagaacccagaaggattgatttttgggaaccacatgctggtattgtctgtgttgtaagcttagtgaagttttaaaatttatattctaggaactcaacagaggcaattattatcccgactgcaaatcgacccagtaatggcagaaactctgcagatgagtcaaggttggtaatgtttcaagttgtactgtaatccagccatttcagttgccatttccatttcttacaccccatttaacgtatctcggatctcttagatcctgccctaagatgttatatttagatctgtgaaaatattttagggccaggagataagatctgcatttctttcatgttatatagtgttataattttttgcctcattggaaaactttgttcctttcacaccattccaagtgtgtccctagcactgtcggctgtcactctcctgctgtcaggagtgacctgcgtttctgatttaccctcccactctacccagcttttgtcattgccatgagtggcttttgtatcctgtttttcacctggttagccttatcctcttgtacttcattttggagtcttatcaccagggccacacctggaacttgttgttctagtgttctagagccactctagtttgcctgtctcctttcctctccccacagacacacatgccaggggctactccaggactggagctgacgccttcatttttattatctctgtcctcagtgcccagcccctgccagatgcatgttcaatgtcttaaaaatgactgcaggataaacacaggcaaccatgagagacccggaatcatctcagtccttctgtttcccctaagtctgtcttttgtgggaagctctggtccctagacccctctcagtcaggactccacagtcagtcactctgttccccgaccctcccccagctttccagctcagaaagtgtgcttttcctccctaagggtcagcctccaccagaggccagatcccactgggttggtgagccactggcatgtcacccactcctccaacttcattctctgcctcctgtcttctctctgtagaggtgttcagacattctctgcccgtgattttgctctctcatctcccagcagtccgtcctgcttcctccacaggagtatttgaaaaggttgacagccgagatctgtgtgtgggatccacttcatcagctcttgtgcatgttttctcttctgcctccttcagcttttcattgtacccatggtgcacgcagtttgaaatagcaagtagttctgtgaggcttatgaatgactgcagtccttagctcctatcacattttttattctaagatccctttgtttctgcatattctattaattttctaaaaacatactgattttgtgtacacaatactctttgttatttctctgtggtctgaaaggtggttttgacatttttcccctccctgcttcgtcttgttttctctaagtggtctgttttggctgtcttttatgctggaggttcccctctgatgtctggggatcctaggtggtcttacatttaagagtggagcactcagaaggtcactggtattctgggttcatgagttggggcatggggcactttgactttctgtttgaaactagaccctgtggtggaaagtgatttgtcctgcctgtctggtttgtgggcaccctgatgtcactgccttcaagactttcctctcaggctggtcagcttctccaaaacaaagtttttcaagtaatagcctggtagtcagagttctgcgagcttaagtggggaaagaaggctgggggaggcacctcaccattaattattatgtaatgtttatttaaccctcccccaaccattgtcagtccagtacttctttcatcatggctggtgtctcttggtccagggactctgttcttatcctctgaagagtctaaagctccactttctccaagggagaatgcatgcagtgggtaaagatttatcaggaaatctaattgcctttaaaaatttttaacagtgtaccttcaggtgattttgtcgtagcatctttctggcagagaccctaatgcttcatccataggcctctccgaagattatctacaggaaagcacatcaccagtcatcccaggtgtcttcagtgtagaggtcgggattggtgtggcaagcatcaaaaccaagaaaacagtggccaggtgcagtggctcacgcccataatcccagcacttggggaagccaaggcaggcagatcacttcaggtcaggagttccagaccagcctggccaacatggcgaaacccaatctctactaaaaaatacaaaaattagccaggcgtggtggtgcacatctgtaatcccagctactaaggaggctgaggcaggagccttgcttgaacccaggaggcggaggttgcagtgagctgagctcgcaccactgcactccagcctgggtgacagagcaagactgtctcaaacaaagaaaacagatacatggaattagagttgaagaagaactaactgcttcttggacacatctaatacacctcttttttgcctgccatttcttccatttcttcctaaggtccttttactgccagttcctgagcctttggagaatcttgtggtctgaattggattgcttcattattgccttagaattcagcttttacagatcccctgagttcttaatcatctgttttccactttgaaaatttctttttacacttattttctttgtgagtttatgctttcaaaacaaaaacaaaacccttattgacatttctgtgggctttcaggagggaacaaaaagtaaatgcatggggtcagcctgtggtctctactcagaagatgttacttactcccccgtctgtctggtctccatgtgacctgggctgctaacgttccgcttgcagagaggtgtgcgggagggaccggtgcacgctttcctcaaccctggagcatgttacacttgggttcccatactttctccaagctttgacctttcggcttccagttcactctgtctttattcttctcattccctttcattctcatgtgtcagcgcatctcctccattcctcctcaaaaggttagctttgctctctcccaccttcagcattattttcatctcttctgtgttcacccaacctatgaactggtagaactccttcgtctcagaaagtgcagagtggtgggaaggagtgaagcagcccctgggccactgttgggacccacctttgacagttgtgagacctcggtgaatcatttaataacttggagctgcaaacagtcatctgtaacatgggaggaaaccgactttgtaggctttgagtgaggattcagtgagagacggccaccctgaatatgttaaacacttctgtcaccttcggttttgactcagcatcttatttctgtccccccacctacaggtcaaatctgaattttctacttcctcttaaacatgggagagtcccacaaagactttaaatctaacatggaaatgtatctttgccccttttaactttgctctttttcttttgctaagtttctcatcccagctttctcttccgcctgtctccctttaccatctgtactgcccttgctggggaaggcgggcacgccccttcccaggatggagcatgtcttctcttcctgtcaggtgtgtgagaccaggacagacagcagagaatcttttcattcagagcctcaccctctgtcccgggcaacagcaggtcgagaactctggttcttccttaacactgtttttctaaaaaccagtttgatcaggccacttccttccttaggaacctctcttgatttcttttctcttttttttttttttggtttgagatggagtctccctctgtcactcgtgctggagtgcagtggcacaatcctgctcattgcagccttgacctcctgggcccaagcacttctcccacctcagcctcccaagtagctgggactgcgggcatgtgctcccacgcctggctaattttatttatttatttattttctggttgatgggaggtctcactatgttgcctaggccggtctcaaactcctgggcttatggaatccttgtgccttggcctcccagaatgttgggattacagacatgaaccgccacaccaggccacttgatttcttactaattatagaccagaatcgagagtcactgagacatagaagaacctttattatatgtgtcagccttccttggtatgtactgctgagcccaccacacacacccttccagccattccacattctaacctttctcagatgccttcggccttgtgaaagcccctttccttctacgtgcgttttcctctgcctgaagtgctgtgttcgtttctccgagtctctctccttgtttattcctgcttgttcctttactgctgacttcagatgttcctccttgctaagcttttcgttggttcttggctggagtgggctgttctgtattctcagcaccttgttcacatcccttttgggtcatgctattctgaaattgtatatgtgtctgtttttctttttttctttgtgtatctagctcagttctcttagttgttcagtaaatactcagtgaatgaacataaatgaataccctgtaaattttggtctctaagctttaaaagaagtgtattaacttcagtccgttgatggcgtattgataggtcagccattctgggttgtaggtcttggcatattttataaaatagtagatgatgtgagcttatggttatttgcattaaaggccagtgtttttcttgatacatatgtttaagtgtccattcacctttcagttaccttttaaagtagtcctcggtttataaccaactggaaattataccacttgaattctttttatcaggacatgattctaagtggtactgtgcgaagtgaacaaaccagattttggaaaagtggttcagcagtctgtgtattctaattatagggagcattaggactcaaattctccaggtttttagaaaagatttttgtactttaagggtatattgttaatatctgttgagatgcctcacctgagaacctttctctgctgtggttagggagtgttaatcagaatcacttgtgccgtgccctacgcgagaaggactccttgagttctttgaaaacatgtttggaatagaattatagccctgttttcctgagtggaaccagttgtgattttcctttgaaataatttgaatatataaaagattgacattcttctcacatatataatgttgggaatgtaaggtatattcaaaagtaaacatttgtggccaatttttttggctcagattactatgacatggaatccatggtccatgcagacacaagatcatttattctgaagaagccaaagctgtctgaggaagtagtagtggcaccaaaccaagagtcggggatgaagactgcagattcccttcgggtactttcaggacaccttatgcagacacggtagatggtttctttttcttgtgtagttaatttgtgtgattagatagtaaaggttaaccattcgtttgcagcttccctcctccccgccctaaccgctagcgtagagtgctttcattgattcagtagctagcccatgaatagttagccaaattcagttttcaagaattccagttcatctttcttgttcagaaatccattaacctacaaattacaactcagtgtatgatttaactctattaaagattcttttctttatgcaaattcaggaaatgcaagtttaaaagccagctgaccataatcaggtcagctctaaagagagttggcagatcaggtttgggtgatttttcccttagaaaattgactgtttctataaaagaagaaacatacagataattagcataaatgctgctggcccttgtgttctgagcattgatgctaattttttggtttgtttccatgttgaccctatgaagatcgaatgggtgatggggtcaggcttgaggggagattgtccttagtaagtacaggctggagggtcactggtgatgccactgtgactgttcatggccatcgtgtgttagcagagaacccaccagtgctgcacctggtagccctacctagtctttttttattgaaccaaacgcaaagccaagggagtgatagttctgctgaagagcactttagggggctcagcgttttgtgtttgtttccctaattctatggtattttttatctgtctggcagagatcttgtacaaccagataaacctgcaagtcccaagtttatagtgacgctggatggtgtccccagccccccaggatacatgtcagatcaagaggaggacatgtgctttgaaggaatgaaacccgtaaaccaaactgcagcctcaaacaagggactcagaggtctcctccacccacagcagttgcacttgctgagcaggcagcttgaggacccaaatggtagcttttctaacggtgtgttgagagctcagattttcagggtgctgtcattgtgaagggaatctttgacttgtttctctaccttgaatgaatattggttaaaggccttgcttttatttatattcagtaatggccttttttcttctttcagacaaacccaccaagtacatttcagactctttttcctgtgtctttttcataggtgggctgttactccagtttgaaaacggagttcagccatggaacctgagagacctcttccgcttatgctggctaaaggatgaaccaccattcttgttgccttctttacctttgtattttcttcagaaactgtactgccactttgcccttttatcagcaatagtctcttgcaattaacttgagagaaaaatttagatttgatgctatttctacctcagtgaaatttctttgaaaggagtttctcacctaatctatcaagatcttggaactgtttaaattaatgttgaagagtaatatttagcagaactcagatgaactcatttcagatagcaccatagtttttggcaggtgacagtttcttatcaccgtttctttcactgggtatcagtggtagctgcaacgccactgatcatttccattcatgatagagaatggtaattatgttccttatatcttctaaaatatttagaagcacctcttcattggcaggagggataattactcaatcttaaaagcgtacagattcaaaggaaaaacagtaatggattttgaaacatttccttgagtaatcctcttcttggaagagatatgaaaatgtattgaatacctttctcgatcattaaaaatagaatagacttcagagggaaatcatatgttagtggagcaataacacttagctttattttaattggttgcgtttcctactgtgaatcaatgacgtagtgtcgtggttttgattagtggagggagttgaaaatctgaccctatcaacaggaagaaaaacttaaaaaatagtaaaagctgcagtaggcagtcccgatttattgactctgtatgttttgtctaaagagaagactccagtgttttcactactcttgattttcaatttggtaccttaattttttggtctattaggatctggtttcatttaaatgtaggtgtccatatgaggctttatggggtatacatgtagcagcagtgacaccataaataatatgttagtaaaaattcttgccagtgctgtggccattgtgctgacagccatgatgagtggtgagcctcctttcccattgctttgactggggactcagtgtttccctgctgctcaaggatgaagctttgtaagattagcataggggtgtggctggagagactcctgcagaacagttctcaggagtctctagtctctgcaccacttcccctgtgagcagggagtttgaaactgcaattgcttctggttggttttatgttgggttgtttcaaggatgctaccaacaacaacatctgttttaacctgctgtcttttcactcactgtcatatggcagcacagattttatagcttgctttctttgttttttttttttttgagatagagtctctctgtcccccaggctggagtgcaatggagccatctcagctcactgcaacttctgccttccaggttgaaagccattcttctgcctcagtctcccaagtagctgggattacaggcatgcaccatcacacctggctaattttgtagtttaagtagagacggggttttaccatgttggtcaggctaatctccaactcctgacctcaagtgatccaccaacctcggcctcccaaagttctgggattacaggtgtgagccaccgtgcctggcctatagctttcaataaaaggtgaatttgcctcttaaaatttgaacagaaagttttaatagtttacaaagtcggtgtcagccagtgaagactaggggcatgaccttcgtatgacttaatgtttttaaaagaaagataaagtttctttgtaaggtattattgtaataatcacatttctttgtaaagtattatattgttcctgagtatctagctactttgctttccagctaggcttctcttgggtattctcttaatcttttatttgtactgggttcttgtgtatatattatagtctgctgtgtgtaatttattataggaaaagggtaagacacatttactttgcggggatgacacaaaaaacctgtaaaaattagagaaacttccagtcatctcacattttctttggaaccgattattcttgtatcttagaactaaaatgacttatactgttttgtttttagaaagggtatccctcctgttgcccaggctggagtgcattggcacagtcatggctcactgcagcctccacctcccaggctcaagtgattctcccacctcagcctcctgagtagttggttactacaggtgcacaccaccatgcctggctaattttttgtattttttgtagagatggggtttcaccatgttgcccaggctggtctgaaactcctgagctcaagtgatctgcccgcctcggcctcccaaagtgctggggttacaggcatgagccaccacatcctatttaaagcttaaataggacttttactatttttaaagtagcatagaaaactgtttgtatcaggcatagtcataattgctctttgatgctgctcctatctgggctgcatgactacatttgtgtgccttgttctcctgtagtgaggacagaatgtgggtcactggaacagtaagtactcatagaactagctgctgctgctattacgactggttgcctgttttgcattttttccgtttaatcatcagactctaaggaagacattattttctctttgtatagatgaggaaacagaattccaaaaagttagctaacatttgcacagagtgtctggctgagcaactaagtggcagagtcagattttaactgacctctggcaagaggactagaggaatacagttgaagtgatacttgctttcatgaacatgaatgtgaaccataatacataatacccatgatgctattttgtggggagtttaaggtgtctcagtccagaaattagcagctgattattgcctgtagctgtaattttacttattcagtgttatttaataaattgccagcattacaatttcgatgaaggcagatttttggcttactgaaacaggataaaaatctggcaacaggggtcccactttgccctgtcatagtaatcgaagctgtgattggatgtggcacagggagtggagtggatgggtgtgcacttgctttccaggctgctgctccccgtctgtcccttattgcatttatcatcttcagcccagtcagtcttgctgttaggggaactgcccagtctctgtaagtgatggcatttgtgaccccattgtaggtaaaaatgttttcccctttttagacattgctggctgagcgcggtggctcatgcctataatcccagcactttgggaggccgaggtgggtggatcgcttaagtcctggagttcaagaccagcctgggcaacgtggggaaaccctgtagccaggcgtggtggcacgtgctacttggtaggggctgaggtgggagtatcacttgagcctgggaggcagaggttgcagtgagccgagattacaccactggcacaccactgtactccatcctgggtgacagagcaggaccctgtcgtaaaaaaaaaaaaaaaaaaaaaaagtaaaagacattgctgagtttcgcacctggacttacagctcagcaggtgggaatccttttgtatttgggccactcatcatcttgctggcgtgtgaggattcacatctccttatcaccttacctgttttcagtttttatttaattttattagttccccacttgacgtccttctctatttttaattcagctatgaattagtattgagaattagaatttttggtgaaaaatttggccgtagttgcagagtcactgtcctctttccttttcacagtgagaactgttgtcttcttcctggcaaccttttataggattctatggccagtgttaatcccataatttgagctcacttattttatatgactgtacatttaacagaagattctaagacaggtttgagggaaatatgttaaaggtgctgtgtactgaattgatcataatgaatgaaatacttttatttcctttccctttgtagctgagatgagtgaactgagtgtggcacagaaaccagaaaaacttttggagcgctgcaagtactggcctgcttgtaaaaatggggatgagtgtgcctaccatcaccccatctcaccctgcaagtgagtaccatccccccatctcaccctgcaagtgagtaccatccccccatctcaccctgcaagtaccatcccccatctcacctggcaagtaccatcccatctcacccagcaagtaccatcccccacatctcaaccctcaagtgagtaccatcccatctcaccctgcaagtaccatcccatttcaccctgcaagtaccatcccccatctcaccctgcaagtaccatctccccatctcaccctgtaactaccatcccatctcaccctgcaagtgagtaccatccctgcatttcaccctgcaagtaccatctcatctcaccctgcaagtaccaccccctcatctcaccctgcaagtatcatcccccatctagccctgtaagtgcgagtaccatcccccatcttaccctgcaagtaccatcacccacttcaccctgcaagtaccatcccccacctcagcctgcaagtaccatcccccacctcagcctgcaagtaccatcccctatctcaccctgcaagtaccatccccatctcaccctgcaagtatcatcccccacctcaccctgcaagtaccatcccccatctcaccctgcaattgagtaccatcccccatctcaccctgcaagtaccatcccccatctcaccctgcaagtgagtaccatcccccatctcaccttgcaagtaccatcccccatctcaccctgcaagtaccatcccccatctcaccctgcaagtatcatctcaccctgcaagtgagtaccatccccccatctcatcctgcaagtaccatcccccatctcaccctgcaagtaccatcccccatctcaccctgcaagtaccatcccccatcttaccctgcaagtgaataccatccccatctcaccctgcaagtgaataccatccccatctcaccctgcaagtgaataccatcccccatctcaccctgcaagtgaataccatccccatctcatcctgcaagtgaataccatccccatctcaccctgcaagtcatagccagctgattttggctttcagtttagtgtctgtatcttacaccttattttgtttttgtttttctgtggacaagtttttagttttataactaaatggagtgacaattaccatggccctctccagagtagcgtatttcttgttcatgtatgtttgttgagaggcaagggtgggggggctttgtttgtgcctcggacctgtgagatactgaaatacctggggttccttaagaattctgtacgtttaagcagatgggtatatggtaactgccccagtttgtatgcattttggccacacgcagtatacacagattttgaggagttgagggaaaagttagttatgggtaatgaaaacattttggacttgggttaaatttttccttacaagctggctggctcaatgtaatgagctttatgagatggctttttggggcttcttttttttgccgggggtaggtcctatggatggaatcttcatttttaattcttttaaggaaatgatgtgggaataatacagctgtacatataaggagagtatgggatgagtctttttgtatcacaaagccttgcatagaggatgtgtttattgtattaatgagttcactgcataaaatatataccttttttattaagtggtgtgatttttatcacaaaagcttgtctttcttggtggcttggcttgagttaaaagcctgtgtttgtgttatcccaagctttggaataaatgattgtgtcctattttgatatatggtcttattttaaaatattctttttgttgctgttttttttgcatttctcaaaacaagtagtgatggggagtgtaaagagcccttatacacagaactaataatgcattgagaagattgaatatgaaatatgctttttttttgttttgtagagccttccccaattgtaaatttgctgaaaaatgtttgtttgttcacccaaattgtaaatatgatgcaaagtgtactaaaccagattgtcccttcactcatgtgagtagaagaattccagtactgtctccaaaaccaggtgagtgagtgactgtgctactacatttgggtaaaaaatataaaatggcattttgtgactgtaaatggaattgaacaaacaaaagatggtttcagaaataattttggcaggatcagttaatccaaccagtctttaaagagcaagtgtgcctatctgtagtattccgaagtattttgactagtgaatatataaaccttaccattctaatttaaaaatggttttcactttcaaaaaaaacatcagtagactgcattaaaaatgggttttccaaacagattggagatcagtcctggtttttattttgttagcagttgcaccaccagcaccaccttccagtagtcagctctgccgttacttccctgcttgtaagaagatggaatgtcccttctatcatccaaaagtaagaacttctattttctcaaatcaatttagtgacaacatctcaatttcctcatttaacttcttttttgtcagagttactacattggtgcaaaagtaattgcgatttttgccagtaaaactattaagttgttcctcgtcactgaacctccatctggccccttaggccaagtggtctgaaactgttcaatgttagtatcccaagcactcagtggggggaagcatatctttgctagtcacattttccattattccctgcatttaagtatatggatgggttttagcgggggctggggggcagtttgaacctaatgtcagaactgagatgaagaaatccagtaggtactgcttaaaaccatccaaacttgtactgatgatggttgatgaatctccagatgtttagttggtcaaaatgaattatctccttcttgccccggtagcttgaggaccatatgaaggccttcacttgcccccatctgtaactgggcgtagatgagggtactcagtgaagagtgtaagggataattagaagtttttgtggtatgctaaactaccttttgaaattgtacttgctgtgattctttgactagaattttgtgtctcaaggttaagtccatttttcaaggcttcactagtattaaaatggtccttatagatggaatctcttactctgttaatggttagggtgggctggttattgtctcctaagttgtatgttggccaggtgaggtgggtcaggcctgctatcctagtactttgggaggtagaggcagaagtggaaggatcgtttgagcccgggagtttgaaaccagcctaggcaacatttaagagaccccatctcttaaaaaaaaaaaaaacaggcttggtagcacacgcctgtagtcccagctactcgggagactgaggcaagaggtcatgccacttcactccagcctgggtgacagagtgagaccctgtctcaaataataaaataatgtgtttacttatattagccttgtggatattgttgaagctctgttatctctattcagcattgtaggtttaacactcaatgtacaagaccggactgcacattctaccatcccaccattaatgtcccaccacgacatgccttgaaatggattcgacctcaaaccaggtaaacattcaaattcgtttttctcatgtcagttcaaattcttttttctaatttgcagtttctaaatttataagcacacaaaattggaaactagactgttactttgaatttttttctttgctgtttaattatagaaggctcctttggcaaaataatttactacatgggctaaattttacattatccagtggttacttttttaacctagattatcttgctctgttgcccaggttggagtgcagtcacactatcatagctcactgcagcctcaaacccctgggttcaatccatcctcccacctgtagctgagactacaagcgtgtgcctctatacctggctaattttttttattttaagtagagatggggtcttgaactcctgagctgaagcgatatccttccaccgtggccttccaaagtaccaggattacaggcatgagccaccacacccagccagattttaacttctcattatatactacgcaaacatatactaaggccagcaggagtatatatatgtgtactgtacttgaatttcacatccattttcttcgacattagcaactgggagatactgaaaggaagtttcaaaatattttagtgtggccagaaaatttaattacatatggtattatcttttatctacctgacataattgaattatttttaaaaatctgccatttatattgtaatcttatgaccaaatatttattgcttaaaactagtcaactttttaaactgagatatatggtatatatggatacaaagcagataattaaaacaatttttggttctgttcattcagcgaatagcacccagtcctgcctggcagaagatcatgcagtttggaagttttcatgtactgatgaaagatactctacagaacttgtcaaatctttgaaacttggaatatattgctttcataatatgaagttttattgcctatctatctgaagtgtctaatttttcaagtttgtaagtttattatgtggttttaacattgggtgttttt

SEQ ID NO: 15037 - DNA, 1341 bp, Homo sapiens
agaggatgtagggccctacgtattagggcttcttagttgtagcgaagagcaattggtctggtacgtttagctttttcacatttagttttgaattctgactctagaaatgtacaaccccatcttttgaattacaggttttaagatgttatttgctcttaatacgtcttaaggtaacagccttgatcactgcttttactttcgatgaaataacttaatgagctgtgaagaaaaaattatcagattttaagggagagaattttatgaaaatgtctttgaggttcctgtcacctttatgagaatgtcttcaaagtttccatcaccacctctaccaatttttcttccaccggagccagtggacttaggttccataacaagctcctcttgttcactgaatgagctagacaatatttcccaccttttaaggaaaatatcagctgatatcaatgaaattaaaggaatgaaagcagctattttgacagtggaagcaaatctttttgatctaaatgttagagtgtccaagaatgaagcaaaaatttcatctttggaggttaaaatgaatgaatattcaacaacatatgaatgcaacagacagtttgaagatcaagaagaagatactgaatcacagtcaagaactactgatgtaaaaataatcggcttccttagaaacgttgagaaagctgagatgagtgaactgagtgtggcacagaaaccagaaaaacttttggagcgctgcaagtactggcctgcttgtaaaaatggggatgagtgtgcctaccatcaccccatctcaccctgcaaagccttccccaattgtaaatttgctgaaaaatgtttgtttgttcacccaaattgtaaatatgatgcaaagtgtactaaaccagattgtcccttcactcatgtgagtagaagaattccagtactgtctccaaaaccagcagttgcaccaccagcaccaccttccagtagtcagctctgccgttacttccctgcttgtaagaagatggaatgtcccttctatcatccaaaacattgtaggtttaacactcaatgtacaagaccggactgcacattctaccatcccaccattaatgtcccaccacgacatgccttgaaatggattcgacctcaaaccagcgaatagcacccagtcctgcctggcagaagatcatgcagtttggaagttttcatgtactgatgaaagatactctacagaacttgtcaaatctttgaaacttggaatatattgctttcataatatgaagttttattgcctatctatctgaagtgtctaatttttcaagtttgtaagtttattatgtggttttaacattgggtgttttt

SEQ ID NO: 15038 - DNA, 9631 bp, Homo sapiens
gtgtgcgcggccgggggcggaacggaggaggaggcggtggtgtcccggctgcggggtaggagtccgcggcagcctccgggtaagccaagcgccgcgcagtgctgagttcccgcacgccgcagagccatggagatcggcaccgagatcagccgcaagatccgggtgaggcccgtgccggtcgggggtgggaagccaggtctcggcgagcgggcggttgtcaggagtaacggggactgtgggcccgggtggacgccgcggcctggcctccgctggacgctcctggcgggctgcggctcctcctcgtccaggccgcctcggccctggggacatttgcggcctcggagcgtggctgcggctgaagtagccgccgggaaatggaaggacaggcgcaggcccggctggagccaccaccgcggcgcacggcgccgctttggatccgctgcgggaggtgggcgccgcggggctggggctggagctggagtggggtgcggggtggggggcggtgcaggcgaggctcctcccagcccccgcccgggggatccgaggtgcgcgcaccagcaaagtggcctcagccgctgcagagtccggtcttgttttcctagagccgcctttctcacatgcacgtttgctctttttctctcagagtgccattaaggggaaattacaagaattaggagcttatgttggtaagtgtttttttggttgttagtcttacagaatttagagtttgcagctaatagaattttagtgaatgcgtatttctcaccgtactttggacattgggagagactcccttctaccttcttcaaatcttatactccctggttacttctttatcatctttttgcaaccttgttttttttctcccaaacctccttctgttatggtgttttgaaatttagtttcctccgttaaggctctgtttgaccgaattttattttatgtttttcctattctctctctctctcattttaaattctagggacgggtctcgctacgttgcccaggctggtcttaactcctgggctcaagcaattatctgaccttagcctccctaggtgctgggagtgcggggattactggtgtgagccaccatgcctgtttaaagtttcctattcttgttactttcctcttgacatttgtttttagaactctgatgttggatgtgaatgtttgatgctttctggcatttgcttctgtaatggttcagtgagttttattttccgatctctttatgttttccctctctctctgaaacagtaaggctttttccgtctctttattcttttataatttgagtgtttactctgggtcaggtactgtgcttaactattgtatatgtattaactcaggataatccctacgagaatcctggaaggtaagtggcagtatctttgactgtgtaaacaaggaaactgaggctttgcctacttgagcaaggttttatggtttgcccccaaagctggtgcctcctataaaaataatagctaccactaatgacagtggttctcaaagtgtgggagactccaagggcctctgaagtcaaaactgttttcatattaatactaagatggtatttgttatttttcactgtggtggtggtgtttggattgtgtaaaactaatggttgataaaacttgtcagcatagtaacaccataatgaaatcatattcaaatcactccccccttgtagtttttttctttttgagccaattacacttaaaatgtcattgatgaagatgtgaagtccagggtttacaaaatattttttatcttcttagtattcagtgcgaggaaatagaaatgctcataaaacatttttattgtatactgaaatacgattgttctgaggaaaatcattttagttgagaactaagctagccacctctttcagggaacatcatttttaacttcaaagtactgacaaactggttacatacactaggatatttggcagatatttacttgaaagtgagcaaagaaaagaatccatagtctttgttgccaatcacatgtgagctttcaaatgaaaattagaattttggaaaatctgagcctgcctccatgaatttcacagcttcccagtacttaaaaaatttctgattaaataaatggtgatttaaaaaaaatttgttattattattattttttttgagatggaatttcactcgttgcccaggctggagtgcagtggcgtgatcttggctcactgcaagctctgcctcccgggttcaagcgattcttttgcctcagcctcccgagtagctgggattacaggcatctgccactacacccagctaattttttgtatttttagtagagacagggtttcaccatgttggccaggctggtctcaaactcctgaccttgtgattcgcgtgcctcagcctcccaaagtgctgggattacaggtgtcagccactgcatccggccaactcaatggcgatattaaaaaataattattttatactgcataatgaaatatatcaacgtgtcagtggtttttgtagctaagtgaaccaatcttttctaaataaccaatgcataatattacaaaattatgcagtggattaaagatttatttaaactctggggtgggtcagtggatttttgtgcaacagttcaaaaaggtcattgacgtatttgacattccacgttgctttaacatttaataagctaccacttgtttagttttggtgtagtgtcacagaagaatatccaccttatctgaaaagactatcagaatactcctttttcaactgcatatctgtgagaccagattttttcatattcttcagtcataagcacatagaacaagatatataaaaatatgaaacaaggccagtctttgcagtaaatttttctttttcttttttttgagatggggtctcactctgtggttcgggctggagtgcagtggtgcaatcttggctcactgcaacctccgcctcccaggttcaagcaattctcctgcctcagcttcccgagtagctgggattacaggcacctgccaccaccccgccccccccccccggctaatttttgtgtttttagtggagacggtgtttcaccatgttggccaggctgatctcgaactcctgaccttaggtgatccacttgtctcagcctcccagagtgctgggattacaggtgtgagccactgtgccttgcctaaatttttttttggaaaatttaataatgttacttgtgttaatataattggatttgtgattaacatgtgatggatttattttttaatgaattaataaatactttttaattaaaaatgatcagttctaattttgaacaccataaataatagaacctgcataaaccaaagaaggggcccaagaccaaacagtttgagaattggtaatttatggagtacttaccaccatttgctgggcactttcataaacgatttgttgtcaggattgttggaagactaacagatgagagaattgaggctcagagaaaataaagctgaaccaagatttatttattcttttattctttcaacacttgaactgcattttttatagttttctttgaaacaaaaaaagtacttctgaaatgaacctttctgcctgcatagaaatattacaagtatttaaggtattaaagaaatttgtcacagcatggtggttcacgcctgtaatcacagcactttgggaggccgaggtgggtggatcacttgaggtcaggagttcgagaccagcctagtcaacatgctgaaacctggtgtctactaaaaatacaaacattagctgggtgtggtggcaggtgcctgtaatcccagctactcgggaggctgaggcaggagaatcgcttgaacccaggaagcagagcttgcagtgagccgagattgtgccactacactccaacctgggagacagagcaagactctgtcgtaaaagaaaaaaaaaaaaaagagaactggaatggagttttgagggtcagagattagagttcctgataacagcttttgcttccttatcttcttagtgaggtttttgtttttttgttcttttaaatcctagacctcactctcataatcactgtaggattaccactaggagggtgttttttggcttcttttatttattttatttatttatttttttttgagacagagtcttgctctgttgcccaggctggagtgcagtggcaggatctgagcgcactgcaagctccgcctcctgggttcacaccattctcctgcctcggcctcccgagtagctgagactataggcgctcaccaccacacccggctaattttttgtatttttagtagagacagggtttcactgtgttagccaggatggtctcaatctcctaaccttgtgatctgcccaccttggcctcccaaagtgctgggattacaggcatgagccaccgcgcctggccttttttcttttttttttttttttatcctagacctcacccttataatcattgtaggattaccactgtgagggtaaaaccgtgcattgagttgacattatttaatgttaaaattgatttttttaaatgatgtggagcttttgggtctatttgtttattcgatgttgctacaagtttgttactgtgagtaattgaaacctgcctttagcaagggtaaagatgttcacttgagaaatgagtgttattttgaaactttgcaaattaaaactaaacaaaactcaattctttttcttggggaatgttcaaatatttcccataagcttctttgaaattaataagcattattaaaaagattcaaggaagtgaatgcatgctcaagtttgaccctataattcagaatgtttagttttgtaagtatcaattattcttaatttccattcttctagtatttgaaatacctgtggaatgaagagaaaaaaattaaagctaagccatcttgtccaatgtaattccagtagagctctgcgactctaaagcttagagctacatctatattttcaagcacatcaactttaagaagaaagttttgaggaaacaaagttttgatctacctttccttttaaatagatgaagaacttcctgattacattatggtgatggtggccaacaagaaaagtcaggaccaaatgacagaggatctgtccctgtttctagggaacaacacaattcgattcaccgtatggtatgtttctgaatttttgtgcctcagaccaaagtttggcacaagcctgagttgatattctgtccaaagagaggttcttgacacttgagttaggtttactttggagaggcagtttgtgagtgatgagagcacagcctctgtattagtccattttcacagtgctatgaagaaatacccgagactgggtaatttctaaaagaaagaggtttaattgactcagagttccacatggctggggaggccccaggaaggggaagcaagcaccttcttcacaagtcgacaggaaagagaagagtgaaggaggaacttccagagacttatataaaatcatcagatcttgtgagaactcactgtctcttgagaactcgggaactcactgtctcttgagaactcactatcatgagaacatcatgggggaaaccacccccatgacccagtcacctccctcccttgacaggtggggattacaattcaatataagatttgggtggggacacagagccaaaccttatcagcctctgaagccagacagccaaagttgaatcctggctgtgtcttgccttggtttctctagctataaaatggaaatagtacagccacttgctttataaaattattattgaggatcaaatgggctaatatgtgtaaagtacttataggtgtccctagcattttcctaaggaattcttagtatatgtcggctatacttaatatgtttcttttgtaaacttctatatctttttttttgagacagggtcttgctctgtcaccaggctggagcacagtggtacaatcatggctcgctgcagcctcgatctcctggtttcaagtgatcatcccattgcagtcccctccttcctgaactcccatgcctgactaatttttaaattttttgttcagacagggtcttagtatgttgccctggatgctcttgaactcctgggctcaagcagtcctcctgccttggccttcagaagtcttggggttataggtatgagccactgcacctggccagcttctgtatcttatagttccttttcccccaccaaaaccagttacagatgtttttttgaactgggttggcttcttacattgccttttacaatgagttacctttagagggcaaggttttctgtttctcacttttctgtttcttactttttaagctttttgttaaactcacaccttcattttgagtaataattgtagtgtaatgttacagcatattttgagattataagtttttttaagtttggaattttaaaataggcaactttgcttttatacataaattactgttatatgcctttagttgagaatactgactagaagagtaagattcaacttaagatgctaggtcctggtaccaggtttgaggtaaagtgaggatgagggctggaggataatgatgtagctgagaatagacagacgaaatactttattaggcttctcaggctaggaactaccagttaccgtgaaaggtgatgatgtagcagaagtgagcaagtggcctgccgaatttgagtgcaagaggaggcactgagtggggagatgagcctggttaagttcttgcctttataccaaaggtcgtcttcaaggtgtttttgcccaagtaggcaactgtatgcttatcaaccgtcttgaaattctgcacagaattctctgggtttatacattgcacaaatttgaagaacattgtatagtggtcatcagttgttatgatacactgctgcctcactgtgggtgacccaacccatttgttacaatttgtccccagaggttattccctcccagccccccacaaaaaaagactgtgggtcttttgactgggaaaattaccattattgtgagtactatttttttttctaaagcgaccgagtagatccttttctccgataacttgatagaatacttagatttttaaaacagactaccaaatgaatttaaaaccaaattaattcaacattctcatctggccataaattgagttctttaacatgtagtgaagcaaagggtgatgtccccattttggcactttgctttcttaagttagtgttcattaacaccagccccaaacagactattgtgattatttggagccttgaagtaattgtgtccgtggggacagtagcatgtgactagggttctcattgaaacatgaggtttctggcatattttgagaggtactgggaagggatgtaaggcaaagtacctcatttataactaccaaaacaggttatgttacaagcaagattacagccttacagcatcagttttgaaagtaatagagtgaaatgatatagcatagtttgagattataacttgttttaacctctcagaattaagttgtccaagacaccatctagtttaagcagttaatataagctgcttaaatggtggtaataataagcaatattacatgtttatgatacttgttttactgtaagctacagtaaatctttagtacttacaaacagggtgacatattttgtagactaagactggtcagatgatattctttcccatatttttgcagaggctagatgttgaaaacagtgaagaaaaaaatacaattttttattgacttctgtaggatttatacaaagcccttttttaaaaatgtgaagtttgaaagttcataccatttattcactaaatacagtttatcagtatttatctcagctaggtgcggtggctcacgcccgtaatctcaacactttgggaggctgaggcaggtggttctctcaagtccaggacttcaagaccagcctggacaacacagtgaaaccccatctctatttaaaaataataaaaatataaaaaaatttaaaaaattatctctgaatataatgtcataaatttagagtgacagttgaaatgaaatctttcttaacagaaggtttatttttgttttttgtttttttcctcaggcttcatggtgtattagataaacttcgctctgttacaactggtaagattcataacttttttttttaatttctgcttgctatggcatatgatttgtttctttctaaagtcatagtgctttgggaaaaacccatcaatttcaaaacggttcatttgaacttttttagaaagcacatacttttatgaacttaagagcagtaaatttaacataattcaaagataatttaagtgtgggagagggagcagtgcactttatccgaaggaaataattacatatatgtgcaaagatttagcctcaaggatatttcagtattttataattgaaaacaatttaaaagttcagtcataataaacgaaattgttgtattaccatgtgtggaataatatttaactattaaaaataatgttgtggaagaataacagaatatacacgcataagatacatgttttaaaaaatgtgtatatatgctcttcccccgaaaaatcacctttgagataattggtgatttttattatatttttaaaattttctacaataaacatactgcttttgaattggtgatgaggaaggaaacgacttaaagtaataaaaatagatggccgggcacggtggctcacgcctgtaatcccagcattttgggaggccaaggtgggcggatcatgggctcaggagatggagaccatcttggccaaccaacatggtgaatctccgtctctactaaaaatacaaaaattagccaggcatcgtggcacatgcctgtaatcccagctacttgggaggccggggcaggagaatcgcttgaaccagggatttggaggttgcagggagccgagaacgcgccactgccctccagcctggcgacagagcgagactccatctcaaaaataaataaataaataaaaataagaaataaaaatagattaaaaggactgtatttttcttttcagaaccctctagtctgaagtcttctgataccaacatctttgatagtaacgtgccttcaaacaagagcaatttcagtcggggagatgagaggaggcatgaagctgcagtgccaccacttgccattcctagcgcgagacctgaaaaaagagattccagagtttctacaagttcgcaggagtcaaaaaccacaaatgtcaggtaagagtctggtgtagacctgctgggggcagatggctctgtgtatgtgacatttatattagtttttatatctttcagtttgctgttctcagcaatttttagaaacaatgaagtgatcgtgagtagttttttgaataaaataatggataagatctaagtatgattatcttttatcacaaatttagtaaatcaaagttgaaagaaagtgcaatttcaaagcagttttgaatggaatatgtaaagggagtatcctcagttttttcattgaaatttttcaagtaaacattctttaaagatttggtgataattgccctaatttggctgtaatacattttgttgttcttttaaatagacagacttacgatgatggagctgcaacccgactaatgtcaacagtgaaacctttgagggag

SEQ ID NO: 15039 - DNA, 577 bp, Homo sapiens
gtgtgcgcggccgggggcggaacggaggaggaggcggtggtgtcccggctgcggggtaggagtccgcggcagcctccgggtaagccaagcgccgcgcagtgctgagttcccgcacgccgcagagccatggagatcggcaccgagatcagccgcaagatccggagtgccattaaggggaaattacaagaattaggagcttatgttgatgaagaacttcctgattacattatggtgatggtggccaacaagaaaagtcaggaccaaatgacagaggatctgtccctgtttctagggaacaacacaattcgattcaccgtatgaaccctctagtctgaagtcttctgataccaacatctttgatagtaacgtgccttcaaacaagagcaatttcagtcggggagatgagaggaggcatgaagctgcagtgccaccacttgccattcctagcgcgagacctgaaaaaagagattccagagtttctacaagttcgcaggagtcaaaaaccacaaatgtcagacagacttacgatgatggagctgcaacccgactaatgtcaacagtgaaacctttgagggag

SEQ ID NO: 15040 - DNA, 9856 bp, Homo sapiens
agactgcagattcccttcgggtactttcaggacaccttatgcagacacggtagatggtttctttttcttgtgtagttaatttgtgtgattagatagtaaaggttaaccattcgtttgcagcttccctcctccccgccctaaccgctagcgtagagtgctttcattgattcagtagctagcccatgaatagttagccaaattcagttttcaagaattccagttcatctttcttgttcagaaatccattaacctacaaattacaactcagtgtatgatttaactctattaaagattcttttctttatgcaaattcaggaaatgcaagtttaaaagccagctgaccataatcaggtcagctctaaagagagttggcagatcaggtttgggtgatttttcccttagaaaattgactgtttctataaaagaagaaacatacagataattagcataaatgctgctggcccttgtgttctgagcattgatgctaattttttggtttgtttccatgttgaccctatgaagatcgaatgggtgatggggtcaggcttgaggggagattgtccttagtaagtacaggctggagggtcactggtgatgccactgtgactgttcatggccatcgtgtgttagcagagaacccaccagtgctgcacctggtagccctacctagtctttttttattgaaccaaacgcaaagccaagggagtgatagttctgctgaagagcactttagggggctcagcgttttgtgtttgtttccctaattctatggtattttttatctgtctggcagagatcttgtacaaccagataaacctgcaagtcccaagtttatagtgacgctggatggtgtccccagccccccaggatacatgtcagatcaagaggaggacatgtgctttgaaggaatgaaacccgtaaaccaaactgcagcctcaaacaagggactcagaggtctcctccacccacagcagttgcacttgctgagcaggcagcttgaggacccaaatggtagcttttctaacggtgtgttgagagctcagattttcagggtgctgtcattgtgaagggaatctttgacttgtttctctaccttgaatgaatattggttaaaggccttgcttttatttatattcagtaatggccttttttcttctttcagacaaacccaccaagtacatttcagactctttttcctgtgtctttttcataggtgggctgttactccagtttgaaaacggagttcagccatggaacctgagagacctcttccgcttatgctggctaaaggatgaaccaccattcttgttgccttctttacctttgtattttcttcagaaactgtactgccactttgcccttttatcagcaatagtctcttgcaattaacttgagagaaaaatttagatttgatgctatttctacctcagtgaaatttctttgaaaggagtttctcacctaatctatcaagatcttggaactgtttaaattaatgttgaagagtaatatttagcagaactcagatgaactcatttcagatagcaccatagtttttggcaggtgacagtttcttatcaccgtttctttcactgggtatcagtggtagctgcaacgccactgatcatttccattcatgatagagaatggtaattatgttccttatatcttctaaaatatttagaagcacctcttcattggcaggagggataattactcaatcttaaaagcgtacagattcaaaggaaaaacagtaatggattttgaaacatttccttgagtaatcctcttcttggaagagatatgaaaatgtattgaatacctttctcgatcattaaaaatagaatagacttcagagggaaatcatatgttagtggagcaataacacttagctttattttaattggttgcgtttcctactgtgaatcaatgacgtagtgtcgtggttttgattagtggagggagttgaaaatctgaccctatcaacaggaagaaaaacttaaaaaatagtaaaagctgcagtaggcagtcccgatttattgactctgtatgttttgtctaaagagaagactccagtgttttcactactcttgattttcaatttggtaccttaattttttggtctattaggatctggtttcatttaaatgtaggtgtccatatgaggctttatggggtatacatgtagcagcagtgacaccataaataatatgttagtaaaaattcttgccagtgctgtggccattgtgctgacagccatgatgagtggtgagcctcctttcccattgctttgactggggactcagtgtttccctgctgctcaaggatgaagctttgtaagattagcataggggtgtggctggagagactcctgcagaacagttctcaggagtctctagtctctgcaccacttcccctgtgagcagggagtttgaaactgcaattgcttctggttggttttatgttgggttgtttcaaggatgctaccaacaacaacatctgttttaacctgctgtcttttcactcactgtcatatggcagcacagattttatagcttgctttctttgttttttttttttttgagatagagtctctctgtcccccaggctggagtgcaatggagccatctcagctcactgcaacttctgccttccaggttgaaagccattcttctgcctcagtctcccaagtagctgggattacaggcatgcaccatcacacctggctaattttgtagtttaagtagagacggggttttaccatgttggtcaggctaatctccaactcctgacctcaagtgatccaccaacctcggcctcccaaagttctgggattacaggtgtgagccaccgtgcctggcctatagctttcaataaaaggtgaatttgcctcttaaaatttgaacagaaagttttaatagtttacaaagtcggtgtcagccagtgaagactaggggcatgaccttcgtatgacttaatgtttttaaaagaaagataaagtttctttgtaaggtattattgtaataatcacatttctttgtaaagtattatattgttcctgagtatctagctactttgctttccagctaggcttctcttgggtattctcttaatcttttatttgtactgggttcttgtgtatatattatagtctgctgtgtgtaatttattataggaaaagggtaagacacatttactttgcggggatgacacaaaaaacctgtaaaaattagagaaacttccagtcatctcacattttctttggaaccgattattcttgtatcttagaactaaaatgacttatactgttttgtttttagaaagggtatccctcctgttgcccaggctggagtgcattggcacagtcatggctcactgcagcctccacctcccaggctcaagtgattctcccacctcagcctcctgagtagttggttactacaggtgcacaccaccatgcctggctaattttttgtattttttgtagagatggggtttcaccatgttgcccaggctggtctgaaactcctgagctcaagtgatctgcccgcctcggcctcccaaagtgctggggttacaggcatgagccaccacatcctatttaaagcttaaataggacttttactatttttaaagtagcatagaaaactgtttgtatcaggcatagtcataattgctctttgatgctgctcctatctgggctgcatgactacatttgtgtgccttgttctcctgtagtgaggacagaatgtgggtcactggaacagtaagtactcatagaactagctgctgctgctattacgactggttgcctgttttgcattttttccgtttaatcatcagactctaaggaagacattattttctctttgtatagatgaggaaacagaattccaaaaagttagctaacatttgcacagagtgtctggctgagcaactaagtggcagagtcagattttaactgacctctggcaagaggactagaggaatacagttgaagtgatacttgctttcatgaacatgaatgtgaaccataatacataatacccatgatgctattttgtggggagtttaaggtgtctcagtccagaaattagcagctgattattgcctgtagctgtaattttacttattcagtgttatttaataaattgccagcattacaatttcgatgaaggcagatttttggcttactgaaacaggataaaaatctggcaacaggggtcccactttgccctgtcatagtaatcgaagctgtgattggatgtggcacagggagtggagtggatgggtgtgcacttgctttccaggctgctgctccccgtctgtcccttattgcatttatcatcttcagcccagtcagtcttgctgttaggggaactgcccagtctctgtaagtgatggcatttgtgaccccattgtaggtaaaaatgttttcccctttttagacattgctggctgagcgcggtggctcatgcctataatcccagcactttgggaggccgaggtgggtggatcgcttaagtcctggagttcaagaccagcctgggcaacgtggggaaaccctgtagccaggcgtggtggcacgtgctacttggtaggggctgaggtgggagtatcacttgagcctgggaggcagaggttgcagtgagccgagattacaccactggcacaccactgtactccatcctgggtgacagagcaggaccctgtcgtaaaaaaaaaaaaaaaaaaaaaaagtaaaagacattgctgagtttcgcacctggacttacagctcagcaggtgggaatccttttgtatttgggccactcatcatcttgctggcgtgtgaggattcacatctccttatcaccttacctgttttcagtttttatttaattttattagttccccacttgacgtccttctctatttttaattcagctatgaattagtattgagaattagaatttttggtgaaaaatttggccgtagttgcagagtcactgtcctctttccttttcacagtgagaactgttgtcttcttcctggcaaccttttataggattctatggccagtgttaatcccataatttgagctcacttattttatatgactgtacatttaacagaagattctaagacaggtttgagggaaatatgttaaaggtgctgtgtactgaattgatcataatgaatgaaatacttttatttcctttccctttgtagctgagatgagtgaactgagtgtggcacagaaaccagaaaaacttttggagcgctgcaagtactggcctgcttgtaaaaatggggatgagtgtgcctaccatcaccccatctcaccctgcaagtgagtaccatccccccatctcaccctgcaagtgagtaccatccccccatctcaccctgcaagtaccatcccccatctcacctggcaagtaccatcccatctcacccagcaagtaccatcccccacatctcaaccctcaagtgagtaccatcccatctcaccctgcaagtaccatcccatttcaccctgcaagtaccatcccccatctcaccctgcaagtaccatctccccatctcaccctgtaactaccatcccatctcaccctgcaagtgagtaccatccctgcatttcaccctgcaagtaccatctcatctcaccctgcaagtaccaccccctcatctcaccctgcaagtatcatcccccatctagccctgtaagtgcgagtaccatcccccatcttaccctgcaagtaccatcacccacttcaccctgcaagtaccatcccccacctcagcctgcaagtaccatcccccacctcagcctgcaagtaccatcccctatctcaccctgcaagtaccatccccatctcaccctgcaagtatcatcccccacctcaccctgcaagtaccatcccccatctcaccctgcaattgagtaccatcccccatctcaccctgcaagtaccatcccccatctcaccctgcaagtgagtaccatcccccatctcaccttgcaagtaccatcccccatctcaccctgcaagtaccatcccccatctcaccctgcaagtatcatctcaccctgcaagtgagtaccatccccccatctcatcctgcaagtaccatcccccatctcaccctgcaagtaccatcccccatctcaccctgcaagtaccatcccccatcttaccctgcaagtgaataccatccccatctcaccctgcaagtgaataccatccccatctcaccctgcaagtgaataccatcccccatctcaccctgcaagtgaataccatccccatctcatcctgcaagtgaataccatccccatctcaccctgcaagtcatagccagctgattttggctttcagtttagtgtctgtatcttacaccttattttgtttttgtttttctgtggacaagtttttagttttataactaaatggagtgacaattaccatggccctctccagagtagcgtatttcttgttcatgtatgtttgttgagaggcaagggtgggggggctttgtttgtgcctcggacctgtgagatactgaaatacctggggttccttaagaattctgtacgtttaagcagatgggtatatggtaactgccccagtttgtatgcattttggccacacgcagtatacacagattttgaggagttgagggaaaagttagttatgggtaatgaaaacattttggacttgggttaaatttttccttacaagctggctggctcaatgtaatgagctttatgagatggctttttggggcttcttttttttgccgggggtaggtcctatggatggaatcttcatttttaattcttttaaggaaatgatgtgggaataatacagctgtacatataaggagagtatgggatgagtctttttgtatcacaaagccttgcatagaggatgtgtttattgtattaatgagttcactgcataaaatatataccttttttattaagtggtgtgatttttatcacaaaagcttgtctttcttggtggcttggcttgagttaaaagcctgtgtttgtgttatcccaagctttggaataaatgattgtgtcctattttgatatatggtcttattttaaaatattctttttgttgctgttttttttgcatttctcaaaacaagtagtgatggggagtgtaaagagcccttatacacagaactaataatgcattgagaagattgaatatgaaatatgctttttttttgttttgtagagccttccccaattgtaaatttgctgaaaaatgtttgtttgttcacccaaattgtaaatatgatgcaaagtgtactaaaccagattgtcccttcactcatgtgagtagaagaattccagtactgtctccaaaaccaggtgagtgagtgactgtgctactacatttgggtaaaaaatataaaatggcattttgtgactgtaaatggaattgaacaaacaaaagatggtttcagaaataattttggcaggatcagttaatccaaccagtctttaaagagcaagtgtgcctatctgtagtattccgaagtattttgactagtgaatatataaaccttaccattctaatttaaaaatggttttcactttcaaaaaaaacatcagtagactgcattaaaaatgggttttccaaacagattggagatcagtcctggtttttattttgttagcagttgcaccaccagcaccaccttccagtagtcagctctgccgttacttccctgcttgtaagaagatggaatgtcccttctatcatccaaaagtaagaacttctattttctcaaatcaatttagtgacaacatctcaatttcctcatttaacttcttttttgtcagagttactacattggtgcaaaagtaattgcgatttttgccagtaaaactattaagttgttcctcgtcactgaacctccatctggccccttaggccaagtggtctgaaactgttcaatgttagtatcccaagcactcagtggggggaagcatatctttgctagtcacattttccattattccctgcatttaagtatatggatgggttttagcgggggctggggggcagtttgaacctaatgtcagaactgagatgaagaaatccagtaggtactgcttaaaaccatccaaacttgtactgatgatggttgatgaatctccagatgtttagttggtcaaaatgaattatctccttcttgccccggtagcttgaggaccatatgaaggccttcacttgcccccatctgtaactgggcgtagatgagggtactcagtgaagagtgtaagggataattagaagtttttgtggtatgctaaactaccttttgaaattgtacttgctgtgattctttgactagaattttgtgtctcaaggttaagtccatttttcaaggcttcactagtattaaaatggtccttatagatggaatctcttactctgttaatggttagggtgggctggttattgtctcctaagttgtatgttggccaggtgaggtgggtcaggcctgctatcctagtactttgggaggtagaggcagaagtggaaggatcgtttgagcccgggagtttgaaaccagcctaggcaacatttaagagaccccatctcttaaaaaaaaaaaaaacaggcttggtagcacacgcctgtagtcccagctactcgggagactgaggcaagaggtcatgccacttcactccagcctgggtgacagagtgagaccctgtctcaaataataaaataatgtgtttacttatattagccttgtggatattgttgaagctctgttatctctattcagcattgtaggtttaacactcaatgtacaagaccggactgcacattctaccatcccaccattaatgtcccaccacgacatgccttgaaatggattcgacctcaaaccaggtaaacattcaaattcgtttttctcatgtcagttcaaattcttttttctaatttgcagtttctaaatttataagcacacaaaattggaaactagactgttactttgaatttttttctttgctgtttaattatagaaggctcctttggcaaaataatttactacatgggctaaattttacattatccagtggttacttttttaacctagattatcttgctctgttgcccaggttggagtgcagtcacactatcatagctcactgcagcctcaaacccctgggttcaatccatcctcccacctgtagctgagactacaagcgtgtgcctctatacctggctaattttttttattttaagtagagatggggtcttgaactcctgagctgaagcgatatccttccaccgtggccttccaaagtaccaggattacaggcatgagccaccacacccagccagattttaacttctcattatatactacgcaaacatatactaaggccagcaggagtatatatatgtgtactgtacttgaatttcacatccattttcttcgacattagcaactgggagatactgaaaggaagtttcaaaatattttagtgtggccagaaaatttaattacatatggtattatcttttatctacctgacataattgaattatttttaaaaatctgccatttatattgtaatcttatgaccaaatatttattgcttaaaactagtcaactttttaaactgagatatatggtatatatggatacaaagcagataattaaaacaatttttggttctgttcattcagcgaatagcacccagtcctgcctggcagaagatcatgcagtttggaagttttcatgtactgatgaaagatactctacagaacttgtcaaatctttgaaacttggaatatattgctttcataatatgaagttttattgcctatctatc

SEQ ID NO: 15041 - DNA, 1193 bp, Homo sapiens
agactgcagattcccttcgggtactttcaggacaccttatgcagacacgagatcttgtacaaccagataaacctgcaagtcccaagtttatagtgacgctggatggtgtccccagccccccaggatacatgtcagatcaagaggaggacatgtgctttgaaggaatgaaacccgtaaaccaaactgcagcctcaaacaagggactcagaggtctcctccacccacagcagttgcacttgctgagcaggcagcttgaggacccaaatggtagcttttctaacgctgagatgagtgaactgagtgtggcacagaaaccagaaaaacttttggagcgctgcaagtactggcctgcttgtaaaaatggggatgagtgtgcctaccatcaccccatctcaccctgcaaagccttccccaattgtaaatttgctgaaaaatgtttgtttgttcacccaaattgtaaatatgatgcaaagtgtactaaaccagattgtcccttcactcatgtgagtagaagaattccagtactgtctccaaaaccaggtgagtgagtgactgtgctactacatttgggtaaaaaatataaaatggcattttgtgactgtaaatggaattgaacaaacaaaagatggtttcagaaataattttggcaggatcagttaatccaaccagtctttaaagagcaagtgtgcctatctgtagtattccgaagtattttgactagtgaatatataaaccttaccattctaatttaaaaatggttttcactttcaaaaaaaacatcagtagactgcattaaaaatgggttttccaaacagattggagatcagtcctggtttttattttgttagcagttgcaccaccagcaccaccttccagtagtcagctctgccgttacttccctgcttgtaagaagatggaatgtcccttctatcatccaaaacattgtaggtttaacactcaatgtacaagaccggactgcacattctaccatcccaccattaatgtcccaccacgacatgccttgaaatggattcgacctcaaaccagcgaatagcacccagtcctgcctggcagaagatcatgcagtttggaagttttcatgtactgatgaaagatactctacagaacttgtcaaatctttgaaacttggaatatattgctttcataatatgaagttttattgcctatctatc

SEQ ID NO: 15042 - DNA, 9132 bp, Homo sapiens
agtgccggccggggcggggatacgccgtgtgcgcggccgggggcggaacggaggaggaggcggtggtgtcccggctgcggggtaggagtccgcggcagcctccgggtaagccaagcgccgcgcagtgctgagttcccgcacgccgcagagccatggagatcggcaccgagatcagccgcaagatccgggtgaggcccgtgccggtcgggggtgggaagccaggtctcggcgagcgggcggttgtcaggagtaacggggactgtgggcccgggtggacgccgcggcctggcctccgctggacgctcctggcgggctgcggctcctcctcgtccaggccgcctcggccctggggacatttgcggcctcggagcgtggctgcggctgaagtagccgccgggaaatggaaggacaggcgcaggcccggctggagccaccaccgcggcgcacggcgccgctttggatccgctgcgggaggtgggcgccgcggggctggggctggagctggagtggggtgcggggtggggggcggtgcaggcgaggctcctcccagcccccgcccgggggatccgaggtgcgcgcaccagcaaagtggcctcagccgctgcagagtccggtcttgttttcctagagccgcctttctcacatgcacgtttgctctttttctctcagagtgccattaaggggaaattacaagaattaggagcttatgttggtaagtgtttttttggttgttagtcttacagaatttagagtttgcagctaatagaattttagtgaatgcgtatttctcaccgtactttggacattgggagagactcccttctaccttcttcaaatcttatactccctggttacttctttatcatctttttgcaaccttgttttttttctcccaaacctccttctgttatggtgttttgaaatttagtttcctccgttaaggctctgtttgaccgaattttattttatgtttttcctattctctctctctctcattttaaattctagggacgggtctcgctacgttgcccaggctggtcttaactcctgggctcaagcaattatctgaccttagcctccctaggtgctgggagtgcggggattactggtgtgagccaccatgcctgtttaaagtttcctattcttgttactttcctcttgacatttgtttttagaactctgatgttggatgtgaatgtttgatgctttctggcatttgcttctgtaatggttcagtgagttttattttccgatctctttatgttttccctctctctctgaaacagtaaggctttttccgtctctttattcttttataatttgagtgtttactctgggtcaggtactgtgcttaactattgtatatgtattaactcaggataatccctacgagaatcctggaaggtaagtggcagtatctttgactgtgtaaacaaggaaactgaggctttgcctacttgagcaaggttttatggtttgcccccaaagctggtgcctcctataaaaataatagctaccactaatgacagtggttctcaaagtgtgggagactccaagggcctctgaagtcaaaactgttttcatattaatactaagatggtatttgttatttttcactgtggtggtggtgtttggattgtgtaaaactaatggttgataaaacttgtcagcatagtaacaccataatgaaatcatattcaaatcactccccccttgtagtttttttctttttgagccaattacacttaaaatgtcattgatgaagatgtgaagtccagggtttacaaaatattttttatcttcttagtattcagtgcgaggaaatagaaatgctcataaaacatttttattgtatactgaaatacgattgttctgaggaaaatcattttagttgagaactaagctagccacctctttcagggaacatcatttttaacttcaaagtactgacaaactggttacatacactaggatatttggcagatatttacttgaaagtgagcaaagaaaagaatccatagtctttgttgccaatcacatgtgagctttcaaatgaaaattagaattttggaaaatctgagcctgcctccatgaatttcacagcttcccagtacttaaaaaatttctgattaaataaatggtgatttaaaaaaaatttgttattattattattttttttgagatggaatttcactcgttgcccaggctggagtgcagtggcgtgatcttggctcactgcaagctctgcctcccgggttcaagcgattcttttgcctcagcctcccgagtagctgggattacaggcatctgccactacacccagctaattttttgtatttttagtagagacagggtttcaccatgttggccaggctggtctcaaactcctgaccttgtgattcgcgtgcctcagcctcccaaagtgctgggattacaggtgtcagccactgcatccggccaactcaatggcgatattaaaaaataattattttatactgcataatgaaatatatcaacgtgtcagtggtttttgtagctaagtgaaccaatcttttctaaataaccaatgcataatattacaaaattatgcagtggattaaagatttatttaaactctggggtgggtcagtggatttttgtgcaacagttcaaaaaggtcattgacgtatttgacattccacgttgctttaacatttaataagctaccacttgtttagttttggtgtagtgtcacagaagaatatccaccttatctgaaaagactatcagaatactcctttttcaactgcatatctgtgagaccagattttttcatattcttcagtcataagcacatagaacaagatatataaaaatatgaaacaaggccagtctttgcagtaaatttttctttttcttttttttgagatggggtctcactctgtggttcgggctggagtgcagtggtgcaatcttggctcactgcaacctccgcctcccaggttcaagcaattctcctgcctcagcttcccgagtagctgggattacaggcacctgccaccaccccgccccccccccccggctaatttttgtgtttttagtggagacggtgtttcaccatgttggccaggctgatctcgaactcctgaccttaggtgatccacttgtctcagcctcccagagtgctgggattacaggtgtgagccactgtgccttgcctaaatttttttttggaaaatttaataatgttacttgtgttaatataattggatttgtgattaacatgtgatggatttattttttaatgaattaataaatactttttaattaaaaatgatcagttctaattttgaacaccataaataatagaacctgcataaaccaaagaaggggcccaagaccaaacagtttgagaattggtaatttatggagtacttaccaccatttgctgggcactttcataaacgatttgttgtcaggattgttggaagactaacagatgagagaattgaggctcagagaaaataaagctgaaccaagatttatttattcttttattctttcaacacttgaactgcattttttatagttttctttgaaacaaaaaaagtacttctgaaatgaacctttctgcctgcatagaaatattacaagtatttaaggtattaaagaaatttgtcacagcatggtggttcacgcctgtaatcacagcactttgggaggccgaggtgggtggatcacttgaggtcaggagttcgagaccagcctagtcaacatgctgaaacctggtgtctactaaaaatacaaacattagctgggtgtggtggcaggtgcctgtaatcccagctactcgggaggctgaggcaggagaatcgcttgaacccaggaagcagagcttgcagtgagccgagattgtgccactacactccaacctgggagacagagcaagactctgtcgtaaaagaaaaaaaaaaaaaagagaactggaatggagttttgagggtcagagattagagttcctgataacagcttttgcttccttatcttcttagtgaggtttttgtttttttgttcttttaaatcctagacctcactctcataatcactgtaggattaccactaggagggtgttttttggcttcttttatttattttatttatttatttttttttgagacagagtcttgctctgttgcccaggctggagtgcagtggcaggatctgagcgcactgcaagctccgcctcctgggttcacaccattctcctgcctcggcctcccgagtagctgagactataggcgctcaccaccacacccggctaattttttgtatttttagtagagacagggtttcactgtgttagccaggatggtctcaatctcctaaccttgtgatctgcccaccttggcctcccaaagtgctgggattacaggcatgagccaccgcgcctggccttttttcttttttttttttttttatcctagacctcacccttataatcattgtaggattaccactgtgagggtaaaaccgtgcattgagttgacattatttaatgttaaaattgatttttttaaatgatgtggagcttttgggtctatttgtttattcgatgttgctacaagtttgttactgtgagtaattgaaacctgcctttagcaagggtaaagatgttcacttgagaaatgagtgttattttgaaactttgcaaattaaaactaaacaaaactcaattctttttcttggggaatgttcaaatatttcccataagcttctttgaaattaataagcattattaaaaagattcaaggaagtgaatgcatgctcaagtttgaccctataattcagaatgtttagttttgtaagtatcaattattcttaatttccattcttctagtatttgaaatacctgtggaatgaagagaaaaaaattaaagctaagccatcttgtccaatgtaattccagtagagctctgcgactctaaagcttagagctacatctatattttcaagcacatcaactttaagaagaaagttttgaggaaacaaagttttgatctacctttccttttaaatagatgaagaacttcctgattacattatggtgatggtggccaacaagaaaagtcaggaccaaatgacagaggatctgtccctgtttctagggaacaacacaattcgattcaccgtatggtatgtttctgaatttttgtgcctcagaccaaagtttggcacaagcctgagttgatattctgtccaaagagaggttcttgacacttgagttaggtttactttggagaggcagtttgtgagtgatgagagcacagcctctgtattagtccattttcacagtgctatgaagaaatacccgagactgggtaatttctaaaagaaagaggtttaattgactcagagttccacatggctggggaggccccaggaaggggaagcaagcaccttcttcacaagtcgacaggaaagagaagagtgaaggaggaacttccagagacttatataaaatcatcagatcttgtgagaactcactgtctcttgagaactcgggaactcactgtctcttgagaactcactatcatgagaacatcatgggggaaaccacccccatgacccagtcacctccctcccttgacaggtggggattacaattcaatataagatttgggtggggacacagagccaaaccttatcagcctctgaagccagacagccaaagttgaatcctggctgtgtcttgccttggtttctctagctataaaatggaaatagtacagccacttgctttataaaattattattgaggatcaaatgggctaatatgtgtaaagtacttataggtgtccctagcattttcctaaggaattcttagtatatgtcggctatacttaatatgtttcttttgtaaacttctatatctttttttttgagacagggtcttgctctgtcaccaggctggagcacagtggtacaatcatggctcgctgcagcctcgatctcctggtttcaagtgatcatcccattgcagtcccctccttcctgaactcccatgcctgactaatttttaaattttttgttcagacagggtcttagtatgttgccctggatgctcttgaactcctgggctcaagcagtcctcctgccttggccttcagaagtcttggggttataggtatgagccactgcacctggccagcttctgtatcttatagttccttttcccccaccaaaaccagttacagatgtttttttgaactgggttggcttcttacattgccttttacaatgagttacctttagagggcaaggttttctgtttctcacttttctgtttcttactttttaagctttttgttaaactcacaccttcattttgagtaataattgtagtgtaatgttacagcatattttgagattataagtttttttaagtttggaattttaaaataggcaactttgcttttatacataaattactgttatatgcctttagttgagaatactgactagaagagtaagattcaacttaagatgctaggtcctggtaccaggtttgaggtaaagtgaggatgagggctggaggataatgatgtagctgagaatagacagacgaaatactttattaggcttctcaggctaggaactaccagttaccgtgaaaggtgatgatgtagcagaagtgagcaagtggcctgccgaatttgagtgcaagaggaggcactgagtggggagatgagcctggttaagttcttgcctttataccaaaggtcgtcttcaaggtgtttttgcccaagtaggcaactgtatgcttatcaaccgtcttgaaattctgcacagaattctctgggtttatacattgcacaaatttgaagaacattgtatagtggtcatcagttgttatgatacactgctgcctcactgtgggtgacccaacccatttgttacaatttgtccccagaggttattccctcccagccccccacaaaaaaagactgtgggtcttttgactgggaaaattaccattattgtgagtactatttttttttctaaagcgaccgagtagatccttttctccgataacttgatagaatacttagatttttaaaacagactaccaaatgaatttaaaaccaaattaattcaacattctcatctggccataaattgagttctttaacatgtagtgaagcaaagggtgatgtccccattttggcactttgctttcttaagttagtgttcattaacaccagccccaaacagactattgtgattatttggagccttgaagtaattgtgtccgtggggacagtagcatgtgactagggttctcattgaaacatgaggtttctggcatattttgagaggtactgggaagggatgtaaggcaaagtacctcatttataactaccaaaacaggttatgttacaagcaagattacagccttacagcatcagttttgaaagtaatagagtgaaatgatatagcatagtttgagattataacttgttttaacctctcagaattaagttgtccaagacaccatctagtttaagcagttaatataagctgcttaaatggtggtaataataagcaatattacatgtttatgatacttgttttactgtaagctacagtaaatctttagtacttacaaacagggtgacatattttgtagactaagactggtcagatgatattctttcccatatttttgcagaggctagatgttgaaaacagtgaagaaaaaaatacaattttttattgacttctgtaggatttatacaaagcccttttttaaaaatgtgaagtttgaaagttcataccatttattcactaaatacagtttatcagtatttatctcagctaggtgcggtggctcacgcccgtaatctcaacactttgggaggctgaggcaggtggttctctcaagtccaggacttcaagaccagcctggacaacacagtgaaaccccatctctatttaaaaataataaaaatataaaaaaatttaaaaaattatctctgaatataatgtcataaatttagagtgacagttgaaatgaaatctttcttaacagaaggtttatttttgttttttgtttttttcctcaggcttcatggtgtattagataaacttcgctctgttacaactggtaagattcataacttttttttttaatttctgcttgctatggcatatgatttgtttctttctaaagtcatagtgctttgggaaaaacccatcaatttcaaaacggttcatttgaacttttttagaaagcacatacttttatgaacttaagagcagtaaatttaacataattcaaagataatttaagtgtgggagagggagcagtgcactttatccgaaggaaataattacatatatgtgcaaagatttagcctcaaggatatttcagtattttataattgaaaacaatttaaaagttcagtcataataaacgaaattgttgtattaccatgtgtggaataatatttaactattaaaaataatgttgtggaagaataacagaatatacacgcataagatacatgttttaaaaaatgtgtatatatgctcttcccccgaaaaatcacctttgagataattggtgatttttattatatttttaaaattttctacaataaacatactgcttttgaattggtgatgaggaaggaaacgacttaaagtaataaaaatagatggccgggcacggtggctcacgcctgtaatcccagcattttgggaggccaaggtgggcggatcatgggctcaggagatggagaccatcttggccaaccaacatggtgaatctccgtctctactaaaaatacaaaaattagccaggcatcgtggcacatgcctgtaatcccagctacttgggaggccggggcaggagaatcgcttgaaccagggatttggaggttgcagggagccgagaacgcgccactgccctccagcctggcgacagagcgagactccatctcaaaaataaataaataaataaaaataagaaataaaaatagattaaaaggactgtatttttcttttcagaaccctctagtctgaagtcttctgataccaacatctttgatagtaacgtgccttcaaacaagagcaatttcagtcggggagatg

SEQ ID NO: 15043 - DNA, 652 bp, Homo sapiens
agtgccggccggggcggggatacgccgtgtgcgcggccgggggcggaacggaggaggaggcggtggtgtcccggctgcggggtaggagtccgcggcagcctccgggtaagccaagcgccgcgcagtgctgagttcccgcacgccgcagagccatggagatcggcaccgagatcagccgcaagatccggagtgccattaaggggaaattacaagaattaggagcttatgttgtatttgaaatacctgtggaatgaagagaaaaaaattaaagctaagccatcttgtccaatgtaattccagtagagctctgcgactctaaagcttagagctacatctatattttcaagcacatcaactttaagaagaaagttttgaggaaacaaagttttgatctacctttccttttaaatagatgaagaacttcctgattacattatggtgatggtggccaacaagaaaagtcaggaccaaatgacagaggatctgtccctgtttctagggaacaacacaattcgattcaccgtatggcttcatggtgtattagataaacttcgctctgttacaactgaaccctctagtctgaagtcttctgataccaacatctttgatagtaacgtgccttcaaacaagagcaatttcagtcggggagatg

SEQ ID NO: 15044 - DNA, 8579 bp, Homo sapiens
ttttcctagagccgcctttctcacatgcacgtttgctctttttctctcagagtgccattaaggggaaattacaagaattaggagcttatgttggtaagtgtttttttggttgttagtcttacagaatttagagtttgcagctaatagaattttagtgaatgcgtatttctcaccgtactttggacattgggagagactcccttctaccttcttcaaatcttatactccctggttacttctttatcatctttttgcaaccttgttttttttctcccaaacctccttctgttatggtgttttgaaatttagtttcctccgttaaggctctgtttgaccgaattttattttatgtttttcctattctctctctctctcattttaaattctagggacgggtctcgctacgttgcccaggctggtcttaactcctgggctcaagcaattatctgaccttagcctccctaggtgctgggagtgcggggattactggtgtgagccaccatgcctgtttaaagtttcctattcttgttactttcctcttgacatttgtttttagaactctgatgttggatgtgaatgtttgatgctttctggcatttgcttctgtaatggttcagtgagttttattttccgatctctttatgttttccctctctctctgaaacagtaaggctttttccgtctctttattcttttataatttgagtgtttactctgggtcaggtactgtgcttaactattgtatatgtattaactcaggataatccctacgagaatcctggaaggtaagtggcagtatctttgactgtgtaaacaaggaaactgaggctttgcctacttgagcaaggttttatggtttgcccccaaagctggtgcctcctataaaaataatagctaccactaatgacagtggttctcaaagtgtgggagactccaagggcctctgaagtcaaaactgttttcatattaatactaagatggtatttgttatttttcactgtggtggtggtgtttggattgtgtaaaactaatggttgataaaacttgtcagcatagtaacaccataatgaaatcatattcaaatcactccccccttgtagtttttttctttttgagccaattacacttaaaatgtcattgatgaagatgtgaagtccagggtttacaaaatattttttatcttcttagtattcagtgcgaggaaatagaaatgctcataaaacatttttattgtatactgaaatacgattgttctgaggaaaatcattttagttgagaactaagctagccacctctttcagggaacatcatttttaacttcaaagtactgacaaactggttacatacactaggatatttggcagatatttacttgaaagtgagcaaagaaaagaatccatagtctttgttgccaatcacatgtgagctttcaaatgaaaattagaattttggaaaatctgagcctgcctccatgaatttcacagcttcccagtacttaaaaaatttctgattaaataaatggtgatttaaaaaaaatttgttattattattattttttttgagatggaatttcactcgttgcccaggctggagtgcagtggcgtgatcttggctcactgcaagctctgcctcccgggttcaagcgattcttttgcctcagcctcccgagtagctgggattacaggcatctgccactacacccagctaattttttgtatttttagtagagacagggtttcaccatgttggccaggctggtctcaaactcctgaccttgtgattcgcgtgcctcagcctcccaaagtgctgggattacaggtgtcagccactgcatccggccaactcaatggcgatattaaaaaataattattttatactgcataatgaaatatatcaacgtgtcagtggtttttgtagctaagtgaaccaatcttttctaaataaccaatgcataatattacaaaattatgcagtggattaaagatttatttaaactctggggtgggtcagtggatttttgtgcaacagttcaaaaaggtcattgacgtatttgacattccacgttgctttaacatttaataagctaccacttgtttagttttggtgtagtgtcacagaagaatatccaccttatctgaaaagactatcagaatactcctttttcaactgcatatctgtgagaccagattttttcatattcttcagtcataagcacatagaacaagatatataaaaatatgaaacaaggccagtctttgcagtaaatttttctttttcttttttttgagatggggtctcactctgtggttcgggctggagtgcagtggtgcaatcttggctcactgcaacctccgcctcccaggttcaagcaattctcctgcctcagcttcccgagtagctgggattacaggcacctgccaccaccccgccccccccccccggctaatttttgtgtttttagtggagacggtgtttcaccatgttggccaggctgatctcgaactcctgaccttaggtgatccacttgtctcagcctcccagagtgctgggattacaggtgtgagccactgtgccttgcctaaatttttttttggaaaatttaataatgttacttgtgttaatataattggatttgtgattaacatgtgatggatttattttttaatgaattaataaatactttttaattaaaaatgatcagttctaattttgaacaccataaataatagaacctgcataaaccaaagaaggggcccaagaccaaacagtttgagaattggtaatttatggagtacttaccaccatttgctgggcactttcataaacgatttgttgtcaggattgttggaagactaacagatgagagaattgaggctcagagaaaataaagctgaaccaagatttatttattcttttattctttcaacacttgaactgcattttttatagttttctttgaaacaaaaaaagtacttctgaaatgaacctttctgcctgcatagaaatattacaagtatttaaggtattaaagaaatttgtcacagcatggtggttcacgcctgtaatcacagcactttgggaggccgaggtgggtggatcacttgaggtcaggagttcgagaccagcctagtcaacatgctgaaacctggtgtctactaaaaatacaaacattagctgggtgtggtggcaggtgcctgtaatcccagctactcgggaggctgaggcaggagaatcgcttgaacccaggaagcagagcttgcagtgagccgagattgtgccactacactccaacctgggagacagagcaagactctgtcgtaaaagaaaaaaaaaaaaaagagaactggaatggagttttgagggtcagagattagagttcctgataacagcttttgcttccttatcttcttagtgaggtttttgtttttttgttcttttaaatcctagacctcactctcataatcactgtaggattaccactaggagggtgttttttggcttcttttatttattttatttatttatttttttttgagacagagtcttgctctgttgcccaggctggagtgcagtggcaggatctgagcgcactgcaagctccgcctcctgggttcacaccattctcctgcctcggcctcccgagtagctgagactataggcgctcaccaccacacccggctaattttttgtatttttagtagagacagggtttcactgtgttagccaggatggtctcaatctcctaaccttgtgatctgcccaccttggcctcccaaagtgctgggattacaggcatgagccaccgcgcctggccttttttcttttttttttttttttatcctagacctcacccttataatcattgtaggattaccactgtgagggtaaaaccgtgcattgagttgacattatttaatgttaaaattgatttttttaaatgatgtggagcttttgggtctatttgtttattcgatgttgctacaagtttgttactgtgagtaattgaaacctgcctttagcaagggtaaagatgttcacttgagaaatgagtgttattttgaaactttgcaaattaaaactaaacaaaactcaattctttttcttggggaatgttcaaatatttcccataagcttctttgaaattaataagcattattaaaaagattcaaggaagtgaatgcatgctcaagtttgaccctataattcagaatgtttagttttgtaagtatcaattattcttaatttccattcttctagtatttgaaatacctgtggaatgaagagaaaaaaattaaagctaagccatcttgtccaatgtaattccagtagagctctgcgactctaaagcttagagctacatctatattttcaagcacatcaactttaagaagaaagttttgaggaaacaaagttttgatctacctttccttttaaatagatgaagaacttcctgattacattatggtgatggtggccaacaagaaaagtcaggaccaaatgacagaggatctgtccctgtttctagggaacaacacaattcgattcaccgtatggtatgtttctgaatttttgtgcctcagaccaaagtttggcacaagcctgagttgatattctgtccaaagagaggttcttgacacttgagttaggtttactttggagaggcagtttgtgagtgatgagagcacagcctctgtattagtccattttcacagtgctatgaagaaatacccgagactgggtaatttctaaaagaaagaggtttaattgactcagagttccacatggctggggaggccccaggaaggggaagcaagcaccttcttcacaagtcgacaggaaagagaagagtgaaggaggaacttccagagacttatataaaatcatcagatcttgtgagaactcactgtctcttgagaactcgggaactcactgtctcttgagaactcactatcatgagaacatcatgggggaaaccacccccatgacccagtcacctccctcccttgacaggtggggattacaattcaatataagatttgggtggggacacagagccaaaccttatcagcctctgaagccagacagccaaagttgaatcctggctgtgtcttgccttggtttctctagctataaaatggaaatagtacagccacttgctttataaaattattattgaggatcaaatgggctaatatgtgtaaagtacttataggtgtccctagcattttcctaaggaattcttagtatatgtcggctatacttaatatgtttcttttgtaaacttctatatctttttttttgagacagggtcttgctctgtcaccaggctggagcacagtggtacaatcatggctcgctgcagcctcgatctcctggtttcaagtgatcatcccattgcagtcccctccttcctgaactcccatgcctgactaatttttaaattttttgttcagacagggtcttagtatgttgccctggatgctcttgaactcctgggctcaagcagtcctcctgccttggccttcagaagtcttggggttataggtatgagccactgcacctggccagcttctgtatcttatagttccttttcccccaccaaaaccagttacagatgtttttttgaactgggttggcttcttacattgccttttacaatgagttacctttagagggcaaggttttctgtttctcacttttctgtttcttactttttaagctttttgttaaactcacaccttcattttgagtaataattgtagtgtaatgttacagcatattttgagattataagtttttttaagtttggaattttaaaataggcaactttgcttttatacataaattactgttatatgcctttagttgagaatactgactagaagagtaagattcaacttaagatgctaggtcctggtaccaggtttgaggtaaagtgaggatgagggctggaggataatgatgtagctgagaatagacagacgaaatactttattaggcttctcaggctaggaactaccagttaccgtgaaaggtgatgatgtagcagaagtgagcaagtggcctgccgaatttgagtgcaagaggaggcactgagtggggagatgagcctggttaagttcttgcctttataccaaaggtcgtcttcaaggtgtttttgcccaagtaggcaactgtatgcttatcaaccgtcttgaaattctgcacagaattctctgggtttatacattgcacaaatttgaagaacattgtatagtggtcatcagttgttatgatacactgctgcctcactgtgggtgacccaacccatttgttacaatttgtccccagaggttattccctcccagccccccacaaaaaaagactgtgggtcttttgactgggaaaattaccattattgtgagtactatttttttttctaaagcgaccgagtagatccttttctccgataacttgatagaatacttagatttttaaaacagactaccaaatgaatttaaaaccaaattaattcaacattctcatctggccataaattgagttctttaacatgtagtgaagcaaagggtgatgtccccattttggcactttgctttcttaagttagtgttcattaacaccagccccaaacagactattgtgattatttggagccttgaagtaattgtgtccgtggggacagtagcatgtgactagggttctcattgaaacatgaggtttctggcatattttgagaggtactgggaagggatgtaaggcaaagtacctcatttataactaccaaaacaggttatgttacaagcaagattacagccttacagcatcagttttgaaagtaatagagtgaaatgatatagcatagtttgagattataacttgttttaacctctcagaattaagttgtccaagacaccatctagtttaagcagttaatataagctgcttaaatggtggtaataataagcaatattacatgtttatgatacttgttttactgtaagctacagtaaatctttagtacttacaaacagggtgacatattttgtagactaagactggtcagatgatattctttcccatatttttgcagaggctagatgttgaaaacagtgaagaaaaaaatacaattttttattgacttctgtaggatttatacaaagcccttttttaaaaatgtgaagtttgaaagttcataccatttattcactaaatacagtttatcagtatttatctcagctaggtgcggtggctcacgcccgtaatctcaacactttgggaggctgaggcaggtggttctctcaagtccaggacttcaagaccagcctggacaacacagtgaaaccccatctctatttaaaaataataaaaatataaaaaaatttaaaaaattatctctgaatataatgtcataaatttagagtgacagttgaaatgaaatctttcttaacagaaggtttatttttgttttttgtttttttcctcaggcttcatggtgtattagataaacttcgctctgttacaactggtaagattcataacttttttttttaatttctgcttgctatggcatatgatttgtttctttctaaagtcatagtgctttgggaaaaacccatcaatttcaaaacggttcatttgaacttttttagaaagcacatacttttatgaacttaagagcagtaaatttaacataattcaaagataatttaagtgtgggagagggagcagtgcactttatccgaaggaaataattacatatatgtgcaaagatttagcctcaaggatatttcagtattttataattgaaaacaatttaaaagttcagtcataataaacgaaattgttgtattaccatgtgtggaataatatttaactattaaaaataatgttgtggaagaataacagaatatacacgcataagatacatgttttaaaaaatgtgtatatatgctcttcccccgaaaaatcacctttgagataattggtgatttttattatatttttaaaattttctacaataaacatactgcttttgaattggtgatgaggaaggaaacgacttaaagtaataaaaatagatggccgggcacggtggctcacgcctgtaatcccagcattttgggaggccaaggtgggcggatcatgggctcaggagatggagaccatcttggccaaccaacatggtgaatctccgtctctactaaaaatacaaaaattagccaggcatcgtggcacatgcctgtaatcccagctacttgggaggccggggcaggagaatcgcttgaaccagggatttggaggttgcagggagccgagaacgcgccactgccctccagcctggcgacagagcgagactccatctcaaaaataaataaataaataaaaataagaaataaaaatagattaaaaggactgtatttttcttttcagaaccctctagtctgaagtcttctgataccaacatctttgatagtaacgtgccttcaaacaagagcaatttcagtcggggagatgagaggaggcatgaagctgcagtgccaccacttgccattcctagcgcgagacctgaaaaaagagatt

SEQ ID NO: 15045 - DNA, 580 bp, Homo sapiens
ttttcctagagccgcctttctcacatgcacgtttgctctttttctctcagagtgccattaaggggaaattacaagaattaggagcttatgttgtatttgaaatacctgtggaatgaagagaaaaaaattaaagctaagccatcttgtccaatgtaattccagtagagctctgcgactctaaagcttagagctacatctatattttcaagcacatcaactttaagaagaaagttttgaggaaacaaagttttgatctacctttccttttaaatagatgaagaacttcctgattacattatggtgatggtggccaacaagaaaagtcaggaccaaatgacagaggatctgtccctgtttctagggaacaacacaattcgattcaccgtatggcttcatggtgtattagataaacttcgctctgttacaactgaaccctctagtctgaagtcttctgataccaacatctttgatagtaacgtgccttcaaacaagagcaatttcagtcggggagatgagaggaggcatgaagctgcagtgccaccacttgccattcctagcgcgagacctgaaaaaagagatt

SEQ ID NO: 15046 - DNA, 2529 bp, Homo sapiens
gaggcggtggtgtcccggctgcggggtaggagtccgcggcagcctccgggtaagccaagcgccgcgcagtgctgagttcccgcacgccgcagagccatggagatcggcaccgagatcagccgcaagatccggagtgccattaaggggaaattacaagaattaggagcttatgttgatgaagaacttcctgattacattatggtgatggtggccaacaagaaaagtcaggaccaaatgacagaggatctgtccctgtttctagggaacaacacaattcgattcaccgtatggcttcatggtgtattagataaacttcgctctgttacaactgaaccctctagtctgaagtcttctgataccaacatctttgatagtaacgtgccttcaaacaagagcaatttcagtcggggagatgagaggaggcatgaagctgcagtgccaccacttgccattcctagcgcgagacctgaaaaaagagattccagagtttctacaagttcgcaggagtcaaaaaccacaaatgtcagacagacttacgatgatggagctgcaacccgactaatgtcaacagtgaaacctttgagggagccagcaccctctgaagatgtgattgatattaagccagaaccagatgatctcattgacgaagacctcaactttgtgcaggagaatcccttatctcagaaaaaacctacagtgacacttacatatggttcttctcgcccttctattgaaatttatcgaccacctgcaagtagaaatgcagatagtggtgttcatttaaacaggttgcaatttcaacagcagcagaatagtattcatgctgccaagcagcttgatatgcagagtagttgggtatatgaaacaggacgtttgtgtgaaccagaggtgcttaacagcttagaagaaacgtatagtccgttctttagaaacaactcggagaaaatgagtatggaggatgaaaactttcggaagagaaagttgcctgtggtaagttcagttgttaaagtaaaaaaattcaatcatgatggagaagaggaggaagaagatgatgattacgggtctcgaacaggaagcatctccagcagtgtgtctgtgcctgcaaagcctgaaaggagaccttctcttccaccttctaaacaagctaacaagaatctgattttgaaggctatatctgaagctcaagaatccgtaacaaaaacaactaactactctacagttccacagaaacagacacttccagttgctcccagaactcgaacttctcaagaagaattgctagcagaagtggtccagggacaaagtaggacccccagaataagtccccccattaaagaagaggaaacaaaaggagattctgtagaaaaaaatcaaggaactcaacagaggcaattattatcccgactgcaaatcgacccagtaatggcagaaactctgcagatgagtcaagattactatgacatggaatccatggtccatgcagacacaagatcatttattctgaagaagccaaagctgtctgaggaagtagtagtggcaccaaaccaagagtcggggatgaagactgcagattcccttcgggtactttcaggacaccttatgcagacacgagatcttgtacaaccagataaacctgcaagtcccaagtttatagtgacgctggatggtgtccccagccccccaggatacatgtcagatcaagaggaggacatgtgctttgaaggaatgaaacccgtaaaccaaactgcagcctcaaacaagggactcagaggtctcctccacccacagcagttgcacttgctgagcaggcagcttgaggacccaaatgctgagatgagtgaactgagtgtggcacagaaaccagaaaaacttttggagcgctgcaagtactggcctgcttgtaaaaatggggatgagtgtgcctaccatcaccccatctcaccctgcaaagccttccccaattgtaaatttgctgaaaaatgtttgtttgttcacccaaattgtaaatatgatgcaaagtgtactaaaccagattgtcccttcactcatgtgagtagaagaattccagtactgtctccaaaaccagttgcaccaccagcaccaccttccagtagtcagctctgccgttacttccctgcttgtaagaagatggaatgtcccttctatcatccaaaacattgtaggtttaacactcaatgtacaagaccggactgcacattctaccatcccaccattaatgtcccaccacgacatgccttgaaatggattcgacctcaaaccagcgaatagcacccagtcctgcctggcagaagatcatgcagtttggaagttttcatgtactgatgaaagatactctacagaacttgtcaaatctttgaaacttggaatatattgctttcataatatgaagttttattgcctatctatctgaagtgtctaatttttcaagtttgtaagtttattatgtggttttaacattgggtgtttttgttttgtttttactatgaaaagacagcttaaggaagagct

SEQ ID NO: 15047 - DNA, 4589 bp, Homo sapiens
cttttggagcgctgcaagtactggcctgcttgtaaaaatggggatgagtgtgcctaccatcaccccatctcaccctgcaagtgagtaccatccccccatctcaccctgcaagtgagtaccatccccccatctcaccctgcaagtaccatcccccatctcacctggcaagtaccatcccatctcacccagcaagtaccatcccccacatctcaaccctcaagtgagtaccatcccatctcaccctgcaagtaccatcccatttcaccctgcaagtaccatcccccatctcaccctgcaagtaccatctccccatctcaccctgtaactaccatcccatctcaccctgcaagtgagtaccatccctgcatttcaccctgcaagtaccatctcatctcaccctgcaagtaccaccccctcatctcaccctgcaagtatcatcccccatctagccctgtaagtgcgagtaccatcccccatcttaccctgcaagtaccatcacccacttcaccctgcaagtaccatcccccacctcagcctgcaagtaccatcccccacctcagcctgcaagtaccatcccctatctcaccctgcaagtaccatccccatctcaccctgcaagtatcatcccccacctcaccctgcaagtaccatcccccatctcaccctgcaattgagtaccatcccccatctcaccctgcaagtaccatcccccatctcaccctgcaagtgagtaccatcccccatctcaccttgcaagtaccatcccccatctcaccctgcaagtaccatcccccatctcaccctgcaagtatcatctcaccctgcaagtgagtaccatccccccatctcatcctgcaagtaccatcccccatctcaccctgcaagtaccatcccccatctcaccctgcaagtaccatcccccatcttaccctgcaagtgaataccatccccatctcaccctgcaagtgaataccatccccatctcaccctgcaagtgaataccatcccccatctcaccctgcaagtgaataccatccccatctcatcctgcaagtgaataccatccccatctcaccctgcaagtcatagccagctgattttggctttcagtttagtgtctgtatcttacaccttattttgtttttgtttttctgtggacaagtttttagttttataactaaatggagtgacaattaccatggccctctccagagtagcgtatttcttgttcatgtatgtttgttgagaggcaagggtgggggggctttgtttgtgcctcggacctgtgagatactgaaatacctggggttccttaagaattctgtacgtttaagcagatgggtatatggtaactgccccagtttgtatgcattttggccacacgcagtatacacagattttgaggagttgagggaaaagttagttatgggtaatgaaaacattttggacttgggttaaatttttccttacaagctggctggctcaatgtaatgagctttatgagatggctttttggggcttcttttttttgccgggggtaggtcctatggatggaatcttcatttttaattcttttaaggaaatgatgtgggaataatacagctgtacatataaggagagtatgggatgagtctttttgtatcacaaagccttgcatagaggatgtgtttattgtattaatgagttcactgcataaaatatataccttttttattaagtggtgtgatttttatcacaaaagcttgtctttcttggtggcttggcttgagttaaaagcctgtgtttgtgttatcccaagctttggaataaatgattgtgtcctattttgatatatggtcttattttaaaatattctttttgttgctgttttttttgcatttctcaaaacaagtagtgatggggagtgtaaagagcccttatacacagaactaataatgcattgagaagattgaatatgaaatatgctttttttttgttttgtagagccttccccaattgtaaatttgctgaaaaatgtttgtttgttcacccaaattgtaaatatgatgcaaagtgtactaaaccagattgtcccttcactcatgtgagtagaagaattccagtactgtctccaaaaccaggtgagtgagtgactgtgctactacatttgggtaaaaaatataaaatggcattttgtgactgtaaatggaattgaacaaacaaaagatggtttcagaaataattttggcaggatcagttaatccaaccagtctttaaagagcaagtgtgcctatctgtagtattccgaagtattttgactagtgaatatataaaccttaccattctaatttaaaaatggttttcactttcaaaaaaaacatcagtagactgcattaaaaatgggttttccaaacagattggagatcagtcctggtttttattttgttagcagttgcaccaccagcaccaccttccagtagtcagctctgccgttacttccctgcttgtaagaagatggaatgtcccttctatcatccaaaagtaagaacttctattttctcaaatcaatttagtgacaacatctcaatttcctcatttaacttcttttttgtcagagttactacattggtgcaaaagtaattgcgatttttgccagtaaaactattaagttgttcctcgtcactgaacctccatctggccccttaggccaagtggtctgaaactgttcaatgttagtatcccaagcactcagtggggggaagcatatctttgctagtcacattttccattattccctgcatttaagtatatggatgggttttagcgggggctggggggcagtttgaacctaatgtcagaactgagatgaagaaatccagtaggtactgcttaaaaccatccaaacttgtactgatgatggttgatgaatctccagatgtttagttggtcaaaatgaattatctccttcttgccccggtagcttgaggaccatatgaaggccttcacttgcccccatctgtaactgggcgtagatgagggtactcagtgaagagtgtaagggataattagaagtttttgtggtatgctaaactaccttttgaaattgtacttgctgtgattctttgactagaattttgtgtctcaaggttaagtccatttttcaaggcttcactagtattaaaatggtccttatagatggaatctcttactctgttaatggttagggtgggctggttattgtctcctaagttgtatgttggccaggtgaggtgggtcaggcctgctatcctagtactttgggaggtagaggcagaagtggaaggatcgtttgagcccgggagtttgaaaccagcctaggcaacatttaagagaccccatctcttaaaaaaaaaaaaaacaggcttggtagcacacgcctgtagtcccagctactcgggagactgaggcaagaggtcatgccacttcactccagcctgggtgacagagtgagaccctgtctcaaataataaaataatgtgtttacttatattagccttgtggatattgttgaagctctgttatctctattcagcattgtaggtttaacactcaatgtacaagaccggactgcacattctaccatcccaccattaatgtcccaccacgacatgccttgaaatggattcgacctcaaaccaggtaaacattcaaattcgtttttctcatgtcagttcaaattcttttttctaatttgcagtttctaaatttataagcacacaaaattggaaactagactgttactttgaatttttttctttgctgtttaattatagaaggctcctttggcaaaataatttactacatgggctaaattttacattatccagtggttacttttttaacctagattatcttgctctgttgcccaggttggagtgcagtcacactatcatagctcactgcagcctcaaacccctgggttcaatccatcctcccacctgtagctgagactacaagcgtgtgcctctatacctggctaattttttttattttaagtagagatggggtcttgaactcctgagctgaagcgatatccttccaccgtggccttccaaagtaccaggattacaggcatgagccaccacacccagccagattttaacttctcattatatactacgcaaacatatactaaggccagcaggagtatatatatgtgtactgtacttgaatttcacatccattttcttcgacattagcaactgggagatactgaaaggaagtttcaaaatattttagtgtggccagaaaatttaattacatatggtattatcttttatctacctgacataattgaattatttttaaaaatctgccatttatattgtaatcttatgaccaaatatttattgcttaaaactagtcaactttttaaactgagatatatggtatatatggatacaaagcagataattaaaacaatttttggttctgttcattcagcgaatagcacccagtcctgcctggcagaagatcatgcagtttggaagttttcatgtactgatgaaagatactctacagaacttgtcaaatctttgaaacttggaatatattgctttcataatatgaag

SEQ ID NO: 15048 - DNA, 577 bp, Homo sapiens
cttttggagcgctgcaagtactggcctgcttgtaaaaatggggatgagtgtgcctaccatcaccccatctcaccctgcaaagccttccccaattgtaaatttgctgaaaaatgtttgtttgttcacccaaattgtaaatatgatgcaaagtgtactaaaccagattgtcccttcactcatgtgagtagaagaattccagtactgtctccaaaaccagattggagatcagtcctggtttttattttgttagcagttgcaccaccagcaccaccttccagtagtcagctctgccgttacttccctgcttgtaagaagatggaatgtcccttctatcatccaaaacattgtaggtttaacactcaatgtacaagaccggactgcacattctaccatcccaccattaatgtcccaccacgacatgccttgaaatggattcgacctcaaaccagcgaatagcacccagtcctgcctggcagaagatcatgcagtttggaagttttcatgtactgatgaaagatactctacagaacttgtcaaatctttgaaacttggaatatattgctttcataatatgaag

SEQ ID NO: 15049 - DNA, 9869 bp, Homo sapiens
ggaacggaggaggaggcggtggtgtcccggctgcggggtaggagtccgcggcagcctccgggtaagccaagcgccgcgcagtgctgagttcccgcacgccgcagagccatggagatcggcaccgagatcagccgcaagatccgggtgaggcccgtgccggtcgggggtgggaagccaggtctcggcgagcgggcggttgtcaggagtaacggggactgtgggcccgggtggacgccgcggcctggcctccgctggacgctcctggcgggctgcggctcctcctcgtccaggccgcctcggccctggggacatttgcggcctcggagcgtggctgcggctgaagtagccgccgggaaatggaaggacaggcgcaggcccggctggagccaccaccgcggcgcacggcgccgctttggatccgctgcgggaggtgggcgccgcggggctggggctggagctggagtggggtgcggggtggggggcggtgcaggcgaggctcctcccagcccccgcccgggggatccgaggtgcgcgcaccagcaaagtggcctcagccgctgcagagtccggtcttgttttcctagagccgcctttctcacatgcacgtttgctctttttctctcagagtgccattaaggggaaattacaagaattaggagcttatgttggtaagtgtttttttggttgttagtcttacagaatttagagtttgcagctaatagaattttagtgaatgcgtatttctcaccgtactttggacattgggagagactcccttctaccttcttcaaatcttatactccctggttacttctttatcatctttttgcaaccttgttttttttctcccaaacctccttctgttatggtgttttgaaatttagtttcctccgttaaggctctgtttgaccgaattttattttatgtttttcctattctctctctctctcattttaaattctagggacgggtctcgctacgttgcccaggctggtcttaactcctgggctcaagcaattatctgaccttagcctccctaggtgctgggagtgcggggattactggtgtgagccaccatgcctgtttaaagtttcctattcttgttactttcctcttgacatttgtttttagaactctgatgttggatgtgaatgtttgatgctttctggcatttgcttctgtaatggttcagtgagttttattttccgatctctttatgttttccctctctctctgaaacagtaaggctttttccgtctctttattcttttataatttgagtgtttactctgggtcaggtactgtgcttaactattgtatatgtattaactcaggataatccctacgagaatcctggaaggtaagtggcagtatctttgactgtgtaaacaaggaaactgaggctttgcctacttgagcaaggttttatggtttgcccccaaagctggtgcctcctataaaaataatagctaccactaatgacagtggttctcaaagtgtgggagactccaagggcctctgaagtcaaaactgttttcatattaatactaagatggtatttgttatttttcactgtggtggtggtgtttggattgtgtaaaactaatggttgataaaacttgtcagcatagtaacaccataatgaaatcatattcaaatcactccccccttgtagtttttttctttttgagccaattacacttaaaatgtcattgatgaagatgtgaagtccagggtttacaaaatattttttatcttcttagtattcagtgcgaggaaatagaaatgctcataaaacatttttattgtatactgaaatacgattgttctgaggaaaatcattttagttgagaactaagctagccacctctttcagggaacatcatttttaacttcaaagtactgacaaactggttacatacactaggatatttggcagatatttacttgaaagtgagcaaagaaaagaatccatagtctttgttgccaatcacatgtgagctttcaaatgaaaattagaattttggaaaatctgagcctgcctccatgaatttcacagcttcccagtacttaaaaaatttctgattaaataaatggtgatttaaaaaaaatttgttattattattattttttttgagatggaatttcactcgttgcccaggctggagtgcagtggcgtgatcttggctcactgcaagctctgcctcccgggttcaagcgattcttttgcctcagcctcccgagtagctgggattacaggcatctgccactacacccagctaattttttgtatttttagtagagacagggtttcaccatgttggccaggctggtctcaaactcctgaccttgtgattcgcgtgcctcagcctcccaaagtgctgggattacaggtgtcagccactgcatccggccaactcaatggcgatattaaaaaataattattttatactgcataatgaaatatatcaacgtgtcagtggtttttgtagctaagtgaaccaatcttttctaaataaccaatgcataatattacaaaattatgcagtggattaaagatttatttaaactctggggtgggtcagtggatttttgtgcaacagttcaaaaaggtcattgacgtatttgacattccacgttgctttaacatttaataagctaccacttgtttagttttggtgtagtgtcacagaagaatatccaccttatctgaaaagactatcagaatactcctttttcaactgcatatctgtgagaccagattttttcatattcttcagtcataagcacatagaacaagatatataaaaatatgaaacaaggccagtctttgcagtaaatttttctttttcttttttttgagatggggtctcactctgtggttcgggctggagtgcagtggtgcaatcttggctcactgcaacctccgcctcccaggttcaagcaattctcctgcctcagcttcccgagtagctgggattacaggcacctgccaccaccccgccccccccccccggctaatttttgtgtttttagtggagacggtgtttcaccatgttggccaggctgatctcgaactcctgaccttaggtgatccacttgtctcagcctcccagagtgctgggattacaggtgtgagccactgtgccttgcctaaatttttttttggaaaatttaataatgttacttgtgttaatataattggatttgtgattaacatgtgatggatttattttttaatgaattaataaatactttttaattaaaaatgatcagttctaattttgaacaccataaataatagaacctgcataaaccaaagaaggggcccaagaccaaacagtttgagaattggtaatttatggagtacttaccaccatttgctgggcactttcataaacgatttgttgtcaggattgttggaagactaacagatgagagaattgaggctcagagaaaataaagctgaaccaagatttatttattcttttattctttcaacacttgaactgcattttttatagttttctttgaaacaaaaaaagtacttctgaaatgaacctttctgcctgcatagaaatattacaagtatttaaggtattaaagaaatttgtcacagcatggtggttcacgcctgtaatcacagcactttgggaggccgaggtgggtggatcacttgaggtcaggagttcgagaccagcctagtcaacatgctgaaacctggtgtctactaaaaatacaaacattagctgggtgtggtggcaggtgcctgtaatcccagctactcgggaggctgaggcaggagaatcgcttgaacccaggaagcagagcttgcagtgagccgagattgtgccactacactccaacctgggagacagagcaagactctgtcgtaaaagaaaaaaaaaaaaaagagaactggaatggagttttgagggtcagagattagagttcctgataacagcttttgcttccttatcttcttagtgaggtttttgtttttttgttcttttaaatcctagacctcactctcataatcactgtaggattaccactaggagggtgttttttggcttcttttatttattttatttatttatttttttttgagacagagtcttgctctgttgcccaggctggagtgcagtggcaggatctgagcgcactgcaagctccgcctcctgggttcacaccattctcctgcctcggcctcccgagtagctgagactataggcgctcaccaccacacccggctaattttttgtatttttagtagagacagggtttcactgtgttagccaggatggtctcaatctcctaaccttgtgatctgcccaccttggcctcccaaagtgctgggattacaggcatgagccaccgcgcctggccttttttcttttttttttttttttatcctagacctcacccttataatcattgtaggattaccactgtgagggtaaaaccgtgcattgagttgacattatttaatgttaaaattgatttttttaaatgatgtggagcttttgggtctatttgtttattcgatgttgctacaagtttgttactgtgagtaattgaaacctgcctttagcaagggtaaagatgttcacttgagaaatgagtgttattttgaaactttgcaaattaaaactaaacaaaactcaattctttttcttggggaatgttcaaatatttcccataagcttctttgaaattaataagcattattaaaaagattcaaggaagtgaatgcatgctcaagtttgaccctataattcagaatgtttagttttgtaagtatcaattattcttaatttccattcttctagtatttgaaatacctgtggaatgaagagaaaaaaattaaagctaagccatcttgtccaatgtaattccagtagagctctgcgactctaaagcttagagctacatctatattttcaagcacatcaactttaagaagaaagttttgaggaaacaaagttttgatctacctttccttttaaatagatgaagaacttcctgattacattatggtgatggtggccaacaagaaaagtcaggaccaaatgacagaggatctgtccctgtttctagggaacaacacaattcgattcaccgtatggtatgtttctgaatttttgtgcctcagaccaaagtttggcacaagcctgagttgatattctgtccaaagagaggttcttgacacttgagttaggtttactttggagaggcagtttgtgagtgatgagagcacagcctctgtattagtccattttcacagtgctatgaagaaatacccgagactgggtaatttctaaaagaaagaggtttaattgactcagagttccacatggctggggaggccccaggaaggggaagcaagcaccttcttcacaagtcgacaggaaagagaagagtgaaggaggaacttccagagacttatataaaatcatcagatcttgtgagaactcactgtctcttgagaactcgggaactcactgtctcttgagaactcactatcatgagaacatcatgggggaaaccacccccatgacccagtcacctccctcccttgacaggtggggattacaattcaatataagatttgggtggggacacagagccaaaccttatcagcctctgaagccagacagccaaagttgaatcctggctgtgtcttgccttggtttctctagctataaaatggaaatagtacagccacttgctttataaaattattattgaggatcaaatgggctaatatgtgtaaagtacttataggtgtccctagcattttcctaaggaattcttagtatatgtcggctatacttaatatgtttcttttgtaaacttctatatctttttttttgagacagggtcttgctctgtcaccaggctggagcacagtggtacaatcatggctcgctgcagcctcgatctcctggtttcaagtgatcatcccattgcagtcccctccttcctgaactcccatgcctgactaatttttaaattttttgttcagacagggtcttagtatgttgccctggatgctcttgaactcctgggctcaagcagtcctcctgccttggccttcagaagtcttggggttataggtatgagccactgcacctggccagcttctgtatcttatagttccttttcccccaccaaaaccagttacagatgtttttttgaactgggttggcttcttacattgccttttacaatgagttacctttagagggcaaggttttctgtttctcacttttctgtttcttactttttaagctttttgttaaactcacaccttcattttgagtaataattgtagtgtaatgttacagcatattttgagattataagtttttttaagtttggaattttaaaataggcaactttgcttttatacataaattactgttatatgcctttagttgagaatactgactagaagagtaagattcaacttaagatgctaggtcctggtaccaggtttgaggtaaagtgaggatgagggctggaggataatgatgtagctgagaatagacagacgaaatactttattaggcttctcaggctaggaactaccagttaccgtgaaaggtgatgatgtagcagaagtgagcaagtggcctgccgaatttgagtgcaagaggaggcactgagtggggagatgagcctggttaagttcttgcctttataccaaaggtcgtcttcaaggtgtttttgcccaagtaggcaactgtatgcttatcaaccgtcttgaaattctgcacagaattctctgggtttatacattgcacaaatttgaagaacattgtatagtggtcatcagttgttatgatacactgctgcctcactgtgggtgacccaacccatttgttacaatttgtccccagaggttattccctcccagccccccacaaaaaaagactgtgggtcttttgactgggaaaattaccattattgtgagtactatttttttttctaaagcgaccgagtagatccttttctccgataacttgatagaatacttagatttttaaaacagactaccaaatgaatttaaaaccaaattaattcaacattctcatctggccataaattgagttctttaacatgtagtgaagcaaagggtgatgtccccattttggcactttgctttcttaagttagtgttcattaacaccagccccaaacagactattgtgattatttggagccttgaagtaattgtgtccgtggggacagtagcatgtgactagggttctcattgaaacatgaggtttctggcatattttgagaggtactgggaagggatgtaaggcaaagtacctcatttataactaccaaaacaggttatgttacaagcaagattacagccttacagcatcagttttgaaagtaatagagtgaaatgatatagcatagtttgagattataacttgttttaacctctcagaattaagttgtccaagacaccatctagtttaagcagttaatataagctgcttaaatggtggtaataataagcaatattacatgtttatgatacttgttttactgtaagctacagtaaatctttagtacttacaaacagggtgacatattttgtagactaagactggtcagatgatattctttcccatatttttgcagaggctagatgttgaaaacagtgaagaaaaaaatacaattttttattgacttctgtaggatttatacaaagcccttttttaaaaatgtgaagtttgaaagttcataccatttattcactaaatacagtttatcagtatttatctcagctaggtgcggtggctcacgcccgtaatctcaacactttgggaggctgaggcaggtggttctctcaagtccaggacttcaagaccagcctggacaacacagtgaaaccccatctctatttaaaaataataaaaatataaaaaaatttaaaaaattatctctgaatataatgtcataaatttagagtgacagttgaaatgaaatctttcttaacagaaggtttatttttgttttttgtttttttcctcaggcttcatggtgtattagataaacttcgctctgttacaactggtaagattcataacttttttttttaatttctgcttgctatggcatatgatttgtttctttctaaagtcatagtgctttgggaaaaacccatcaatttcaaaacggttcatttgaacttttttagaaagcacatacttttatgaacttaagagcagtaaatttaacataattcaaagataatttaagtgtgggagagggagcagtgcactttatccgaaggaaataattacatatatgtgcaaagatttagcctcaaggatatttcagtattttataattgaaaacaatttaaaagttcagtcataataaacgaaattgttgtattaccatgtgtggaataatatttaactattaaaaataatgttgtggaagaataacagaatatacacgcataagatacatgttttaaaaaatgtgtatatatgctcttcccccgaaaaatcacctttgagataattggtgatttttattatatttttaaaattttctacaataaacatactgcttttgaattggtgatgaggaaggaaacgacttaaagtaataaaaatagatggccgggcacggtggctcacgcctgtaatcccagcattttgggaggccaaggtgggcggatcatgggctcaggagatggagaccatcttggccaaccaacatggtgaatctccgtctctactaaaaatacaaaaattagccaggcatcgtggcacatgcctgtaatcccagctacttgggaggccggggcaggagaatcgcttgaaccagggatttggaggttgcagggagccgagaacgcgccactgccctccagcctggcgacagagcgagactccatctcaaaaataaataaataaataaaaataagaaataaaaatagattaaaaggactgtatttttcttttcagaaccctctagtctgaagtcttctgataccaacatctttgatagtaacgtgccttcaaacaagagcaatttcagtcggggagatgagaggaggcatgaagctgcagtgccaccacttgccattcctagcgcgagacctgaaaaaagagattccagagtttctacaagttcgcaggagtcaaaaaccacaaatgtcaggtaagagtctggtgtagacctgctgggggcagatggctctgtgtatgtgacatttatattagtttttatatctttcagtttgctgttctcagcaatttttagaaacaatgaagtgatcgtgagtagttttttgaataaaataatggataagatctaagtatgattatcttttatcacaaatttagtaaatcaaagttgaaagaaagtgcaatttcaaagcagttttgaatggaatatgtaaagggagtatcctcagttttttcattgaaatttttcaagtaaacattctttaaagatttggtgataattgccctaatttggctgtaatacattttgttgttcttttaaatagacagacttacgatgatggagctgcaacccgactaatgtcaacagtgaaacctttgagggagccagcaccctctgaagatgtgattgatattaagccagaaccagatgatctcattgacgaagacctcaactttgtgcaggagaatcccttatctcagaaaaaacctacagtgacacttacatatggttcttctcgcccttctattgaaatttatcgaccacctgcaagtagaaatgcagatagtggtgttcatttaaacaggttgcaatttcaacagcagcagaatagtattcatgctgccaagcagcttgatatgc

SEQ ID NO: 15050 - DNA, 813 bp, Homo sapiens
ggaacggaggaggaggcggtggtgtcccggctgcggggtaggagtccgcggcagcctccgggtaagccaagcgccgcgcagtgctgagttcccgcacgccgcagagccatggagatcggcaccgagatcagccgcaagatccggatgaagaacttcctgattacattatggtgatggtggccaacaagaaaagtcaggaccaaatgacagaggatctgtccctgtttctagggaacaacacaattcgattcaccgtatggcttcatggtgtattagataaacttcgctctgttacaactgaaccctctagtctgaagtcttctgataccaacatctttgatagtaacgtgccttcaaacaagagcaatttcagtcggggagatgagaggaggcatgaagctgcagtgccaccacttgccattcctagcgcgagacctgaaaaaagagattccagagtttctacaagttcgcaggagtcaaaaaccacaaatgtcagacagacttacgatgatggagctgcaacccgactaatgtcaacagtgaaacctttgagggagccagcaccctctgaagatgtgattgatattaagccagaaccagatgatctcattgacgaagacctcaactttgtgcaggagaatcccttatctcagaaaaaacctacagtgacacttacatatggttcttctcgcccttctattgaaatttatcgaccacctgcaagtagaaatgcagatagtggtgttcatttaaacaggttgcaatttcaacagcagcagaatagtattcatgctgccaagcagcttgatatgc

SEQ ID NO: 15051 - DNA, 3772 bp, Homo sapiens
tgagtaccatccccccatctcatcctgcaagtaccatcccccatctcaccctgcaagtaccatcccccatctcaccctgcaagtaccatcccccatcttaccctgcaagtgaataccatccccatctcaccctgcaagtgaataccatccccatctcaccctgcaagtgaataccatcccccatctcaccctgcaagtgaataccatccccatctcatcctgcaagtgaataccatccccatctcaccctgcaagtcatagccagctgattttggctttcagtttagtgtctgtatcttacaccttattttgtttttgtttttctgtggacaagtttttagttttataactaaatggagtgacaattaccatggccctctccagagtagcgtatttcttgttcatgtatgtttgttgagaggcaagggtgggggggctttgtttgtgcctcggacctgtgagatactgaaatacctggggttccttaagaattctgtacgtttaagcagatgggtatatggtaactgccccagtttgtatgcattttggccacacgcagtatacacagattttgaggagttgagggaaaagttagttatgggtaatgaaaacattttggacttgggttaaatttttccttacaagctggctggctcaatgtaatgagctttatgagatggctttttggggcttcttttttttgccgggggtaggtcctatggatggaatcttcatttttaattcttttaaggaaatgatgtgggaataatacagctgtacatataaggagagtatgggatgagtctttttgtatcacaaagccttgcatagaggatgtgtttattgtattaatgagttcactgcataaaatatataccttttttattaagtggtgtgatttttatcacaaaagcttgtctttcttggtggcttggcttgagttaaaagcctgtgtttgtgttatcccaagctttggaataaatgattgtgtcctattttgatatatggtcttattttaaaatattctttttgttgctgttttttttgcatttctcaaaacaagtagtgatggggagtgtaaagagcccttatacacagaactaataatgcattgagaagattgaatatgaaatatgctttttttttgttttgtagagccttccccaattgtaaatttgctgaaaaatgtttgtttgttcacccaaattgtaaatatgatgcaaagtgtactaaaccagattgtcccttcactcatgtgagtagaagaattccagtactgtctccaaaaccaggtgagtgagtgactgtgctactacatttgggtaaaaaatataaaatggcattttgtgactgtaaatggaattgaacaaacaaaagatggtttcagaaataattttggcaggatcagttaatccaaccagtctttaaagagcaagtgtgcctatctgtagtattccgaagtattttgactagtgaatatataaaccttaccattctaatttaaaaatggttttcactttcaaaaaaaacatcagtagactgcattaaaaatgggttttccaaacagattggagatcagtcctggtttttattttgttagcagttgcaccaccagcaccaccttccagtagtcagctctgccgttacttccctgcttgtaagaagatggaatgtcccttctatcatccaaaagtaagaacttctattttctcaaatcaatttagtgacaacatctcaatttcctcatttaacttcttttttgtcagagttactacattggtgcaaaagtaattgcgatttttgccagtaaaactattaagttgttcctcgtcactgaacctccatctggccccttaggccaagtggtctgaaactgttcaatgttagtatcccaagcactcagtggggggaagcatatctttgctagtcacattttccattattccctgcatttaagtatatggatgggttttagcgggggctggggggcagtttgaacctaatgtcagaactgagatgaagaaatccagtaggtactgcttaaaaccatccaaacttgtactgatgatggttgatgaatctccagatgtttagttggtcaaaatgaattatctccttcttgccccggtagcttgaggaccatatgaaggccttcacttgcccccatctgtaactgggcgtagatgagggtactcagtgaagagtgtaagggataattagaagtttttgtggtatgctaaactaccttttgaaattgtacttgctgtgattctttgactagaattttgtgtctcaaggttaagtccatttttcaaggcttcactagtattaaaatggtccttatagatggaatctcttactctgttaatggttagggtgggctggttattgtctcctaagttgtatgttggccaggtgaggtgggtcaggcctgctatcctagtactttgggaggtagaggcagaagtggaaggatcgtttgagcccgggagtttgaaaccagcctaggcaacatttaagagaccccatctcttaaaaaaaaaaaaaacaggcttggtagcacacgcctgtagtcccagctactcgggagactgaggcaagaggtcatgccacttcactccagcctgggtgacagagtgagaccctgtctcaaataataaaataatgtgtttacttatattagccttgtggatattgttgaagctctgttatctctattcagcattgtaggtttaacactcaatgtacaagaccggactgcacattctaccatcccaccattaatgtcccaccacgacatgccttgaaatggattcgacctcaaaccaggtaaacattcaaattcgtttttctcatgtcagttcaaattcttttttctaatttgcagtttctaaatttataagcacacaaaattggaaactagactgttactttgaatttttttctttgctgtttaattatagaaggctcctttggcaaaataatttactacatgggctaaattttacattatccagtggttacttttttaacctagattatcttgctctgttgcccaggttggagtgcagtcacactatcatagctcactgcagcctcaaacccctgggttcaatccatcctcccacctgtagctgagactacaagcgtgtgcctctatacctggctaattttttttattttaagtagagatggggtcttgaactcctgagctgaagcgatatccttccaccgtggccttccaaagtaccaggattacaggcatgagccaccacacccagccagattttaacttctcattatatactacgcaaacatatactaaggccagcaggagtatatatatgtgtactgtacttgaatttcacatccattttcttcgacattagcaactgggagatactgaaaggaagtttcaaaatattttagtgtggccagaaaatttaattacatatggtattatcttttatctacctgacataattgaattatttttaaaaatctgccatttatattgtaatcttatgaccaaatatttattgcttaaaactagtcaactttttaaactgagatatatggtatatatggatacaaagcagataattaaaacaatttttggttctgttcattcagcgaatagcacccagtcctgcctggcagaagatcatgcagtttggaagttttcatgtactgatgaaagatactctacagaacttgtcaaatctttgaaacttggaatatattgctttcataatatgaagttttattgcct

SEQ ID NO: 15052 - DNA, 502 bp, Homo sapiens
tgagtaccatccccccatctcatcctgcaaagccttccccaattgtaaatttgctgaaaaatgtttgtttgttcacccaaattgtaaatatgatgcaaagtgtactaaaccagattgtcccttcactcatgtgagtagaagaattccagtactgtctccaaaaccagttgcaccaccagcaccaccttccagtagtcagctctgccgttacttccctgcttgtaagaagatggaatgtcccttctatcatccaaaacattgtaggtttaacactcaatgtacaagaccggactgcacattctaccatcccaccattaatgtcccaccacgacatgccttgaaatggattcgacctcaaaccagcgaatagcacccagtcctgcctggcagaagatcatgcagtttggaagttttcatgtactgatgaaagatactctacagaacttgtcaaatctttgaaacttggaatatattgctttcataatatgaagttttattgcct

SEQ ID NO: 15053 - DNA, 17470 bp, Homo sapiens
gagctatacagatggtacttagaggatgtagggccctacgtattagggcttcttagttgtagcgaagagcaattggtctggtacgtttagctttttcacatttagttttgaattctgactctagaaatgtacaaccccatcttttgaattacaggttttaagatgttatttgctcttaatacgtcttaaggtaacagccttgatcactgcttttactttcgatgaaataacttaatgagctgtgaagaaaaaattatcagattttaagggagagaattttatgaaaatgtctttgaggttcctgtcacctttatgagaatgtcttcaaagtttccatcaccacctctaccaatttttcttccaccggagccagtggacttaggttccataacaagctcctcttgttcactgaatgagctagacaatatttcccaccttttaaggaaaatatcagctgatatcaatgaaattaaaggaatgaaagcagctattttgacagtggaagcaaatctttttgatctaaatgttagagtgtccaagaatgaagcaaaaatttcatctttggaggttaaaatgaatgaatattcaacaacatatgaatgcaacagacagtttgaagatcaagaagaagatactgaatcacagtcaagaactactgatgtaaaaataatcggcttccttagaaacgttgagaaaggtaaactcttaatatatgatatgttctaggtacccatcctttgatctgtatctttccacgtatgttgactgtagctctgatgtggagggagcaagttacagagaacttgaatttttcatggacctttaatgacaaatttggattctgcttgatttagcttagcaatctagaattgatcagaattccatcctctttaatggagctctctaaaacgatgttttgaaaagacagatgaacctagagcaatgaagcaaaacttgaaatgtggaagtgtggtctttcatgtgtcttgtgaaattattttaaaatgtctcattctttcatcatgtactgttgatgtgaaggagacctgttgcagtatttggatggaaagagcattcttcctgtaacttttcacctcagttttccaagcttcccacaggaatgcaacttgacctaagtgtcatcttcgttacagttcctcagaatgtgtgtttttttatggtaataattctggaaggaattgacttttttgggacgcaccagtaaaatttcatataacttatgttttaaaggaaactaactgatacaatttcaaatcgagtataggttttaaaatttaaaaacaccttttaatgaaatgtggtgcttggtgggagatggcccacttaacatctttgcactgagtaagcaaagcctgtccttgtgaagccacctgtaatggatatacccaaaatcagcatgtgggcatcttagtaagatttcagtatttgcaaccctatcagttacatccctttgtacactgtagtgcagtaccttataatgagcaagtgagtgcctgatgtctgctaagcgctgtgggggctacagaaaagtgtgacattctcccatcctcaaggagcttaacatcaaatcgaggatggaaaaaaatcagttctttgtccctattttgtgcagtcagactgctgggcatattattgttaggaatagtgaacctaataggaattaatgttaggagcctattttagaagaaataagtagttgaacatcttttcttgtggaagaggcaaagaattattatcatgctttgctaacatagggtgtggattgtagagctgagtgtcttattgttttctttgcatgcatcgaagcccagagtttgtcttttaggaactcttgtttagatgatgagagtgttttgttttgctatttcgattatcttcaaaggtcatgagtgagtcgtgatggtaagagctcaggtgatggagggaggtgcttgccatgcttattgtgcagttggctgtgatgcgagctgctgggccacaaggtgccttttcctggattttccacccgtttgccacctttactttccccgcagaattcaaattcaggaaaactgatgtcctcatagagggagaaccaggagtgttttaaattggcatttgtggtttaaccctgagtacagccttttttgtcttacaggatatgtctttggtctataaatactattaaattgaattgttgaagctttaagttacttttaagacttcaagttaagaacccagaaggattgatttttgggaaccacatgctggtattgtctgtgttgtaagcttagtgaagttttaaaatttatattctaggaactcaacagaggcaattattatcccgactgcaaatcgacccagtaatggcagaaactctgcagatgagtcaaggttggtaatgtttcaagttgtactgtaatccagccatttcagttgccatttccatttcttacaccccatttaacgtatctcggatctcttagatcctgccctaagatgttatatttagatctgtgaaaatattttagggccaggagataagatctgcatttctttcatgttatatagtgttataattttttgcctcattggaaaactttgttcctttcacaccattccaagtgtgtccctagcactgtcggctgtcactctcctgctgtcaggagtgacctgcgtttctgatttaccctcccactctacccagcttttgtcattgccatgagtggcttttgtatcctgtttttcacctggttagccttatcctcttgtacttcattttggagtcttatcaccagggccacacctggaacttgttgttctagtgttctagagccactctagtttgcctgtctcctttcctctccccacagacacacatgccaggggctactccaggactggagctgacgccttcatttttattatctctgtcctcagtgcccagcccctgccagatgcatgttcaatgtcttaaaaatgactgcaggataaacacaggcaaccatgagagacccggaatcatctcagtccttctgtttcccctaagtctgtcttttgtgggaagctctggtccctagacccctctcagtcaggactccacagtcagtcactctgttccccgaccctcccccagctttccagctcagaaagtgtgcttttcctccctaagggtcagcctccaccagaggccagatcccactgggttggtgagccactggcatgtcacccactcctccaacttcattctctgcctcctgtcttctctctgtagaggtgttcagacattctctgcccgtgattttgctctctcatctcccagcagtccgtcctgcttcctccacaggagtatttgaaaaggttgacagccgagatctgtgtgtgggatccacttcatcagctcttgtgcatgttttctcttctgcctccttcagcttttcattgtacccatggtgcacgcagtttgaaatagcaagtagttctgtgaggcttatgaatgactgcagtccttagctcctatcacattttttattctaagatccctttgtttctgcatattctattaattttctaaaaacatactgattttgtgtacacaatactctttgttatttctctgtggtctgaaaggtggttttgacatttttcccctccctgcttcgtcttgttttctctaagtggtctgttttggctgtcttttatgctggaggttcccctctgatgtctggggatcctaggtggtcttacatttaagagtggagcactcagaaggtcactggtattctgggttcatgagttggggcatggggcactttgactttctgtttgaaactagaccctgtggtggaaagtgatttgtcctgcctgtctggtttgtgggcaccctgatgtcactgccttcaagactttcctctcaggctggtcagcttctccaaaacaaagtttttcaagtaatagcctggtagtcagagttctgcgagcttaagtggggaaagaaggctgggggaggcacctcaccattaattattatgtaatgtttatttaaccctcccccaaccattgtcagtccagtacttctttcatcatggctggtgtctcttggtccagggactctgttcttatcctctgaagagtctaaagctccactttctccaagggagaatgcatgcagtgggtaaagatttatcaggaaatctaattgcctttaaaaatttttaacagtgtaccttcaggtgattttgtcgtagcatctttctggcagagaccctaatgcttcatccataggcctctccgaagattatctacaggaaagcacatcaccagtcatcccaggtgtcttcagtgtagaggtcgggattggtgtggcaagcatcaaaaccaagaaaacagtggccaggtgcagtggctcacgcccataatcccagcacttggggaagccaaggcaggcagatcacttcaggtcaggagttccagaccagcctggccaacatggcgaaacccaatctctactaaaaaatacaaaaattagccaggcgtggtggtgcacatctgtaatcccagctactaaggaggctgaggcaggagccttgcttgaacccaggaggcggaggttgcagtgagctgagctcgcaccactgcactccagcctgggtgacagagcaagactgtctcaaacaaagaaaacagatacatggaattagagttgaagaagaactaactgcttcttggacacatctaatacacctcttttttgcctgccatttcttccatttcttcctaaggtccttttactgccagttcctgagcctttggagaatcttgtggtctgaattggattgcttcattattgccttagaattcagcttttacagatcccctgagttcttaatcatctgttttccactttgaaaatttctttttacacttattttctttgtgagtttatgctttcaaaacaaaaacaaaacccttattgacatttctgtgggctttcaggagggaacaaaaagtaaatgcatggggtcagcctgtggtctctactcagaagatgttacttactcccccgtctgtctggtctccatgtgacctgggctgctaacgttccgcttgcagagaggtgtgcgggagggaccggtgcacgctttcctcaaccctggagcatgttacacttgggttcccatactttctccaagctttgacctttcggcttccagttcactctgtctttattcttctcattccctttcattctcatgtgtcagcgcatctcctccattcctcctcaaaaggttagctttgctctctcccaccttcagcattattttcatctcttctgtgttcacccaacctatgaactggtagaactccttcgtctcagaaagtgcagagtggtgggaaggagtgaagcagcccctgggccactgttgggacccacctttgacagttgtgagacctcggtgaatcatttaataacttggagctgcaaacagtcatctgtaacatgggaggaaaccgactttgtaggctttgagtgaggattcagtgagagacggccaccctgaatatgttaaacacttctgtcaccttcggttttgactcagcatcttatttctgtccccccacctacaggtcaaatctgaattttctacttcctcttaaacatgggagagtcccacaaagactttaaatctaacatggaaatgtatctttgccccttttaactttgctctttttcttttgctaagtttctcatcccagctttctcttccgcctgtctccctttaccatctgtactgcccttgctggggaaggcgggcacgccccttcccaggatggagcatgtcttctcttcctgtcaggtgtgtgagaccaggacagacagcagagaatcttttcattcagagcctcaccctctgtcccgggcaacagcaggtcgagaactctggttcttccttaacactgtttttctaaaaaccagtttgatcaggccacttccttccttaggaacctctcttgatttcttttctcttttttttttttttggtttgagatggagtctccctctgtcactcgtgctggagtgcagtggcacaatcctgctcattgcagccttgacctcctgggcccaagcacttctcccacctcagcctcccaagtagctgggactgcgggcatgtgctcccacgcctggctaattttatttatttatttattttctggttgatgggaggtctcactatgttgcctaggccggtctcaaactcctgggcttatggaatccttgtgccttggcctcccagaatgttgggattacagacatgaaccgccacaccaggccacttgatttcttactaattatagaccagaatcgagagtcactgagacatagaagaacctttattatatgtgtcagccttccttggtatgtactgctgagcccaccacacacacccttccagccattccacattctaacctttctcagatgccttcggccttgtgaaagcccctttccttctacgtgcgttttcctctgcctgaagtgctgtgttcgtttctccgagtctctctccttgtttattcctgcttgttcctttactgctgacttcagatgttcctccttgctaagcttttcgttggttcttggctggagtgggctgttctgtattctcagcaccttgttcacatcccttttgggtcatgctattctgaaattgtatatgtgtctgtttttctttttttctttgtgtatctagctcagttctcttagttgttcagtaaatactcagtgaatgaacataaatgaataccctgtaaattttggtctctaagctttaaaagaagtgtattaacttcagtccgttgatggcgtattgataggtcagccattctgggttgtaggtcttggcatattttataaaatagtagatgatgtgagcttatggttatttgcattaaaggccagtgtttttcttgatacatatgtttaagtgtccattcacctttcagttaccttttaaagtagtcctcggtttataaccaactggaaattataccacttgaattctttttatcaggacatgattctaagtggtactgtgcgaagtgaacaaaccagattttggaaaagtggttcagcagtctgtgtattctaattatagggagcattaggactcaaattctccaggtttttagaaaagatttttgtactttaagggtatattgttaatatctgttgagatgcctcacctgagaacctttctctgctgtggttagggagtgttaatcagaatcacttgtgccgtgccctacgcgagaaggactccttgagttctttgaaaacatgtttggaatagaattatagccctgttttcctgagtggaaccagttgtgattttcctttgaaataatttgaatatataaaagattgacattcttctcacatatataatgttgggaatgtaaggtatattcaaaagtaaacatttgtggccaatttttttggctcagattactatgacatggaatccatggtccatgcagacacaagatcatttattctgaagaagccaaagctgtctgaggaagtagtagtggcaccaaaccaagagtcggggatgaagactgcagattcccttcgggtactttcaggacaccttatgcagacacggtagatggtttctttttcttgtgtagttaatttgtgtgattagatagtaaaggttaaccattcgtttgcagcttccctcctccccgccctaaccgctagcgtagagtgctttcattgattcagtagctagcccatgaatagttagccaaattcagttttcaagaattccagttcatctttcttgttcagaaatccattaacctacaaattacaactcagtgtatgatttaactctattaaagattcttttctttatgcaaattcaggaaatgcaagtttaaaagccagctgaccataatcaggtcagctctaaagagagttggcagatcaggtttgggtgatttttcccttagaaaattgactgtttctataaaagaagaaacatacagataattagcataaatgctgctggcccttgtgttctgagcattgatgctaattttttggtttgtttccatgttgaccctatgaagatcgaatgggtgatggggtcaggcttgaggggagattgtccttagtaagtacaggctggagggtcactggtgatgccactgtgactgttcatggccatcgtgtgttagcagagaacccaccagtgctgcacctggtagccctacctagtctttttttattgaaccaaacgcaaagccaagggagtgatagttctgctgaagagcactttagggggctcagcgttttgtgtttgtttccctaattctatggtattttttatctgtctggcagagatcttgtacaaccagataaacctgcaagtcccaagtttatagtgacgctggatggtgtccccagccccccaggatacatgtcagatcaagaggaggacatgtgctttgaaggaatgaaacccgtaaaccaaactgcagcctcaaacaagggactcagaggtctcctccacccacagcagttgcacttgctgagcaggcagcttgaggacccaaatggtagcttttctaacggtgtgttgagagctcagattttcagggtgctgtcattgtgaagggaatctttgacttgtttctctaccttgaatgaatattggttaaaggccttgcttttatttatattcagtaatggccttttttcttctttcagacaaacccaccaagtacatttcagactctttttcctgtgtctttttcataggtgggctgttactccagtttgaaaacggagttcagccatggaacctgagagacctcttccgcttatgctggctaaaggatgaaccaccattcttgttgccttctttacctttgtattttcttcagaaactgtactgccactttgcccttttatcagcaatagtctcttgcaattaacttgagagaaaaatttagatttgatgctatttctacctcagtgaaatttctttgaaaggagtttctcacctaatctatcaagatcttggaactgtttaaattaatgttgaagagtaatatttagcagaactcagatgaactcatttcagatagcaccatagtttttggcaggtgacagtttcttatcaccgtttctttcactgggtatcagtggtagctgcaacgccactgatcatttccattcatgatagagaatggtaattatgttccttatatcttctaaaatatttagaagcacctcttcattggcaggagggataattactcaatcttaaaagcgtacagattcaaaggaaaaacagtaatggattttgaaacatttccttgagtaatcctcttcttggaagagatatgaaaatgtattgaatacctttctcgatcattaaaaatagaatagacttcagagggaaatcatatgttagtggagcaataacacttagctttattttaattggttgcgtttcctactgtgaatcaatgacgtagtgtcgtggttttgattagtggagggagttgaaaatctgaccctatcaacaggaagaaaaacttaaaaaatagtaaaagctgcagtaggcagtcccgatttattgactctgtatgttttgtctaaagagaagactccagtgttttcactactcttgattttcaatttggtaccttaattttttggtctattaggatctggtttcatttaaatgtaggtgtccatatgaggctttatggggtatacatgtagcagcagtgacaccataaataatatgttagtaaaaattcttgccagtgctgtggccattgtgctgacagccatgatgagtggtgagcctcctttcccattgctttgactggggactcagtgtttccctgctgctcaaggatgaagctttgtaagattagcataggggtgtggctggagagactcctgcagaacagttctcaggagtctctagtctctgcaccacttcccctgtgagcagggagtttgaaactgcaattgcttctggttggttttatgttgggttgtttcaaggatgctaccaacaacaacatctgttttaacctgctgtcttttcactcactgtcatatggcagcacagattttatagcttgctttctttgttttttttttttttgagatagagtctctctgtcccccaggctggagtgcaatggagccatctcagctcactgcaacttctgccttccaggttgaaagccattcttctgcctcagtctcccaagtagctgggattacaggcatgcaccatcacacctggctaattttgtagtttaagtagagacggggttttaccatgttggtcaggctaatctccaactcctgacctcaagtgatccaccaacctcggcctcccaaagttctgggattacaggtgtgagccaccgtgcctggcctatagctttcaataaaaggtgaatttgcctcttaaaatttgaacagaaagttttaatagtttacaaagtcggtgtcagccagtgaagactaggggcatgaccttcgtatgacttaatgtttttaaaagaaagataaagtttctttgtaaggtattattgtaataatcacatttctttgtaaagtattatattgttcctgagtatctagctactttgctttccagctaggcttctcttgggtattctcttaatcttttatttgtactgggttcttgtgtatatattatagtctgctgtgtgtaatttattataggaaaagggtaagacacatttactttgcggggatgacacaaaaaacctgtaaaaattagagaaacttccagtcatctcacattttctttggaaccgattattcttgtatcttagaactaaaatgacttatactgttttgtttttagaaagggtatccctcctgttgcccaggctggagtgcattggcacagtcatggctcactgcagcctccacctcccaggctcaagtgattctcccacctcagcctcctgagtagttggttactacaggtgcacaccaccatgcctggctaattttttgtattttttgtagagatggggtttcaccatgttgcccaggctggtctgaaactcctgagctcaagtgatctgcccgcctcggcctcccaaagtgctggggttacaggcatgagccaccacatcctatttaaagcttaaataggacttttactatttttaaagtagcatagaaaactgtttgtatcaggcatagtcataattgctctttgatgctgctcctatctgggctgcatgactacatttgtgtgccttgttctcctgtagtgaggacagaatgtgggtcactggaacagtaagtactcatagaactagctgctgctgctattacgactggttgcctgttttgcattttttccgtttaatcatcagactctaaggaagacattattttctctttgtatagatgaggaaacagaattccaaaaagttagctaacatttgcacagagtgtctggctgagcaactaagtggcagagtcagattttaactgacctctggcaagaggactagaggaatacagttgaagtgatacttgctttcatgaacatgaatgtgaaccataatacataatacccatgatgctattttgtggggagtttaaggtgtctcagtccagaaattagcagctgattattgcctgtagctgtaattttacttattcagtgttatttaataaattgccagcattacaatttcgatgaaggcagatttttggcttactgaaacaggataaaaatctggcaacaggggtcccactttgccctgtcatagtaatcgaagctgtgattggatgtggcacagggagtggagtggatgggtgtgcacttgctttccaggctgctgctccccgtctgtcccttattgcatttatcatcttcagcccagtcagtcttgctgttaggggaactgcccagtctctgtaagtgatggcatttgtgaccccattgtaggtaaaaatgttttcccctttttagacattgctggctgagcgcggtggctcatgcctataatcccagcactttgggaggccgaggtgggtggatcgcttaagtcctggagttcaagaccagcctgggcaacgtggggaaaccctgtagccaggcgtggtggcacgtgctacttggtaggggctgaggtgggagtatcacttgagcctgggaggcagaggttgcagtgagccgagattacaccactggcacaccactgtactccatcctgggtgacagagcaggaccctgtcgtaaaaaaaaaaaaaaaaaaaaaaagtaaaagacattgctgagtttcgcacctggacttacagctcagcaggtgggaatccttttgtatttgggccactcatcatcttgctggcgtgtgaggattcacatctccttatcaccttacctgttttcagtttttatttaattttattagttccccacttgacgtccttctctatttttaattcagctatgaattagtattgagaattagaatttttggtgaaaaatttggccgtagttgcagagtcactgtcctctttccttttcacagtgagaactgttgtcttcttcctggcaaccttttataggattctatggccagtgttaatcccataatttgagctcacttattttatatgactgtacatttaacagaagattctaagacaggtttgagggaaatatgttaaaggtgctgtgtactgaattgatcataatgaatgaaatacttttatttcctttccctttgtagctgagatgagtgaactgagtgtggcacagaaaccagaaaaacttttggagcgctgcaagtactggcctgcttgtaaaaatggggatgagtgtgcctaccatcaccccatctcaccctgcaagtgagtaccatccccccatctcaccctgcaagtgagtaccatccccccatctcaccctgcaagtaccatcccccatctcacctggcaagtaccatcccatctcacccagcaagtaccatcccccacatctcaaccctcaagtgagtaccatcccatctcaccctgcaagtaccatcccatttcaccctgcaagtaccatcccccatctcaccctgcaagtaccatctccccatctcaccctgtaactaccatcccatctcaccctgcaagtgagtaccatccctgcatttcaccctgcaagtaccatctcatctcaccctgcaagtaccaccccctcatctcaccctgcaagtatcatcccccatctagccctgtaagtgcgagtaccatcccccatcttaccctgcaagtaccatcacccacttcaccctgcaagtaccatcccccacctcagcctgcaagtaccatcccccacctcagcctgcaagtaccatcccctatctcaccctgcaagtaccatccccatctcaccctgcaagtatcatcccccacctcaccctgcaagtaccatcccccatctcaccctgcaattgagtaccatcccccatctcaccctgcaagtaccatcccccatctcaccctgcaagtgagtaccatcccccatctcaccttgcaagtaccatcccccatctcaccctgcaagtaccatcccccatctcaccctgcaagtatcatctcaccctgcaagtgagtaccatccccccatctcatcctgcaagtaccatcccccatctcaccctgcaagtaccatcccccatctcaccctgcaagtaccatcccccatcttaccctgcaagtgaataccatccccatctcaccctgcaagtgaataccatccccatctcaccctgcaagtgaataccatcccccatctcaccctgcaagtgaataccatccccatctcatcctgcaagtgaataccatccccatctcaccctgcaagtcatagccagctgattttggctttcagtttagtgtctgtatcttacaccttattttgtttttgtttttctgtggacaagtttttagttttataactaaatggagtgacaattaccatggccctctccagagtagcgtatttcttgttcatgtatgtttgttgagaggcaagggtgggggggctttgtttgtgcctcggacctgtgagatactgaaatacctggggttccttaagaattctgtacgtttaagcagatgggtatatggtaactgccccagtttgtatgcattttggccacacgcagtatacacagattttgaggagttgagggaaaagttagttatgggtaatgaaaacattttggacttgggttaaatttttccttacaagctggctggctcaatgtaatgagctttatgagatggctttttggggcttcttttttttgccgggggtaggtcctatggatggaatcttcatttttaattcttttaaggaaatgatgtgggaataatacagctgtacatataaggagagtatgggatgagtctttttgtatcacaaagccttgcatagaggatgtgtttattgtattaatgagttcactgcataaaatatataccttttttattaagtggtgtgatttttatcacaaaagcttgtctttcttggtggcttggcttgagttaaaagcctgtgtttgtgttatcccaagctttggaataaatgattgtgtcctattttgatatatggtcttattttaaaatattctttttgttgctgttttttttgcatttctcaaaacaagtagtgatggggagtgtaaagagcccttatacacagaactaataatgcattgagaagattgaatatgaaatatgctttttttttgttttgtagagccttccccaattgtaaatttgctgaaaaatgtttgtttgttcacccaaattgtaaatatgatgcaaagtgtactaaaccagattgtcccttcactcatgtgagtagaagaattccagtactgtctccaaaaccaggtgagtgagtgactgtgctactacatttgggtaaaaaatataaaatggcattttgtgactgtaaatggaattgaacaaacaaaagatggtttcagaaataattttggcaggatcagttaatccaaccagtctttaaagagcaagtgtgcctatctgtagtattccgaagtattttgactagtgaatatataaaccttaccattctaatttaaaaatggttttcactttcaaaaaaaacatcagtagactgcattaaaaatgggttttccaaacagattggagatcagtcctggtttttattttgttagcagttgcaccaccagcaccaccttccagtagtcagctctgccgttacttccctgcttgtaagaagatggaatgtcccttctatcatccaaaagtaagaacttctattttctcaaatcaatttagtgacaacatctcaatttcctcatttaacttcttttttgtcagagttactacattggtgcaaaagtaattgcgatttttgccagtaaaactattaagttgttcctcgtcactgaacctccatctggccccttaggccaagtggtctgaaactgttcaatgttagtatcccaagcactcagtggggggaagcatatctttgctagtcacattttccattattccctgcatttaagtatatggatgggttttagcgggggctggggggcagtttgaacctaatgtcagaactgagatgaagaaatccagtaggtactgcttaaaaccatccaaacttgtactgatgatggttgatgaatctccagatgtttagttggtcaaaatgaattatctccttcttgccccggtagcttgaggaccatatgaaggccttcacttgcccccatctgtaactgggcgtagatgagggtactcagtgaagagtgtaagggataattagaagtttttgtggtatgctaaactaccttttgaaattgtacttgctgtgattctttgactagaattttgtgtctcaaggttaagtccatttttcaaggcttcactagtattaaaatggtccttatagatggaatctcttactctgttaatggttagggtgggctggttattgtctcctaagttgtatgttggccaggtgaggtgggtcaggcctgctatcctagtactttgggaggtagaggcagaagtggaaggatcgtttgagcccgggagtttgaaaccagcctaggcaacatttaagagaccccatctcttaaaaaaaaaaaaaacaggcttggtagcacacgcctgtagtcccagctactcgggagactgaggcaagaggtcatgccacttcactccagcctgggtgacagagtgagaccctgtctcaaataataaaataatgtgtttacttatattagccttgtggatattgttgaagctctgttatctctattcagcattgtaggtttaacactcaatgtacaagaccggactgcacattctaccatcccaccattaatgtcccaccacgacatgccttgaaatggattcgacctcaaaccaggtaaacattcaaattcgtttttctcatgtcagttcaaattcttttttctaatttgcagtttctaaatttataagcacacaaaattggaaactagactgttactttgaatttttttctttgctgtttaattatagaaggctcctttggcaaaataatttactacatgggctaaattttacattatccagtggttacttttttaacctagattatcttgctctgttgcccaggttggagtgcagtcacactatcatagctcactgcagcctcaaacccctgggttcaatccatcctcccacctgtagctgagactacaagcgtgtgcctctatacctggctaattttttttattttaagtagagatggggtcttgaactcctgagctgaagcgatatccttccaccgtggccttccaaagtaccaggattacaggcatgagccaccacacccagccagattttaacttctcattatatactacgcaaacatatactaaggccagcaggagtatatatatgtgtactgtacttgaatttcacatccattttcttcgacattagcaactgggagatactgaaaggaagtttcaaaatattttagtgtggccagaaaatttaattacatatggtattatcttttatctacctgacataattgaattatttttaaaaatctgccatttatattgtaatcttatgaccaaatatttattgcttaaaactagtcaactttttaaactgagatatatggtatatatggatacaaagcagataattaaaacaatttttggttctgttcattcagcgaatagcacccagtcctgcctggcagaagatcatgcagtttggaagttttcatgtactgatgaaagatactctacagaacttgtcaaatctttgaaacttggaatatattgctttcataatatgaagttttattgccta

SEQ ID NO: 15054 - DNA, 1762 bp, Homo sapiens
gagctatacagatggtacttagaggatgtagggccctacgtattagggcttcttagttgtagcgaagagcaattggtctggtacgtttagctttttcacatttagttttgaattctgactctagaaatgtacaaccccatcttttgaattacaggttttaagatgttatttgctcttaatacgtcttaaggtaacagccttgatcactgcttttactttcgatgaaataacttaatgagctgtgaagaaaaaattatcagattttaagggagagaattttatgaaaatgtctttgaggttcctgtcacctttatgagaatgtcttcaaagtttccatcaccacctctaccaatttttcttccaccggagccagtggacttaggttccataacaagctcctcttgttcactgaatgagctagacaatatttcccaccttttaaggaaaatatcagctgatatcaatgaaattaaaggaatgaaagcagctattttgacagtggaagcaaatctttttgatctaaatgttagagtgtccaagaatgaagcaaaaatttcatctttggaggttaaaatgaatgaatattcaacaacatatgaatgcaacagacagtttgaagatcaagaagaagatactgaatcacagtcaagaactactgatgtaaaaataatcggcttccttagaaacgttgagaaaggaactcaacagaggcaattattatcccgactgcaaatcgacccagtaatggcagaaactctgcagatgagtcaagattactatgacatggaatccatggtccatgcagacacaagatcatttattctgaagaagccaaagctgtctgaggaagtagtagtggcaccaaaccaagagtcggggatgaagactgcagattcccttcgggtactttcaggacaccttatgcagacacgagatcttgtacaaccagataaacctgcaagtcccaagtttatagtgacgctggatggtgtccccagccccccaggatacatgtcagatcaagaggaggacatgtgctttgaaggaatgaaacccgtaaaccaaactgcagcctcaaacaagggactcagaggtctcctccacccacagcagttgcacttgctgagcaggcagcttgaggacccaaatggtagcttttctaacgctgagatgagtgaactgagtgtggcacagaaaccagaaaaacttttggagcgctgcaagtactggcctgcttgtaaaaatggggatgagtgtgcctaccatcaccccatctcaccctgcaaagccttccccaattgtaaatttgctgaaaaatgtttgtttgttcacccaaattgtaaatatgatgcaaagtgtactaaaccagattgtcccttcactcatgtgagtagaagaattccagtactgtctccaaaaccagcagttgcaccaccagcaccaccttccagtagtcagctctgccgttacttccctgcttgtaagaagatggaatgtcccttctatcatccaaaacattgtaggtttaacactcaatgtacaagaccggactgcacattctaccatcccaccattaatgtcccaccacgacatgccttgaaatggattcgacctcaaaccagcgaatagcacccagtcctgcctggcagaagatcatgcagtttggaagttttcatgtactgatgaaagatactctacagaacttgtcaaatctttgaaacttggaatatattgctttcataatatgaagttttattgccta

SEQ ID NO: 15055 - DNA, 2092 bp, Homo sapiens
cttctgataccaacatctttgatagtaacgtgccttcaaacaagagcaatttcagtcggggagatgagaggaggcatgaagctgcagtgccaccacttgccattcctagcgcgagacctgaaaaaagagattccagagtttctacaagttcgcaggagtcaaaaaccacaaatgtcagacagacttacgatgatggagctgcaacccgactaatgtcaacagtgaaacctttgagggagccagcaccctctgaagatgtgattgatattaagccagaaccagatgatctcattgacgaagacctcaactttgtgcaggagaatcccttatctcagaaaaaacctacagtgacacttacatatggttcttctcgcccttctattgaaatttatcgaccacctgcaagtagaaatgcagatagtggtgttcatttaaacaggttgcaatttcaacagcagcagaatagtattcatgctgccaagcagcttgatatgcagagtagttgggtatatgaaacaggacgtttgtgtgaaccagaggtgcttaacagcttagaagaaacgtatagtccgttctttagaaacaactcggagaaaatgagtatggaggatgaaaactttcggaagagaaagttgcctgtggtaagttcagttgttaaagtaaaaaaattcaatcatgatggagaagaggaggaagaagatgatgattacgggtctcgaacaggaagcatctccagcagtgtgtctgtgcctgcaaagcctgaaaggagaccttctcttccaccttctaaacaagctaacaagaatctgattttgaaggctatatctgaagctcaagaatccgtaacaaaaacaactaactactctacagttccacagaaacagacacttccagttgctcccagaactcgaacttctcaagaagaattgctagcagaagtggtccagggacaaagtaggacccccagaataagtccccccattaaagaagaggaaacaaaaggagattctgtagaaaaaaatcaaggaactcaacagaggcaattattatcccgactgcaaatcgacccagtaatggcagaaactctgcagatgagtcaagattactatgacatggaatccatggtccatgcagacacaagatcatttattctgaagaagccaaagctgtctgaggaagtagtagtggcaccaaaccaagagtcggggatgaagactgcagattcccttcgggtactttcaggacaccttatgcagacacgagatcttgtacaaccagataaacctgcaagtcccaagtttatagtgacgctggatggtgtccccagccccccaggatacatgtcagatcaagaggaggacatgtgctttgaaggaatgaaacccgtaaaccaaactgcagcctcaaacaagggactcagaggtctcctccacccacagcagttgcacttgctgagcaggcagcttgaggacccaaatggtagcttttctaacgctgagatgagtgaactgagtgtggcacagaaaccagaaaaacttttggagcgctgcaagtactggcctgcttgtaaaaatggggatgagtgtgcctaccatcaccccatctcaccctgcaaagccttccccaattgtaaatttgctgaaaaatgtttgtttgttcacccaaattgtaaatatgatgcaaagtgtactaaaccagattgtcccttcactcatgtgagtagaagaattccagtactgtctccaaaaccagttgcaccaccagcaccaccttccagtagtcagctctgccgttacttccctgcttgtaagaagatggaatgtcccttctatcatccaaaacattgtaggtttaacactcaatgtacaagaccggactgcacattctaccatcccaccattaatgtcccaccacgacatgccttgaaatggattcgacctcaaaccagcgaatagcacccagtcctgcctggcagaagatcatgcagtttggaagttttcatgtactgatgaaagatactctacagaacttgtcaaatctttgaaacttggaatatattgctttcataatatgaagttttattgcctatcta

SEQ ID NO: 15056 - DNA, 27221 bp, Homo sapiens
gattacgggtctcgaacaggaagcatctccagcagtgtgtctgtgcctgcaaagcctgaaaggaggtaccttgaacatggctgtaaattaatctttaactgccttggtggagtcttcctgatttattgaagagaataatcacgaaaataatttttgtttgttttttgagacggagtctcgctctgtcaaccaggctggagtgcagtgccacgatctcggctcactgcaacctctgcctcccaggttcaagtgattctcctgattgagcctcctgaatagctgggattataggtgtgcactaccatgaccagctaatttttgtatttttagtagagatggtgtttcaccatgttggaccaggctggtctcgaactcctgacctcaggtgatctgccctcctcagcttcccaaagtgttgggattacaggcatgagccaccgcacctgacataaatatttaatgtaataccgtgtaagacttttccattgggttttgagaaacacgttaatgagagaaattgcttaacattggagaggattgcagagaatattgactaatatggtggggtgaggaggaacaacatcaattaagattcagatttattatttaaaaaaactaaaaggggcctaggcatggtggctcatgcctgtacctagcactttgggaggctgaggcaggaggattgcttgagaccaggagttcgagaccagcctgggcgatgtaatgagtctttgtctcttaaaaaaaattaaaataaattagttggtcattgtggcaggcacctgtagtcctggactggagaggtggatgtggaagcattgcttgagcctagaagtttaaggctgcagtgacatcacactccatcctgggtgagagagtaagagtctgtctaaaaaaaaaaataaggttccagtgtagttggcattttctaaaaactgcagctagtctgtttaaaacctagagaaggttgtggtaaaggcataatagatggctggcctgtgaggaactgaaatttaaagtttaataaaaatacctttcttaactcttttagaccttctcttccaccttctaaacaagctaacaagaatctgattttgaaggctatatctgaagctcaagaatccgtaacaaaaacaactaactactctacaggtaatttaaatgtattatgtttacacttggtaagacatttctgtaattcttgagtaaggtgaaaatgattgctccttaaattgtaaaataaaggtgcctgtcagatgtcaagaccaagatgaggttcccatatagaaaaatggctttaaaaggaaattgacaagtttgagaaacttcgccaactgttattggactgtagtttttcaagcaccatataatgccttttatatctttccaatgtgtgtaaaatatatagtacgtaaatattttgaagagaattttgatgaagtaggactttcatattagtagcattagattcaacattagatatgaatttacgatgtgtaaaggggagtacaattggacaatgataggtatctgaagttatagaaatttgttaaacagtagtatataaacaaggttggtttcttcccttttggcggaactcattagtagaatataaggcagagaattgactcatttgtgatgttcctgctccaattctagtggaagtactgaataattttatgagagaatataaaagtattacgttttcaaaacaggagatgaatcagctgtaagctggtcttacggaaagctgattctgaaatgcaaacaactgatgggtgtcattttgtgttgtcaaattctgtactctctggccgacctgttgtagccaatgtgtaaacttgtgttaagaagctgatggtaatgagctactctaaaaagatttaagttttgctgtggatttggtgggtgtacttacagcattgccctgcttatccactctctcgcttttttttgtgaccccccttcctaaaatgaggtaaactgtagccatcagtttttttatttgttttctttttttgaggcgaagtcttgctctgttgcccaggctggagtgcagtggtgtgatcttggcttactgcaatctctgcctcctgggtccaagcgattctcctgcctcagcctcccaagtagctgggattacaggcgcccactaccatgccaggctaatttttttgtatttttagtagaggcggggttccaccatgttggccaggctggtctcgtactcctgacctcaggtgatcacctgcctcctcggcctcccaaaatgctgggattacaagcgtgagccaccgcgcctggcaccatcagtttttgatcctgatacttgtctgtcctcttggttctcctcatccctaatttaaccttgaacacaaaattcaacaggttttggcatatagaataaagattatcaggcaaaggcgcactcttgacctaatgatatatctacatttcatttcctgatctatcagcaatattaattgtctagaatgatgagaagtttagagaagttccatgactttgaaattttctttctttacctaggttatctaaattacaatttgaaactcatataagatcatgaagctaagcttaaataaaccgcattttgttgaaaatgaatacatatgtactatattgtattcatggtatgtggttgtatggatattgtttacatatgtttggataaataggttcaggtatctatctcagtaacgtaagaaaaaatgaatggtatctatggattgaactcctcatatatatgttcttttcttttctttttcttttttttttggagacagagtctcactctgttgcccaggctggagtgcacagtggtgcaatctcggctcactgcaacctccgccttccgggtttaagcaattctcctgcctcagcctcctgagtagttgggattacaggtgtgtgccactatgcccggctagtgtttgtatttttagtagaaacgaggttttaccatgttggccaggctggtctcaaactcctgacctcaagtgatccacccaccttgcctcccaaagtgctgagattacaggcatgagccactgcgcccagcctgaactcatatgtcctaaaccaaaggaggcatttatatttaatatgacatagtcactgtggagttttgacgtattactgcatttgtatttctatcttttttgcttttatgtgaaagttccacagaaacagacacttccagttgctcccagaactcgaacttctcaagaagaattgctagcagaagtggtccagggacaaagtaggacccccagaataagtccccccattaaagaagaggaaacaaaaggagattctgtagaaaaaaatcaaggtaataacttaaatgatgtttcactctttactacagttttttcatgaggcattgaatattttccaatggatttttatgaaatattacactatgaaaaaagtgatgattaagcccagaaatagaatgagaagaataccatgaggaaggttcataccaacacttcagaaaaaaattttttttttaaagaggtagggtcttgctgtgttgcccaggcagtcctcaaactcctgggctcaagcagtcctcctgcctcagcatccttagtagctggaggtgtgtacaagtgtgtgccactgcacccagccctttctagaaatttttgaaagtctttttattgtggaaatttttaatattctcaaaaatggaaaggctagtacagtgaactctcatgaacccagtcattaagccttagttattatcagaattttgctggtctttagatagctccttcttaaagatatatttatttctgcattctttctttttctctttttgttgatcctgcccgtttacctgaacttgaaattttagttacctttaaatctcccgtctcttaagcatcctgtctctgacctcccatatgtgtcccagcaaccctaatttatcccctcgtgcctaacatacttcagtttgcttccaggttttttttttttttttttttttttgcttttttctcagctttctcccccaattcctatacaatcttttgactttgaaagtgtgtctctcatcttctgactcctttgtgaaagtatctctcccctcctcctcattacccagaactaacgctattagtttggacttttggtgtctgttatctgacccctgggcctgcacagcccttctccatgactcttcagaccttttgtctcttttgtcgtcaagaaggattcttttttcttctgtttctttttctactaagatttgaattttaagaccccaccaaaaaaatctatatgcttattatgttatttctcacatacttttcaagaaccttggaatatattttttcatttcttcaaaactgtcctttaaattgttccaggtttcatgaaaccttatgatttcagaattgtcaattctgtatttgtttcctcattgtgtctctttaaaaatttttgactgtattgttcagtttgccatgacagcgttatatactattctgataattgataggcctgaggacaagacctgtttggtccccaaacagcagataggtaccaattggaaaatgtgaatgggccaaattgagaagaggagctgaaactgaggagggattttgctcagtgcagtggcagatgaggctgatctaaaaggactgcagtggtctactccctgtggagtctgtagtgtgttgcaccaaggttttcttcaaacacaggactctacgtgagagtcttggagtggaatcagatggagcagggaaacagacaatagagaaaaggaaagaatgtcagataaaaataggagaggaaaacaataggaaatctcaaagcaaggtgccatattttttaacatcacaaaatcaacagaagaaggttgttgattctgaagttagaatagctatccaaagcaaactttcccctaaaatgaacaacagaaaagtatcaaggtcaagtcctgtgccgaattaaaagataaaagggaataaaagacaaaacagcattgtttcaatgaaagcatgctgaaaggtataccaaaaagaaatacaatttcaaagtgagctagaagacattatttaaataatacaagacaaagccaagaaaaacataaaacagaagaactttgaggctgggtgcagtggctcatgcctgtaatcccaacactttgggaggctgaggcaggaggatcacttgagactagcctgggcagcatagcaaaaccctgtctcgacaaaaaataaaaatattagctgggcaaggtatacacctgtagtcctgtctccttgggaggctgaagtgggaggattgctggagcccgggaggctgaggtgggaggattgctggagcccaggaggctgaggttgcagtgagccacgatcataccattgccctccagggaggctgaggtgggaggattgctggagcccaggaggctgaggttgcagtgagccatgatcatgccattgccatctagtttgggcgatagagtgagactgtgtctcaaaataaatgaagactaaattagaaagaactcgaaagaattagtgcgtcttaataaaataaaacatgcgtgtaatcccagcaatttgggaggccaaggcgggaggatcacttgaggccaggagttgaagatcagccagggcaacatagcaaaaccttatggctacagaaaacagcaatttaaaaataaataaaattaaaacatcttcagagaaattgaagataaaagacaagaacattttaaaagtctaaaagggctcatgagaaagtggcaaatattgataataggcaatagaaatacagtgtttttatagtaggaatctccaaagaaacaatattcagaggaacagagcaaacattaactgtctttcaagaaaactttcatgaagtgaaaacatgtttgaaactgttgtctgaaaaattgtacagtatacctgagaatatttacccagaaccataacactaagatgtattatataattaatgaaattttaaaaagaaaaaaaatgatttggacattcaggcaaaaggggcacatgacttagaagaaaaggaaaggtagattatcatcaaacttttcaacagcatcacttttgtgctggaagaaaatggactagcatatttaagatactccagaaaagaaaatgtgagccaagaatttaatgtccagcaaaagtgacctttagaagtgatccagcaccaactgttatctatatgcagaaattcagagactcattcccatgaacttttcttaggaaatctaatggaggatgagcttcagacaagtaaaagcctgttgtcctgaatttacattggaaatgtttcggaactcacagtgtattttatatataaatacatttttttctagttctgtctactagaaggcatagaaacattcatcaacccttagcatcatctgtagttcccagattgtggtcttggaatacttcctatttaaaaaactaggcttcttgggctgggtgcagttgctcacgcctgtaatcccagcactttgggaagccgaggtgggcagatcacctgaggtcaggagttcaaaagcagcctggccagtgtggtgaaaccccatctctactaaaaatacaaaaaaattagctgggtgttgtggtgtgcgcctgtagtcctagctactcgggaggctgagccaggagaatcgcttggatccgggaggcggaggttgcagtgagccaagattgtgccaccgtactccagcctgggcaacagagtgagattccgtctcaagaaaaaataaaaataaaaaaacaaagaactaggcttcttgagaaatgtctttttccaggtctggggcaggaaatgttaacatgatcctggaatggctcaacatcccagatagcaaagaagctgtcaatgaatggtagaccacgtccaaaggatgcaggcgccaacttagaggtttccattggccaaaaatggaattatttgagattcagtaggtgtaaatatcgcggtgaattaaagcccatttaaatccacaatttcataatgacattttaaaaaaataagctctaactagtcaccttctggaaggtagtagataatcattcattgtcttgaaaactgggtaaataaaataattgaacatttatgctgtcttttctgtgagaacgataccactgggtaaccccataggacaggagttggcatctgttggaaccaaaccgtgcctattcatgtatgtattgtccgtggctactttcatactacagccttagttgaatagttgcaacagaccatatagcttgcatagcctaaaatagcctaaaagatttgccaacctctgatatagtagatgagagaaacattttcttttaaaatgatttcagctgataagagaacaagatggtaggattagagttatgcttttaagagtgaaaaccagttgttttgtgcctcttgatacaaaagaacagaacttttgtcttgccaaaaatgtaaacctaagtcatcaagctcccagtccagcagtcagtttgcaagaagttgcagaggccagaggagtatgttggttgagcttcaccatgagtgtgcagccggaaaaatagtgtttgggacactgtgggttgaatagcctgagaaattgagattaaaaggcaaatcaaaggaaaataaaaggagcaggattaaattgtagtggctagggatacccagtgtgtgtgaaattataaagaacctctaggcgttaatataaaaagcacatagtggttgcttttgaagaggaccgataaagatggagcacacagagaggcttctggggtggcagatgacgttctctcttttgacttggatggtagtcagaagggtgttttgccttacaaaaattcattaagctatatgtttgtgtggttttctatactgtgttttaaaaggggataattgaaatggtgtcaggtacctttgctgatgaggagtttggtattactagatatattcacaagtgtgaagtgatactgcaagcaactgttatctgttaatgtggttactcactgttgtacggtataatctggggcaggtttttaaaatataaacatgcactcgtattggcataagttgttaattttttttcttcttttgtttgagcagatagcattctctcatttctctggtgtctttatttttactagcgcacccacctcataatatgtgtactttttgctttttgtcttgccatcagtctgtcactagaagtttattttgccgatcttttcaaagacttaacaacattattctggctttattgatttttttttttttttggtgtttttgttttctatttcattgacttgtgctttttttttattttttttttttaagaggcgaggtctcactgtcacctaggctagagtacagtggcacaattgtagctcactgcaacctcaaatgcctgggctcaaatgatcctcccacctcagggaccataggcacacgccaccacgcccagctaatgtttaagtttttttgtaaagatggagtctcactatgttgcccaggctggtctggaactcctgagctcaagcagccctcttgcctcagcctcccaaagtgctaggtttacaggtgtgagccactgcacctggcccgacttctcttttaatttatccttccatattttaaaaattatttacctcaggctgtcttcttctcaaatgtaagcatttgagaagaatacatatgacaggttttaattcatcatgttttcattatcagagtgtctttaatttccattataattttcatcattgaaagtgtgttttctatacagtatttggaagtggtatgtgtttttgtcttttaatcctttttattatagacacctgacttaattgcattgtggttagataatgtaatttttacaatgcatagtttttgaaaattgttaacacttgcttagtgcataatcaagtttatgcatcttccacatgcattttggaagaaagtggactaattattggatggggaattttacatttattcagtagataaagctctactgttaacattattcaaatcttgaccttgctgagtttttgtgctgcttgacttaccacttgagaaagggtgttgaaattgcccaacatgatgacagatttatcttaatttctcttgtacttatatcaagtttttgctttatttttaggctgttatatactattaggtgcatacatatttaaatttgttatatcttctctgcaaattgaatcccttatcttgatttatgaccctctgcaaaaaagatgtttttatctcaaagtcagttttgcctgatattaatatagccatttaattatatttgctttatatatctggtttccctgcctttgttttcagttttctctctcatgctttaggtatatacagttgacccttgaaccagacaagtttgaactgtgtgggtccactcatacacttatatgtggatttttgaaaataaatatattggaaatattttttgagatgtggcaatttgaaaaaacttgtagataaactatatagcctagaaatagtgacaaaattaagaaaaatttaggtatgtcatgaacacataaaatatatgtagctactagactaacatttactatcttaaaacatacacatctattatgaagtttaatttatcaaaatatatgcacacaaacacagactttacatgataccgcttgtagttgagagaaatgtaagcaaacataaagatgcagtaatagctacataagatttactatagtacatactgtactactgtaataattttgtagttacctcctgttgctttatggtaagctaaggtgttttgagtgtccacttaaaatgctgtgtgatgcaaccatctctgcgacagttcagctctccagtaaattgtgaattgcagtgaaaggtgatctcgcagttcttgcatatttttcatcatgtttagtgcaatactgtaaaccttgaataacaccaggggacccataatgtgctactggtgatgctggacatgctcccaagaagtagagaaaagtcatgacattacaagaaaccattgctcagtatgtaccaaagatacatgttacaactgtggctgcagttattcaccatttctggataaatgaatttaacataagaaccatggttaaaaaaaaaagaaaaagaaaaaaatgtatgaagctgccactgcagctacgttggcaacagtaagtagttaaatgtttgggaagtcaaaagttgtatgtgggttttcaactgttgttgggggattggttcccttagccctcatattgtttaagggtcaactatatattatatcttaaatattataaagctggattttgttttttaatctcatctgagtttgccttttattggagagtttagaccagtcacatttattacaattactggtatagttggattactttctgtcatcattgctgatttgcatttgcctgcttttctgttttttctcatgttttttaaggttcattaattactgttattgttgacaaccctaaccctggttctacaattttaaactagtttactgtttaaaccttccctttctgttctttttttttttttttgagacggagtctcactttgttgccaggctggagtgtagtagcgcgatctcggctcaccgcaacctccgactccttggttcaagtgattctcctgcctcagcctcccaagtagctgggattatagacgcccaccactacgcccagctaatttttgtatttttaatagagacgaggtttcaccatattggccaggatggtctcaatctcttgatctctgatcccctgaccttgttatctgcccgcttcagcctcccaaagtgttgggattataggtgtgagccaccatgcttggcctcatttctgttcttttagtcgttaccagtgaaattttaccacacaaatttaatttagtattctaaaagttaatatcctgaccccactctcaaacagtaaaaggacttttgaatacctatgaagagcttcagtctttatcctcctcatttacttgtttccagtgtttcaatttgatcttttttaaaatgcacaagttgggccgggtgcggtggctcatgcctgtaatcccagcactttgggaggctgaggcgggtggatcacctgaggtcaggagttcgagaccagcctgaccatatggtgaaaccctgtctctactaaaaatagaaaaattagccaggcatggtggcacacacctgtagtcccagctactcaggaggctgaggcagaagaatcgcttgaacccaggaggcagaggttgcagtgggctgagattgcgccgctgcactccagcctgagcgacaaagcgacactccttatcaaaaaaaataagtaaaataaaatacacaagttggacaacatttttgtaattttttccaggcaatgttttttgaggtttacctcctgtttatcattttacttattcttaacatctctgagtgttatttggggatcattattttccaatattttgaagtatttttgaagtatttttttggaagtttcactgaaacatgtctgttggcaatatattttccaagagtctattcacctgtgagtgttttctttctttgtgttcttgtgcagtagttttgctggatacccaaatctaggttgttagttatttgctctccacaccttatatatattattatcccactgtcttctgctttccattgttgagtggacttctatcattctaattgtctgtcgttcctttgtaggtgatctgtcctttctctctggctgctttcaagatcttctctttgtgtttgatgttctgcagtttcactacgatgtgtctaggcgtggatttccttttatttttcctgtttggtataatgtatggaagcatcccatatatttgaaataaaatgcattatgaaatacatgctcaccatagaaaatctggaaaaagaaagcatatcaatgtaatatctcctgatagatgagaaaataatcaaatagtataaaaaagattaaaaataaaaagcaacattccttacttcattcttctctatactagtcccactccgcagaatcccccacttttaaatgcttctgtttctttctccgtgttgtaataatatgctttatactgtttcttcattgaccaactagatagtacctgttgatttcttgctgtatgtcaggttctagcccatttatacttttcccttgcttccaagctcatacagcaaaatcaatttttaattcatttattggttactttagtaattttaagtagtaacttaaatatttcttgtctggttatatttcagtatattttgacttctgaaagatatgtatccttcaattcctttttttttttggaggtagagtctcacttttgtcacccaggctggagtgcagtggcgtaatcctggctcactgcaacctctgcctcctgggtttaagtgattctcctgcctcagcctccttagtagcttgggactacaggcacaccctgccacacctggaatttttaataaaatttttagtagagacagggtctcaccatcatgcccaggctggtctcaaactcctgagctcaggcagtctgcccaccttgtcctcccaaagtgctgggattacaggcataagccaccatgccaggcctctctttcaagtcttatattttctttcttgccgccacctacattctgtcctgcctccaccttctaaattgtcacctgttcttttatattgtcaaagctgatcaaatttacattttgttccctactttagttaagacttagtcgattgactctaagttgagaaacagtaagcatttacactgttaagactatttagtctgggcatggttggtggctcacacctgtaatcccagcactttaggaggctgaggtgggagatttgcttgagcctaggaatttgaggccagcgtgggcaacatagcgagaccctcatctatatatatattttaatgttttttaattagctgggtgtgatgatgtgcacctatagtcatggctactctggagaattgcttgagcccaggagttcgaggttacagtgagctgtgattgtgccagcctgggtgacagaccaagaccctgtctctaaaaataaaaaaaaaattttaaagactatataaatattacaaggccaaatttacattctgtttcttgtacagttttgtgtgggaactctctagagtttttttaatttttcccccttttttgtttcccttaggttcttcttttttcccttctttcattgcctacctgtactgtagcctaaaagtcttatcactctgtgctttgaaatctttgggtttcccactttttcttaggtaccttcctcctggagcctctctcctccttttctgacctcactgcttgctctaggcctgctcaaggccatcatcccgaggcgccctcctcccctgagtcggctctgcaattcctgaattccattttgtcttctcagtgcatttctccgttttgtaatcacgtcacaaagaaactccttaagaaagtatagaaggtaaattttctgagttcttggaaatctgaagctatccttgtacttgtttgatactttgactaggtacagaattataggttgaagtcattttcttcagaactttgaaggcatagtttcattatcttgaggcttcagtgttgatgctgagaacttggttgcccatcttattccattgtgtaatacctgggatttttttctccgggaacttttttttttctatgttcctggtgtctgaaatttcactgtggtatgtctagatgctagttaggtacattaggtacccttttaatttgaaaattcattctcttccgtgtgggaaatactcttgcattatttgttttaaaatttgctgtccttgttttcattgttctctggtggaaattctgttagttggatgataagcccttactttaatctgtcagttgtatattttttctctcttgatttttgacttgatcttgttggtctactcttgaatacttgcttgacttgatctttagtctccttactgaacattttaaaaatgtaggcaagcatattttttaatttccacaaactttttcttgttctatttttcatagtatcttactttgtggatacagaatcatctcaactgtctgaagatcctaattaaagggattttttttttcttttcaaggaattcactcttgtcttctaattaatggagtcagagtcagattttatgctttttttcttgctctttcgattatggaatttttttcaaaaacatctgcagatagtggttcctagtttaaggaaaggtagtgcagaggcttacctagaattgtgctgtgggctgagcttttctgcaggcaggtttagctttcaatgaagcagacaaggagctgcaattggccttgcagttgtagaggaatttcttgggggagcaggttggtatgcttacactcctactggttgtctattaaaaatattaaaattttgtcttttaaatgtctgtctctggcagtaccattcacaagccttcttctctgccttacatccttcttggtttttactcattgctgcaatctctcacagttggatggccctttgtttcatccaaattcaaggcttgatatatcatctctgcactgtgactctcacatttttatatctccagcctggaccttgccctgaattcctcatttctgtccaaccactttatatttcttcttggaggtgtaataaatcatttcaaacttgtccaaagctcaactatgaattttcctctcctgtctgttcttcctgtagtcttcctcattttagtttattggtgacttcacctttccagtttctgagacagaatcctgttgccattctttttttctctccttctcctttccttcctcttccctctctacctctgtctccctccttcccttgttccacctgtcagcctctacctccagatttatagaattcactaccgtttatcacttctgcctctaccacccatcaaagtcactgtctggccgggtgcggtggctcatgcctgtaatcccagcactttgggaggccgaggcgggtggatcatatgaggctaggagttcgagacctgcctggccggcatagtgaaaccccgtctctactaaaaatacaaatattagctgggcatgatggcacatgcctgtagtcccagctactcaggaggctgaggtacgagaattggttgaacctgggaggcggaggttacggtgagccgagatcatgccactgcactctagccttggtgacacagtgacactctgtctccaaaaaaaaaaaggcaaaaaaaagtcaccgtctgtgatttgccttggttacttgattattggaatagtgtgttcttacaaggtgtgcctgctttcaaacttgccttccttcagtccatcccacacagcagcagcagtgatcctttacactgtaaattagatcatgctactttgcagcttagaaccccccaggggctccctgtcacactgtaagtcacagtgttctgccttctcatcacccacctgcctccctctgctctggctccccgtgcttgctgctgctcctgcacactggcctgcttgtccttcaggacgttggaagagctgcgcgtctcagatgcttttgccctctcctgagaatgtttactttggatgttctcatatctcatccatgtgtcatctttgaggccttctctggccccatccccacactccctcttttctgaagctttatttttccccataacgtttgtcaccatcaaatacatattttatgtttttgtagtttaggtatttttatccgaacgtaggtctttatgttttaacgtgaattgttttcttttagcatgtatttttttgggggtcttgagagctacctccttccccgtctcaacagagtctgtcctttttgagcagggatttatgtgtttgttctgtatggctgttactgagtgcccagagcagtgtctggcatatagtagcaggagctcagtcagtgtttgttgtctgagtaaatgtcactcctgccttgcatctaacctgcagttttcacaggggctcatttgtggttttgcctgctgtgccttacagccagtatttgtccatatattttctattacccagagattgttgacatctcatctgctgcaccttgtaacccccatctctaaaccagtgatctccatcatatttttgacctgaaaatttttgtacagtagccatttttaagtatgtataccaatatatgtattttacttacgtacacatgctgtattgatatgaatattagaaaacataagaatagaaatctgccgggcttggtggctcacgcctgtaatcccagcaatttgagaggctgagacgggcagatcattaggtcaggagttcgagaccagcctggccaacatggtgaaccgccgtctctactaaaaatacaaaaattagccgggtgtggtgatgggtgcctgtaatcccagctacttgggaagctgaggcaggagaattgcttgaacctgggaggcggaggttgcagtgagccaagattgcgccactccactgtagcctgagcgacagggtgagactccatctcggaaaataaaataaaaaaagaacagaaacccaaagatcatagggtagagatgtagatattaagttctttaattcacttttatggactcttcagaaggagagattataattgtatatgcttgatacattgtgttggactggaagcactgtgaaagattcttagtcaaggggagattttacattcaaagaaaatggaaaatccccctgctttgctcggagggaagaactgcacttaaaagtttgatgtgtattggtgtcgtcttctaggcatttcttatatctgtgaacatgtgcaccctttgtatataaagtggaattacatgtttacttacgcacacacacacatgtacatataaagcaggaattatactacccagagttctctgtgacatttttgttccacttaatgtatcatgggagagtccttgagtgtggacctaggagccagactaccgaaggtgcagaccctgcagtttactagttgatttaacctttctgtaccctagtttcctaatctataaatgaagaataacggtagcatttacttcagagttcttggtaggagtaaatgttaaaatacataagctttctctgctgatgaatatttacactggagtcttaggaagggtccttgcttattttctattctaaagttgggctggacatagtgggccatatgggtgccatcagatgggctcttgtttctctgtgacccgttctgttagacctctttcctgcttttttccttgaggttgtttatctgtcctctagtgaaccagctggtttgcaggtggtgcttttctgagagtgtcttgctgttaacagttactatggatgtcatatgccagctggttctgttaaaaaaaagtctgtgaatccaaagccttgaattttgaacattattttctgtctggaattttgaagaactgattcataaagtggagaaatgaataaagatttttattttacaaattccagcacttagcattttctttattctgttactgtgacatctatttgggaaaccaaagactaccattctttataaggattcctttttttttttttttttttttttttttgagacagattctcactctgtcacccaggctgcagtgcagtggcgcagtctcactcaccgcagcctctgccttcccaggttcaggtgattctcatgcctcagcctcccgagtagctggaattacaggcatatgccaccacgcctggctaatttttgtatttttagtggagacagggttttgccatgttggccaggctggtcttgaactcctgacctcaagtgatccacctgccttggcctcccaaagtgctggaatgacaggtgtgggcctctgtgccaggccaggattcttcttttaagagactatagtgagcagcatctaccaacttgcatccttgtatgttgcatatcttatttgtttgcttggggagtaaaccaaagtaaaaacgtcctttgtcaaattaaggaccttacaagattttctgtgttaatggattggaagtctttactattctttttttttttttttgagatggagtctccctctgtcgcctaggctggagtgcagtggcacgatctctgcttattcagtctctgcctcccgggttcaagcgattctcctgcctcagcctcctgagtagctgggataacaggcgtgcgccaccacacctggctgatttttgtatttttagcagagacgggatttcgccacattggtcaggctggtctcgaactcctgacctcataatccacccaccttggcctcccaaaatgctgggattacaggcatgagtcaccacgcccagcctagatgtctttactattcttaagatggcagtagtccccaagttgatctatggattcaactcaatccctgtttaaaccccaaattgcttttttttgtagaaatcggcaggctgatcctaaaattcatatggaaataaaaagggactgagaatagccaaaactattgaaaaagagtaacgttggcaaggttatgttgcttgatttcaaaacttactacaaagctagagtaatgaagactgtgtggtactggcataaggatgaccatacagacccgtggaccggaattgagaatccagaaataaatgcatactttcacaacccatcaatttttggcagcggtgttaagacagtttattggcaaaagaataggtttttccacaggtgatgctgggacaactgaatatccacatgaaaagaatgaagttggaaccttatcttatgtcataaacaaaaataactcaaaatggatcaaaaacctaaacttcaaaactcttagggaaaaaaatagatatgtcttggattccagaatgatttcttaaatatgacaccaaaagcacaagcaaccaaaggaaaaaagataactcggacttcatcaaaatttagtatttttgtgtttcaaaagatactatcaaaaaaaaaaaagacaacaaaatgggagagaatatttaagaaacacctgtctaataatggtctagtattaagccaaggctgagttcttatttccccatccttaagtttacacgatactatattagtgaagttgaattctgtcattaccacatgtatcttgaaagaagtttgtgtggatcacgggtccagttactttctccgccctttccctccagaggatttgtcactctcaataatgttatatactaatttcaaggggaaatacaactcaaaacaaatcagaaatctgaagcttaaaaatgttatggtttagatgatgaaaagggaaaagtacatttaattcatatcatatttagatgtaaagcacttaatgttatattgcttaacctataaagtagcgcttcagtgctctcatcatatgaagtaaataatagaaaattctttgtgtgacacatgtctgttttcagccaatcagaaaccaggattattttgtatgtaataatagggtttactggaagaggagctatacagatggtacttagaggatgtagggccctacgtattagggcttcttagttgtagcgaagagcaattggtctggtacgtttagctttttcacatttagttttgaattctgactctagaaatgtacaaccccatcttttgaattacaggttttaagatgttatttgctcttaatacgtcttaaggtaacagccttgatcactgcttttactttcgatgaaataacttaatgagctgtgaagaaaaaattatcagattttaagggagagaattttatgaaaatgtctttgaggttcctgtcacctttatgagaatgtcttcaaagtttccatcaccacctctaccaatttttcttccaccggagccagtggacttaggttccataacaagctcctcttgttcactgaatgagctagacaatatttcccaccttttaaggaaaatatcagctgatatcaatgaaattaaaggaatgaaagcagctattttgacagtggaagcaaatctttttgatctaaatgttagagtgtccaagaatgaagcaaaaatttcatctttggaggttaaaatgaatgaatattcaacaacatatgaatgcaacagacagtttgaagatcaagaagaagatactgaatcacagtcaagaactactgatgtaaaaataatcggcttccttagaaacgttgagaaaggtaaactcttaatatatgatatgttctaggtacccatcctttgatctgtatctttccacgtatgttgactgtagctctgatgtggagggagcaagttacagagaacttgaatttttcatggacctttaatgacaaatttggattctgcttgatttagcttagcaatctagaattgatcagaattccatcctctttaatggagctctctaaaacgatgttttgaaaagacagatgaacctagagcaatgaagcaaaacttgaaatgtggaagtgtggtctttcatgtgtcttgtgaaattattttaaaatgtctcattctttcatcatgtactgttgatgtgaaggagacctgttgcagtatttggatggaaagagcattcttcctgtaacttttcacctcagttttccaagcttcccacaggaatgcaacttgacctaagtgtcatcttcgttacagttcctcagaatgtgtgtttttttatggtaataattctggaaggaattgacttttttgggacgcaccagtaaaatttcatataacttatgttttaaaggaaactaactgatacaatttcaaatcgagtataggttttaaaatttaaaaacaccttttaatgaaatgtggtgcttggtgggagatggcccacttaacatctttgcactgagtaagcaaagcctgtccttgtgaagccacctgtaatggatatacccaaaatcagcatgtgggcatcttagtaagatttcagtatttgcaaccctatcagttacatccctttgtacactgtagtgcagtaccttataatgagcaagtgagtgcctgatgtctgctaagcgctgtgggggctacagaaaagtgtgacattctcccatcctcaaggagcttaacatcaaatcgaggatggaaaaaaatcagttctttgtccctattttgtgcagtcagactgctgggcatattattgttaggaatagtgaacctaataggaattaatgttaggagcctattttagaagaaataagtagttgaacatcttttcttgtggaagaggcaaagaattattatcatgctttgctaacatagggtgtggattgtagagctgagtgtcttattgttttctttgcatgcatcgaagcccagagtttgtcttttaggaactcttgtttagatgatgagagtgttttgttttgctatttcgattatcttcaaaggtcatgagtgagtcgtgatggtaagagctcaggtgatggagggaggtgcttgccatgcttattgtgcagttggctgtgatgcgagctgctgggccacaaggtgccttttcctggattttccacccgtttgccacctttactttccccgcagaattcaaattcaggaaaactgatgtcctcatagagggagaaccaggagtgttttaaattggcatttgtggtttaaccctgagtacagccttttttgtcttacaggatatgtctttggtctataaatactattaaattgaattgttgaagctttaagttacttttaagacttcaagttaagaacccagaaggattgatttttgggaaccacatgctggtattgtctgtgttgtaagcttagtgaagttttaaaatttatattctaggaactcaacagaggcaattattatcccgactgcaaatcgacccagtaatggcagaaactctgcagatgagtcaaggttggtaatgtttcaagttgtactgtaatccagccatttcagttgccatttccatttcttacaccccatttaacgtatctcggatctcttagatcctgccctaagatgttatatttagatctgtgaaaatattttagggccaggagataagatctgcatttctttcatgttatatagtgttataattttttgcctcattggaaaactttgttcctttcacaccattccaagtgtgtccctagcactgtcggctgtcactctcctgctgtcaggagtgacctgcgtttctgatttaccctcccactctacccagcttttgtcattgccatgagtggcttttgtatcctgtttttcacctggttagccttatcctcttgtacttcattttggagtcttatcaccagggccacacctggaacttgttgttctagtgttctagagccactctagtttgcctgtctcctttcctctccccacagacacacatgccaggggctactccaggactggagctgacgccttcatttttattatctctgtcctcagtgcccagcccctgccagatgcatgttcaatgtcttaaaaatgactgcaggataaacacaggcaaccatgagagacccggaatcatctcagtccttctgtttcccctaagtctgtcttttgtgggaagctctggtccctagacccctctcagtcaggactccacagtcagtcactctgttccccgaccctcccccagctttccagctcagaaagtgtgcttttcctccctaagggtcagcctccaccagaggccagatcccactgggttggtgagccactggcatgtcacccactcctccaacttcattctctgcctcctgtcttctctctgtagaggtgttcagacattctctgcccgtgattttgctctctcatctcccagcagtccgtcctgcttcctccacaggagtatttgaaaaggttgacagccgagatctgtgtgtgggatccacttcatcagctcttgtgcatgttttctcttctgcctccttcagcttttcattgtacccatggtgcacgcagtttgaaatagcaagtagttctgtgaggcttatgaatgactgcagtccttagctcctatcacattttttattctaagatccctttgtttctgcatattctattaattttctaaaaacatactgattttgtgtacacaatactctttgttatttctctgtggtctgaaaggtggttttgacatttttcccctccctgcttcgtcttgttttctctaagtggtctgttttggctgtcttttatgctggaggttcccctctgatgtctggggatcctaggtggtcttacatttaagagtggagcactcagaaggtcactggtattctgggttcatgagttggggcatggggcactttgactttctgtttgaaactagaccctgtggtggaaagtgatttgtcctgcctgtctggtttgtgggcaccctgatgtcactgccttcaagactttcctctcaggctggtcagcttctccaaaacaaagtttttcaagtaatagcctggtagtcagagttctgcgagcttaagtggggaaagaaggctgggggaggcacctcaccattaattattatgtaatgtttatttaaccctcccccaaccattgtcagtccagtacttctttcatcatggctggtgtctcttggtccagggactctgttcttatcctctgaagagtctaaagctccactttctccaagggagaatgcatgcagtgggtaaagatttatcaggaaatctaattgcctttaaaaatttttaacagtgtaccttcaggtgattttgtcgtagcatctttctggcagagaccctaatgcttcatccataggcctctccgaagattatctacaggaaagcacatcaccagtcatcccaggtgtcttcagtgtagaggtcgggattggtgtggcaagcatcaaaaccaagaaaacagtggccaggtgcagtggctcacgcccataatcccagcacttggggaagccaaggcaggcagatcacttcaggtcaggagttccagaccagcctggccaacatggcgaaacccaatctctactaaaaaatacaaaaattagccaggcgtggtggtgcacatctgtaatcccagctactaaggaggctgaggcaggagccttgcttgaacccaggaggcggaggttgcagtgagctgagctcgcaccactgcactccagcctgggtgacagagcaagactgtctcaaacaaagaaaacagatacatggaattagagttgaagaagaactaactgcttcttggacacatctaatacacctcttttttgcctgccatttcttccatttcttcctaaggtccttttactgccagttcctgagcctttggagaatcttgtggtctgaattggattgcttcattattgccttagaattcagcttttacagatcccctgagttcttaatcatctgttttccactttgaaaatttctttttacacttattttctttgtgagtttatgctttcaaaacaaaaacaaaacccttattgacatttctgtgggctttcaggagggaacaaaaagtaaatgcatggggtcagcctgtggtctctactcagaagatgttacttactcccccgtctgtctggtctccatgtgacctgggctgctaacgttccgcttgcagagaggtgtgcgggagggaccggtgcacgctttcctcaaccctggagcatgttacacttgggttcccatactttctccaagctttgacctttcggcttccagttcactctgtctttattcttctcattccctttcattctcatgtgtcagcgcatctcctccattcctcctcaaaaggttagctttgctctctcccaccttcagcattattttcatctcttctgtgttcacccaacctatgaactggtagaactccttcgtctcagaaagtgcagagtggtgggaaggagtgaagcagcccctgggccactgttgggacccacctttgacagttgtgagacctcggtgaatcatttaataacttggagctgcaaacagtcatctgtaacatgggaggaaaccgactttgtaggctttgagtgaggattcagtgagagacggccaccctgaatatgttaaacacttctgtcaccttcggttttgactcagcatcttatttctgtccccccacctacaggtcaaatctgaattttctacttcctcttaaacatgggagagtcccacaaagactttaaatctaacatggaaatgtatctttgccccttttaactttgctctttttcttttgctaagtttctcatcccagctttctcttccgcctgtctccctttaccatctgtactgcccttgctggggaaggcgggcacgccccttcccaggatggagcatgtcttctcttcctgtcaggtgtgtgagaccaggacagacagcagagaatcttttcattcagagcctcaccctctgtcccgggcaacagcaggtcgagaactctggttcttccttaacactgtttttctaaaaaccagtttgatcaggccacttccttccttaggaacctctcttgatttcttttctcttttttttttttttggtttgagatggagtctccctctgtcactcgtgctggagtgcagtggcacaatcctgctcattgcagccttgacctcctgggcccaagcacttctcccacctcagcctcccaagtagctgggactgcgggcatgtgctcccacgcctggctaattttatttatttatttattttctggttgatgggaggtctcactatgttgcctaggccggtctcaaactcctgggcttatggaatccttgtgccttggcctcccagaatgttgggattacagacatgaaccgccacaccaggccacttgatttcttactaattatagaccagaatcgagagtcactgagacatagaagaacctttattatatgtgtcagccttccttggtatgtactgctgagcccaccacacacacccttccagccattccacattctaacctttctcagatgccttcggccttgtgaaagcccctttccttctacgtgcgttttcctctgcctgaagtgctgtgttcgtttctccgagtctctctccttgtttattcctgcttgttcctttactgctgacttcagatgttcctccttgctaagcttttcgttggttcttggctggagtgggctgttctgtattctcagcaccttgttcacatcccttttgggtcatgctattctgaaattgtatatgtgtctgtttttctttttttctttgtgtatctagctcagttctcttagttgttcagtaaatactcagtgaatgaacataaatgaataccctgtaaattttggtctctaagctttaaaagaagtgtattaacttcagtccgttgatggcgtattgataggtcagccattctgggttgtaggtcttggcatattttataaaatagtagatgatgtgagcttatggttatttgcattaaaggccagtgtttttcttgatacatatgtttaagtgtccattcacctttcagttaccttttaaagtagtcctcggtttataaccaactggaaattataccacttgaattctttttatcaggacatgattctaagtggtactgtgcgaagtgaacaaaccagattttggaaaagtggttcagcagtctgtgtattctaattatagggagcattaggactcaaattctccaggtttttagaaaagatttttgtactttaagggtatattgttaatatctgttgagatgcctcacctgagaacctttctctgctgtggttagggagtgttaatcagaatcacttgtgccgtgccctacgcgagaaggactccttgagttctttgaaaacatgtttggaatagaattatagccctgttttcctgagtggaaccagttgtgattttcctttgaaataatttgaatatataaaagattgacattcttctcacatatataatgttgggaatgtaaggtatattcaaaagtaaacatttgtggccaatttttttggctcagattactatgacatggaatccatggtccatgcagacacaagatcatttattctgaagaagccaaagctgtctgaggaagtagtagtg

SEQ ID NO: 15057 - DNA, 400 bp, Homo sapiens
gattacgggtctcgaacaggaagcatctccagcagtgtgtctgtgcctgcaaagcctgaaaggagaccttctcttccaccttctaaacaagctaacaagaatctgattttgaaggctatatctgaagctcaagaatccgtaacaaaaacaactaactactctacagaaacagacacttccagttgctcccagaactcgaacttctcaagaagaattgctagcagaagtggtccagggacaaagtaggacccccagaataagtccccccattaaagaagaggaaacaaaaggagattctgtagaaaaaaatcaagattactatgacatggaatccatggtccatgcagacacaagatcatttattctgaagaagccaaagctgtctgaggaagtagtagtg

SEQ ID NO: 15058 - DNA, 9803 bp, Homo sapiens
gcgcggccgggggcggaacggaggaggaggcggtggtgtcccggctgcggggtaggagtccgcggcagcctccgggtaagccaagcgccgcgcagtgctgagttcccgcacgccgcagagccatggagatcggcaccgagatcagccgcaagatccgggtgaggcccgtgccggtcgggggtgggaagccaggtctcggcgagcgggcggttgtcaggagtaacggggactgtgggcccgggtggacgccgcggcctggcctccgctggacgctcctggcgggctgcggctcctcctcgtccaggccgcctcggccctggggacatttgcggcctcggagcgtggctgcggctgaagtagccgccgggaaatggaaggacaggcgcaggcccggctggagccaccaccgcggcgcacggcgccgctttggatccgctgcgggaggtgggcgccgcggggctggggctggagctggagtggggtgcggggtggggggcggtgcaggcgaggctcctcccagcccccgcccgggggatccgaggtgcgcgcaccagcaaagtggcctcagccgctgcagagtccggtcttgttttcctagagccgcctttctcacatgcacgtttgctctttttctctcagagtgccattaaggggaaattacaagaattaggagcttatgttggtaagtgtttttttggttgttagtcttacagaatttagagtttgcagctaatagaattttagtgaatgcgtatttctcaccgtactttggacattgggagagactcccttctaccttcttcaaatcttatactccctggttacttctttatcatctttttgcaaccttgttttttttctcccaaacctccttctgttatggtgttttgaaatttagtttcctccgttaaggctctgtttgaccgaattttattttatgtttttcctattctctctctctctcattttaaattctagggacgggtctcgctacgttgcccaggctggtcttaactcctgggctcaagcaattatctgaccttagcctccctaggtgctgggagtgcggggattactggtgtgagccaccatgcctgtttaaagtttcctattcttgttactttcctcttgacatttgtttttagaactctgatgttggatgtgaatgtttgatgctttctggcatttgcttctgtaatggttcagtgagttttattttccgatctctttatgttttccctctctctctgaaacagtaaggctttttccgtctctttattcttttataatttgagtgtttactctgggtcaggtactgtgcttaactattgtatatgtattaactcaggataatccctacgagaatcctggaaggtaagtggcagtatctttgactgtgtaaacaaggaaactgaggctttgcctacttgagcaaggttttatggtttgcccccaaagctggtgcctcctataaaaataatagctaccactaatgacagtggttctcaaagtgtgggagactccaagggcctctgaagtcaaaactgttttcatattaatactaagatggtatttgttatttttcactgtggtggtggtgtttggattgtgtaaaactaatggttgataaaacttgtcagcatagtaacaccataatgaaatcatattcaaatcactccccccttgtagtttttttctttttgagccaattacacttaaaatgtcattgatgaagatgtgaagtccagggtttacaaaatattttttatcttcttagtattcagtgcgaggaaatagaaatgctcataaaacatttttattgtatactgaaatacgattgttctgaggaaaatcattttagttgagaactaagctagccacctctttcagggaacatcatttttaacttcaaagtactgacaaactggttacatacactaggatatttggcagatatttacttgaaagtgagcaaagaaaagaatccatagtctttgttgccaatcacatgtgagctttcaaatgaaaattagaattttggaaaatctgagcctgcctccatgaatttcacagcttcccagtacttaaaaaatttctgattaaataaatggtgatttaaaaaaaatttgttattattattattttttttgagatggaatttcactcgttgcccaggctggagtgcagtggcgtgatcttggctcactgcaagctctgcctcccgggttcaagcgattcttttgcctcagcctcccgagtagctgggattacaggcatctgccactacacccagctaattttttgtatttttagtagagacagggtttcaccatgttggccaggctggtctcaaactcctgaccttgtgattcgcgtgcctcagcctcccaaagtgctgggattacaggtgtcagccactgcatccggccaactcaatggcgatattaaaaaataattattttatactgcataatgaaatatatcaacgtgtcagtggtttttgtagctaagtgaaccaatcttttctaaataaccaatgcataatattacaaaattatgcagtggattaaagatttatttaaactctggggtgggtcagtggatttttgtgcaacagttcaaaaaggtcattgacgtatttgacattccacgttgctttaacatttaataagctaccacttgtttagttttggtgtagtgtcacagaagaatatccaccttatctgaaaagactatcagaatactcctttttcaactgcatatctgtgagaccagattttttcatattcttcagtcataagcacatagaacaagatatataaaaatatgaaacaaggccagtctttgcagtaaatttttctttttcttttttttgagatggggtctcactctgtggttcgggctggagtgcagtggtgcaatcttggctcactgcaacctccgcctcccaggttcaagcaattctcctgcctcagcttcccgagtagctgggattacaggcacctgccaccaccccgccccccccccccggctaatttttgtgtttttagtggagacggtgtttcaccatgttggccaggctgatctcgaactcctgaccttaggtgatccacttgtctcagcctcccagagtgctgggattacaggtgtgagccactgtgccttgcctaaatttttttttggaaaatttaataatgttacttgtgttaatataattggatttgtgattaacatgtgatggatttattttttaatgaattaataaatactttttaattaaaaatgatcagttctaattttgaacaccataaataatagaacctgcataaaccaaagaaggggcccaagaccaaacagtttgagaattggtaatttatggagtacttaccaccatttgctgggcactttcataaacgatttgttgtcaggattgttggaagactaacagatgagagaattgaggctcagagaaaataaagctgaaccaagatttatttattcttttattctttcaacacttgaactgcattttttatagttttctttgaaacaaaaaaagtacttctgaaatgaacctttctgcctgcatagaaatattacaagtatttaaggtattaaagaaatttgtcacagcatggtggttcacgcctgtaatcacagcactttgggaggccgaggtgggtggatcacttgaggtcaggagttcgagaccagcctagtcaacatgctgaaacctggtgtctactaaaaatacaaacattagctgggtgtggtggcaggtgcctgtaatcccagctactcgggaggctgaggcaggagaatcgcttgaacccaggaagcagagcttgcagtgagccgagattgtgccactacactccaacctgggagacagagcaagactctgtcgtaaaagaaaaaaaaaaaaaagagaactggaatggagttttgagggtcagagattagagttcctgataacagcttttgcttccttatcttcttagtgaggtttttgtttttttgttcttttaaatcctagacctcactctcataatcactgtaggattaccactaggagggtgttttttggcttcttttatttattttatttatttatttttttttgagacagagtcttgctctgttgcccaggctggagtgcagtggcaggatctgagcgcactgcaagctccgcctcctgggttcacaccattctcctgcctcggcctcccgagtagctgagactataggcgctcaccaccacacccggctaattttttgtatttttagtagagacagggtttcactgtgttagccaggatggtctcaatctcctaaccttgtgatctgcccaccttggcctcccaaagtgctgggattacaggcatgagccaccgcgcctggccttttttcttttttttttttttttatcctagacctcacccttataatcattgtaggattaccactgtgagggtaaaaccgtgcattgagttgacattatttaatgttaaaattgatttttttaaatgatgtggagcttttgggtctatttgtttattcgatgttgctacaagtttgttactgtgagtaattgaaacctgcctttagcaagggtaaagatgttcacttgagaaatgagtgttattttgaaactttgcaaattaaaactaaacaaaactcaattctttttcttggggaatgttcaaatatttcccataagcttctttgaaattaataagcattattaaaaagattcaaggaagtgaatgcatgctcaagtttgaccctataattcagaatgtttagttttgtaagtatcaattattcttaatttccattcttctagtatttgaaatacctgtggaatgaagagaaaaaaattaaagctaagccatcttgtccaatgtaattccagtagagctctgcgactctaaagcttagagctacatctatattttcaagcacatcaactttaagaagaaagttttgaggaaacaaagttttgatctacctttccttttaaatagatgaagaacttcctgattacattatggtgatggtggccaacaagaaaagtcaggaccaaatgacagaggatctgtccctgtttctagggaacaacacaattcgattcaccgtatggtatgtttctgaatttttgtgcctcagaccaaagtttggcacaagcctgagttgatattctgtccaaagagaggttcttgacacttgagttaggtttactttggagaggcagtttgtgagtgatgagagcacagcctctgtattagtccattttcacagtgctatgaagaaatacccgagactgggtaatttctaaaagaaagaggtttaattgactcagagttccacatggctggggaggccccaggaaggggaagcaagcaccttcttcacaagtcgacaggaaagagaagagtgaaggaggaacttccagagacttatataaaatcatcagatcttgtgagaactcactgtctcttgagaactcgggaactcactgtctcttgagaactcactatcatgagaacatcatgggggaaaccacccccatgacccagtcacctccctcccttgacaggtggggattacaattcaatataagatttgggtggggacacagagccaaaccttatcagcctctgaagccagacagccaaagttgaatcctggctgtgtcttgccttggtttctctagctataaaatggaaatagtacagccacttgctttataaaattattattgaggatcaaatgggctaatatgtgtaaagtacttataggtgtccctagcattttcctaaggaattcttagtatatgtcggctatacttaatatgtttcttttgtaaacttctatatctttttttttgagacagggtcttgctctgtcaccaggctggagcacagtggtacaatcatggctcgctgcagcctcgatctcctggtttcaagtgatcatcccattgcagtcccctccttcctgaactcccatgcctgactaatttttaaattttttgttcagacagggtcttagtatgttgccctggatgctcttgaactcctgggctcaagcagtcctcctgccttggccttcagaagtcttggggttataggtatgagccactgcacctggccagcttctgtatcttatagttccttttcccccaccaaaaccagttacagatgtttttttgaactgggttggcttcttacattgccttttacaatgagttacctttagagggcaaggttttctgtttctcacttttctgtttcttactttttaagctttttgttaaactcacaccttcattttgagtaataattgtagtgtaatgttacagcatattttgagattataagtttttttaagtttggaattttaaaataggcaactttgcttttatacataaattactgttatatgcctttagttgagaatactgactagaagagtaagattcaacttaagatgctaggtcctggtaccaggtttgaggtaaagtgaggatgagggctggaggataatgatgtagctgagaatagacagacgaaatactttattaggcttctcaggctaggaactaccagttaccgtgaaaggtgatgatgtagcagaagtgagcaagtggcctgccgaatttgagtgcaagaggaggcactgagtggggagatgagcctggttaagttcttgcctttataccaaaggtcgtcttcaaggtgtttttgcccaagtaggcaactgtatgcttatcaaccgtcttgaaattctgcacagaattctctgggtttatacattgcacaaatttgaagaacattgtatagtggtcatcagttgttatgatacactgctgcctcactgtgggtgacccaacccatttgttacaatttgtccccagaggttattccctcccagccccccacaaaaaaagactgtgggtcttttgactgggaaaattaccattattgtgagtactatttttttttctaaagcgaccgagtagatccttttctccgataacttgatagaatacttagatttttaaaacagactaccaaatgaatttaaaaccaaattaattcaacattctcatctggccataaattgagttctttaacatgtagtgaagcaaagggtgatgtccccattttggcactttgctttcttaagttagtgttcattaacaccagccccaaacagactattgtgattatttggagccttgaagtaattgtgtccgtggggacagtagcatgtgactagggttctcattgaaacatgaggtttctggcatattttgagaggtactgggaagggatgtaaggcaaagtacctcatttataactaccaaaacaggttatgttacaagcaagattacagccttacagcatcagttttgaaagtaatagagtgaaatgatatagcatagtttgagattataacttgttttaacctctcagaattaagttgtccaagacaccatctagtttaagcagttaatataagctgcttaaatggtggtaataataagcaatattacatgtttatgatacttgttttactgtaagctacagtaaatctttagtacttacaaacagggtgacatattttgtagactaagactggtcagatgatattctttcccatatttttgcagaggctagatgttgaaaacagtgaagaaaaaaatacaattttttattgacttctgtaggatttatacaaagcccttttttaaaaatgtgaagtttgaaagttcataccatttattcactaaatacagtttatcagtatttatctcagctaggtgcggtggctcacgcccgtaatctcaacactttgggaggctgaggcaggtggttctctcaagtccaggacttcaagaccagcctggacaacacagtgaaaccccatctctatttaaaaataataaaaatataaaaaaatttaaaaaattatctctgaatataatgtcataaatttagagtgacagttgaaatgaaatctttcttaacagaaggtttatttttgttttttgtttttttcctcaggcttcatggtgtattagataaacttcgctctgttacaactggtaagattcataacttttttttttaatttctgcttgctatggcatatgatttgtttctttctaaagtcatagtgctttgggaaaaacccatcaatttcaaaacggttcatttgaacttttttagaaagcacatacttttatgaacttaagagcagtaaatttaacataattcaaagataatttaagtgtgggagagggagcagtgcactttatccgaaggaaataattacatatatgtgcaaagatttagcctcaaggatatttcagtattttataattgaaaacaatttaaaagttcagtcataataaacgaaattgttgtattaccatgtgtggaataatatttaactattaaaaataatgttgtggaagaataacagaatatacacgcataagatacatgttttaaaaaatgtgtatatatgctcttcccccgaaaaatcacctttgagataattggtgatttttattatatttttaaaattttctacaataaacatactgcttttgaattggtgatgaggaaggaaacgacttaaagtaataaaaatagatggccgggcacggtggctcacgcctgtaatcccagcattttgggaggccaaggtgggcggatcatgggctcaggagatggagaccatcttggccaaccaacatggtgaatctccgtctctactaaaaatacaaaaattagccaggcatcgtggcacatgcctgtaatcccagctacttgggaggccggggcaggagaatcgcttgaaccagggatttggaggttgcagggagccgagaacgcgccactgccctccagcctggcgacagagcgagactccatctcaaaaataaataaataaataaaaataagaaataaaaatagattaaaaggactgtatttttcttttcagaaccctctagtctgaagtcttctgataccaacatctttgatagtaacgtgccttcaaacaagagcaatttcagtcggggagatgagaggaggcatgaagctgcagtgccaccacttgccattcctagcgcgagacctgaaaaaagagattccagagtttctacaagttcgcaggagtcaaaaaccacaaatgtcaggtaagagtctggtgtagacctgctgggggcagatggctctgtgtatgtgacatttatattagtttttatatctttcagtttgctgttctcagcaatttttagaaacaatgaagtgatcgtgagtagttttttgaataaaataatggataagatctaagtatgattatcttttatcacaaatttagtaaatcaaagttgaaagaaagtgcaatttcaaagcagttttgaatggaatatgtaaagggagtatcctcagttttttcattgaaatttttcaagtaaacattctttaaagatttggtgataattgccctaatttggctgtaatacattttgttgttcttttaaatagacagacttacgatgatggagctgcaacccgactaatgtcaacagtgaaacctttgagggagccagcaccctctgaagatgtgattgatattaagccagaaccagatgatctcattgacgaagacctcaactttgtgcaggagaatcccttatctcagaaaaaacctacagtgacacttacatatggttcttctcgcccttctattgaaatttatcgaccacctgcaagtagaaatgc

SEQ ID NO: 15059 - DNA, 849 bp, Homo sapiens
gcgcggccgggggcggaacggaggaggaggcggtggtgtcccggctgcggggtaggagtccgcggcagcctccgggtaagccaagcgccgcgcagtgctgagttcccgcacgccgcagagccatggagatcggcaccgagatcagccgcaagatccggagtgccattaaggggaaattacaagaattaggagcttatgttgtatttgaaatacctgtggaatgaagagaaaaaaattaaagctaagccatcttgtccaatatgaagaacttcctgattacattatggtgatggtggccaacaagaaaagtcaggaccaaatgacagaggatctgtccctgtttctagggaacaacacaattcgattcaccgtatggcttcatggtgtattagataaacttcgctctgttacaactgaaccctctagtctgaagtcttctgataccaacatctttgatagtaacgtgccttcaaacaagagcaatttcagtcggggagatgagaggaggcatgaagctgcagtgccaccacttgccattcctagcgcgagacctgaaaaaagagattccagagtttctacaagttcgcaggagtcaaaaaccacaaatgtcagacagacttacgatgatggagctgcaacccgactaatgtcaacagtgaaacctttgagggagccagcaccctctgaagatgtgattgatattaagccagaaccagatgatctcattgacgaagacctcaactttgtgcaggagaatcccttatctcagaaaaaacctacagtgacacttacatatggttcttctcgcccttctattgaaatttatcgaccacctgcaagtagaaatgc

SEQ ID NO: 15060 - DNA, 2075 bp, Homo sapiens
gtgcgcggccgggggcggaacggaggaggaggcggtggtgtcccggctgcggggtaggagtccgcggcagcctccgggtaagccaagcgccgcgcagtgctgagttcccgcacgccgcagagccatggagatcggcaccgagatcagccgcaagatccggagtgccattaaggggaaattacaagaattaggagcttatgttgatgaagaacttcctgattacattatggtgatggtggccaacaagaaaagtcaggaccaaatgacagaggatctgtccctgtttctagggaacaacacaattcgattcaccgtatggcttcatggtgtattagataaacttcgctctgttacaactgaaccctctagtctgaagtcttctgataccaacatctttgatagtaacgtgccttcaaacaagagcaatttcagtcggggagatgagaggaggcatgaagctgcagtgccaccacttgccattcctagcgcgagacctgaaaaaagagattccagagtttctacaagttcgcaggagtcaaaaaccacaaatgtcagacagacttacgatgatggagctgcaacccgactaatgtcaacagtgaaacctttgagggagccagcaccctctgaagatgtgattgatattaagccagaaccagatgatctcattgacgaagacctcaactttgtgcaggagaatcccttatctcagaaaaaacctacagtgacacttacatatggttcttctcgcccttctattgaaatttatcgaccacctgcaagtagaaatgcagatagtggtgttcatttaaacaggttgcaatttcaacagcagcagaatagtattcatgctgccaagcagcttgatatgcagagtagttgggtatatgaaacaggacgtttgtgtgaaccagaggtgcttaacagcttagaagaaacgtatagtccgttctttagaaacaactcggagaaaatgagtatggaggatgaaaactttcggaagagaaagttgcctgtggtaagttcagttgttaaagtaaaaaaattcaatcatgatggagaagaggaggaagaagatgatgattacgggtctcgaacaggaagcatctccagcagtgtgtctgtgcctgcaaagcctgaaaggagaccttctcttccaccttctaaacaagctaacaagaatctgattttgaaggctatatctgaagctcaagaatccgtaacaaaaacaactaactactctacagttccacagaaacagacacttccagttgctcccagaactcgaacttctcaagaagaattgctagcagaagtggtccagggacaaagtaggacccccagaataagtccccccattaaagaagaggaaacaaaaggagattctgtagaaaaaaatcaaggaactcaacagaggcaattattatcccgactgcaaatcgacccagtaatggcagaaactctgcagatgagtcaagctgagatgagtgaactgagtgtggcacagaaaccagaaaaacttttggagcgctgcaagtactggcctgcttgtaaaaatggggatgagtgtgcctaccatcaccccatctcaccctgcaaagccttccccaattgtaaatttgctgaaaaatgtttgtttgttcacccaaattgtaaatatgatgcaaagtgtactaaaccagattgtcccttcactcatgtgagtagaagaattccagtactgtctccaaaaccagcagttgcaccaccagcaccaccttccagtagtcagctctgccgttacttccctgcttgtaagaagatggaatgtcccttctatcatccaaaacattgtaggtttaacactcaatgtacaagaccggactgcacattctaccatcccaccattaatgtcccaccacgacatgccttgaaatggattcgacctcaaaccagcgaatagcacccagtcctgcctggcagaagatcatgcagtttggaagttttcatgtactgatgaaagatactctacagaacttgtcaaatctttgaaacttggaatatattgctttcataatatgaagttttattgccta

SEQ ID NO: 15061 - DNA, 11923 bp, Homo sapiens
atctccagcagtgtgtctgtgcctgcaaagcctgaaaggaggtaccttgaacatggctgtaaattaatctttaactgccttggtggagtcttcctgatttattgaagagaataatcacgaaaataatttttgtttgttttttgagacggagtctcgctctgtcaaccaggctggagtgcagtgccacgatctcggctcactgcaacctctgcctcccaggttcaagtgattctcctgattgagcctcctgaatagctgggattataggtgtgcactaccatgaccagctaatttttgtatttttagtagagatggtgtttcaccatgttggaccaggctggtctcgaactcctgacctcaggtgatctgccctcctcagcttcccaaagtgttgggattacaggcatgagccaccgcacctgacataaatatttaatgtaataccgtgtaagacttttccattgggttttgagaaacacgttaatgagagaaattgcttaacattggagaggattgcagagaatattgactaatatggtggggtgaggaggaacaacatcaattaagattcagatttattatttaaaaaaactaaaaggggcctaggcatggtggctcatgcctgtacctagcactttgggaggctgaggcaggaggattgcttgagaccaggagttcgagaccagcctgggcgatgtaatgagtctttgtctcttaaaaaaaattaaaataaattagttggtcattgtggcaggcacctgtagtcctggactggagaggtggatgtggaagcattgcttgagcctagaagtttaaggctgcagtgacatcacactccatcctgggtgagagagtaagagtctgtctaaaaaaaaaaataaggttccagtgtagttggcattttctaaaaactgcagctagtctgtttaaaacctagagaaggttgtggtaaaggcataatagatggctggcctgtgaggaactgaaatttaaagtttaataaaaatacctttcttaactcttttagaccttctcttccaccttctaaacaagctaacaagaatctgattttgaaggctatatctgaagctcaagaatccgtaacaaaaacaactaactactctacaggtaatttaaatgtattatgtttacacttggtaagacatttctgtaattcttgagtaaggtgaaaatgattgctccttaaattgtaaaataaaggtgcctgtcagatgtcaagaccaagatgaggttcccatatagaaaaatggctttaaaaggaaattgacaagtttgagaaacttcgccaactgttattggactgtagtttttcaagcaccatataatgccttttatatctttccaatgtgtgtaaaatatatagtacgtaaatattttgaagagaattttgatgaagtaggactttcatattagtagcattagattcaacattagatatgaatttacgatgtgtaaaggggagtacaattggacaatgataggtatctgaagttatagaaatttgttaaacagtagtatataaacaaggttggtttcttcccttttggcggaactcattagtagaatataaggcagagaattgactcatttgtgatgttcctgctccaattctagtggaagtactgaataattttatgagagaatataaaagtattacgttttcaaaacaggagatgaatcagctgtaagctggtcttacggaaagctgattctgaaatgcaaacaactgatgggtgtcattttgtgttgtcaaattctgtactctctggccgacctgttgtagccaatgtgtaaacttgtgttaagaagctgatggtaatgagctactctaaaaagatttaagttttgctgtggatttggtgggtgtacttacagcattgccctgcttatccactctctcgcttttttttgtgaccccccttcctaaaatgaggtaaactgtagccatcagtttttttatttgttttctttttttgaggcgaagtcttgctctgttgcccaggctggagtgcagtggtgtgatcttggcttactgcaatctctgcctcctgggtccaagcgattctcctgcctcagcctcccaagtagctgggattacaggcgcccactaccatgccaggctaatttttttgtatttttagtagaggcggggttccaccatgttggccaggctggtctcgtactcctgacctcaggtgatcacctgcctcctcggcctcccaaaatgctgggattacaagcgtgagccaccgcgcctggcaccatcagtttttgatcctgatacttgtctgtcctcttggttctcctcatccctaatttaaccttgaacacaaaattcaacaggttttggcatatagaataaagattatcaggcaaaggcgcactcttgacctaatgatatatctacatttcatttcctgatctatcagcaatattaattgtctagaatgatgagaagtttagagaagttccatgactttgaaattttctttctttacctaggttatctaaattacaatttgaaactcatataagatcatgaagctaagcttaaataaaccgcattttgttgaaaatgaatacatatgtactatattgtattcatggtatgtggttgtatggatattgtttacatatgtttggataaataggttcaggtatctatctcagtaacgtaagaaaaaatgaatggtatctatggattgaactcctcatatatatgttcttttcttttctttttcttttttttttggagacagagtctcactctgttgcccaggctggagtgcacagtggtgcaatctcggctcactgcaacctccgccttccgggtttaagcaattctcctgcctcagcctcctgagtagttgggattacaggtgtgtgccactatgcccggctagtgtttgtatttttagtagaaacgaggttttaccatgttggccaggctggtctcaaactcctgacctcaagtgatccacccaccttgcctcccaaagtgctgagattacaggcatgagccactgcgcccagcctgaactcatatgtcctaaaccaaaggaggcatttatatttaatatgacatagtcactgtggagttttgacgtattactgcatttgtatttctatcttttttgcttttatgtgaaagttccacagaaacagacacttccagttgctcccagaactcgaacttctcaagaagaattgctagcagaagtggtccagggacaaagtaggacccccagaataagtccccccattaaagaagaggaaacaaaaggagattctgtagaaaaaaatcaaggtaataacttaaatgatgtttcactctttactacagttttttcatgaggcattgaatattttccaatggatttttatgaaatattacactatgaaaaaagtgatgattaagcccagaaatagaatgagaagaataccatgaggaaggttcataccaacacttcagaaaaaaattttttttttaaagaggtagggtcttgctgtgttgcccaggcagtcctcaaactcctgggctcaagcagtcctcctgcctcagcatccttagtagctggaggtgtgtacaagtgtgtgccactgcacccagccctttctagaaatttttgaaagtctttttattgtggaaatttttaatattctcaaaaatggaaaggctagtacagtgaactctcatgaacccagtcattaagccttagttattatcagaattttgctggtctttagatagctccttcttaaagatatatttatttctgcattctttctttttctctttttgttgatcctgcccgtttacctgaacttgaaattttagttacctttaaatctcccgtctcttaagcatcctgtctctgacctcccatatgtgtcccagcaaccctaatttatcccctcgtgcctaacatacttcagtttgcttccaggttttttttttttttttttttttttgcttttttctcagctttctcccccaattcctatacaatcttttgactttgaaagtgtgtctctcatcttctgactcctttgtgaaagtatctctcccctcctcctcattacccagaactaacgctattagtttggacttttggtgtctgttatctgacccctgggcctgcacagcccttctccatgactcttcagaccttttgtctcttttgtcgtcaagaaggattcttttttcttctgtttctttttctactaagatttgaattttaagaccccaccaaaaaaatctatatgcttattatgttatttctcacatacttttcaagaaccttggaatatattttttcatttcttcaaaactgtcctttaaattgttccaggtttcatgaaaccttatgatttcagaattgtcaattctgtatttgtttcctcattgtgtctctttaaaaatttttgactgtattgttcagtttgccatgacagcgttatatactattctgataattgataggcctgaggacaagacctgtttggtccccaaacagcagataggtaccaattggaaaatgtgaatgggccaaattgagaagaggagctgaaactgaggagggattttgctcagtgcagtggcagatgaggctgatctaaaaggactgcagtggtctactccctgtggagtctgtagtgtgttgcaccaaggttttcttcaaacacaggactctacgtgagagtcttggagtggaatcagatggagcagggaaacagacaatagagaaaaggaaagaatgtcagataaaaataggagaggaaaacaataggaaatctcaaagcaaggtgccatattttttaacatcacaaaatcaacagaagaaggttgttgattctgaagttagaatagctatccaaagcaaactttcccctaaaatgaacaacagaaaagtatcaaggtcaagtcctgtgccgaattaaaagataaaagggaataaaagacaaaacagcattgtttcaatgaaagcatgctgaaaggtataccaaaaagaaatacaatttcaaagtgagctagaagacattatttaaataatacaagacaaagccaagaaaaacataaaacagaagaactttgaggctgggtgcagtggctcatgcctgtaatcccaacactttgggaggctgaggcaggaggatcacttgagactagcctgggcagcatagcaaaaccctgtctcgacaaaaaataaaaatattagctgggcaaggtatacacctgtagtcctgtctccttgggaggctgaagtgggaggattgctggagcccgggaggctgaggtgggaggattgctggagcccaggaggctgaggttgcagtgagccacgatcataccattgccctccagggaggctgaggtgggaggattgctggagcccaggaggctgaggttgcagtgagccatgatcatgccattgccatctagtttgggcgatagagtgagactgtgtctcaaaataaatgaagactaaattagaaagaactcgaaagaattagtgcgtcttaataaaataaaacatgcgtgtaatcccagcaatttgggaggccaaggcgggaggatcacttgaggccaggagttgaagatcagccagggcaacatagcaaaaccttatggctacagaaaacagcaatttaaaaataaataaaattaaaacatcttcagagaaattgaagataaaagacaagaacattttaaaagtctaaaagggctcatgagaaagtggcaaatattgataataggcaatagaaatacagtgtttttatagtaggaatctccaaagaaacaatattcagaggaacagagcaaacattaactgtctttcaagaaaactttcatgaagtgaaaacatgtttgaaactgttgtctgaaaaattgtacagtatacctgagaatatttacccagaaccataacactaagatgtattatataattaatgaaattttaaaaagaaaaaaaatgatttggacattcaggcaaaaggggcacatgacttagaagaaaaggaaaggtagattatcatcaaacttttcaacagcatcacttttgtgctggaagaaaatggactagcatatttaagatactccagaaaagaaaatgtgagccaagaatttaatgtccagcaaaagtgacctttagaagtgatccagcaccaactgttatctatatgcagaaattcagagactcattcccatgaacttttcttaggaaatctaatggaggatgagcttcagacaagtaaaagcctgttgtcctgaatttacattggaaatgtttcggaactcacagtgtattttatatataaatacatttttttctagttctgtctactagaaggcatagaaacattcatcaacccttagcatcatctgtagttcccagattgtggtcttggaatacttcctatttaaaaaactaggcttcttgggctgggtgcagttgctcacgcctgtaatcccagcactttgggaagccgaggtgggcagatcacctgaggtcaggagttcaaaagcagcctggccagtgtggtgaaaccccatctctactaaaaatacaaaaaaattagctgggtgttgtggtgtgcgcctgtagtcctagctactcgggaggctgagccaggagaatcgcttggatccgggaggcggaggttgcagtgagccaagattgtgccaccgtactccagcctgggcaacagagtgagattccgtctcaagaaaaaataaaaataaaaaaacaaagaactaggcttcttgagaaatgtctttttccaggtctggggcaggaaatgttaacatgatcctggaatggctcaacatcccagatagcaaagaagctgtcaatgaatggtagaccacgtccaaaggatgcaggcgccaacttagaggtttccattggccaaaaatggaattatttgagattcagtaggtgtaaatatcgcggtgaattaaagcccatttaaatccacaatttcataatgacattttaaaaaaataagctctaactagtcaccttctggaaggtagtagataatcattcattgtcttgaaaactgggtaaataaaataattgaacatttatgctgtcttttctgtgagaacgataccactgggtaaccccataggacaggagttggcatctgttggaaccaaaccgtgcctattcatgtatgtattgtccgtggctactttcatactacagccttagttgaatagttgcaacagaccatatagcttgcatagcctaaaatagcctaaaagatttgccaacctctgatatagtagatgagagaaacattttcttttaaaatgatttcagctgataagagaacaagatggtaggattagagttatgcttttaagagtgaaaaccagttgttttgtgcctcttgatacaaaagaacagaacttttgtcttgccaaaaatgtaaacctaagtcatcaagctcccagtccagcagtcagtttgcaagaagttgcagaggccagaggagtatgttggttgagcttcaccatgagtgtgcagccggaaaaatagtgtttgggacactgtgggttgaatagcctgagaaattgagattaaaaggcaaatcaaaggaaaataaaaggagcaggattaaattgtagtggctagggatacccagtgtgtgtgaaattataaagaacctctaggcgttaatataaaaagcacatagtggttgcttttgaagaggaccgataaagatggagcacacagagaggcttctggggtggcagatgacgttctctcttttgacttggatggtagtcagaagggtgttttgccttacaaaaattcattaagctatatgtttgtgtggttttctatactgtgttttaaaaggggataattgaaatggtgtcaggtacctttgctgatgaggagtttggtattactagatatattcacaagtgtgaagtgatactgcaagcaactgttatctgttaatgtggttactcactgttgtacggtataatctggggcaggtttttaaaatataaacatgcactcgtattggcataagttgttaattttttttcttcttttgtttgagcagatagcattctctcatttctctggtgtctttatttttactagcgcacccacctcataatatgtgtactttttgctttttgtcttgccatcagtctgtcactagaagtttattttgccgatcttttcaaagacttaacaacattattctggctttattgatttttttttttttttggtgtttttgttttctatttcattgacttgtgctttttttttattttttttttttaagaggcgaggtctcactgtcacctaggctagagtacagtggcacaattgtagctcactgcaacctcaaatgcctgggctcaaatgatcctcccacctcagggaccataggcacacgccaccacgcccagctaatgtttaagtttttttgtaaagatggagtctcactatgttgcccaggctggtctggaactcctgagctcaagcagccctcttgcctcagcctcccaaagtgctaggtttacaggtgtgagccactgcacctggcccgacttctcttttaatttatccttccatattttaaaaattatttacctcaggctgtcttcttctcaaatgtaagcatttgagaagaatacatatgacaggttttaattcatcatgttttcattatcagagtgtctttaatttccattataattttcatcattgaaagtgtgttttctatacagtatttggaagtggtatgtgtttttgtcttttaatcctttttattatagacacctgacttaattgcattgtggttagataatgtaatttttacaatgcatagtttttgaaaattgttaacacttgcttagtgcataatcaagtttatgcatcttccacatgcattttggaagaaagtggactaattattggatggggaattttacatttattcagtagataaagctctactgttaacattattcaaatcttgaccttgctgagtttttgtgctgcttgacttaccacttgagaaagggtgttgaaattgcccaacatgatgacagatttatcttaatttctcttgtacttatatcaagtttttgctttatttttaggctgttatatactattaggtgcatacatatttaaatttgttatatcttctctgcaaattgaatcccttatcttgatttatgaccctctgcaaaaaagatgtttttatctcaaagtcagttttgcctgatattaatatagccatttaattatatttgctttatatatctggtttccctgcctttgttttcagttttctctctcatgctttaggtatatacagttgacccttgaaccagacaagtttgaactgtgtgggtccactcatacacttatatgtggatttttgaaaataaatatattggaaatattttttgagatgtggcaatttgaaaaaacttgtagataaactatatagcctagaaatagtgacaaaattaagaaaaatttaggtatgtcatgaacacataaaatatatgtagctactagactaacatttactatcttaaaacatacacatctattatgaagtttaatttatcaaaatatatgcacacaaacacagactttacatgataccgcttgtagttgagagaaatgtaagcaaacataaagatgcagtaatagctacataagatttactatagtacatactgtactactgtaataattttgtagttacctcctgttgctttatggtaagctaaggtgttttgagtgtccacttaaaatgctgtgtgatgcaaccatctctgcgacagttcagctctccagtaaattgtgaattgcagtgaaaggtgatctcgcagttcttgcatatttttcatcatgtttagtgcaatactgtaaaccttgaataacaccaggggacccataatgtgctactggtgatgctggacatgctcccaagaagtagagaaaagtcatgacattacaagaaaccattgctcagtatgtaccaaagatacatgttacaactgtggctgcagttattcaccatttctggataaatgaatttaacataagaaccatggttaaaaaaaaaagaaaaagaaaaaaatgtatgaagctgccactgcagctacgttggcaacagtaagtagttaaatgtttgggaagtcaaaagttgtatgtgggttttcaactgttgttgggggattggttcccttagccctcatattgtttaagggtcaactatatattatatcttaaatattataaagctggattttgttttttaatctcatctgagtttgccttttattggagagtttagaccagtcacatttattacaattactggtatagttggattactttctgtcatcattgctgatttgcatttgcctgcttttctgttttttctcatgttttttaaggttcattaattactgttattgttgacaaccctaaccctggttctacaattttaaactagtttactgtttaaaccttccctttctgttctttttttttttttttgagacggagtctcactttgttgccaggctggagtgtagtagcgcgatctcggctcaccgcaacctccgactccttggttcaagtgattctcctgcctcagcctcccaagtagctgggattatagacgcccaccactacgcccagctaatttttgtatttttaatagagacgaggtttcaccatattggccaggatggtctcaatctcttgatctctgatcccctgaccttgttatctgcccgcttcagcctcccaaagtgttgggattataggtgtgagccaccatgcttggcctcatttctgttcttttagtcgttaccagtgaaattttaccacacaaatttaatttagtattctaaaagttaatatcctgaccccactctcaaacagtaaaaggacttttgaatacctatgaagagcttcagtctttatcctcctcatttacttgtttccagtgtttcaatttgatcttttttaaaatgcacaagttgggccgggtgcggtggctcatgcctgtaatcccagcactttgggaggctgaggcgggtggatcacctgaggtcaggagttcgagaccagcctgaccatatggtgaaaccctgtctctactaaaaatagaaaaattagccaggcatggtggcacacacctgtagtcccagctactcaggaggctgaggcagaagaatcgcttgaacccaggaggcagaggttgcagtgggctgagattgcgccgctgcactccagcctgagcgacaaagcgacactccttatcaaaaaaaataagtaaaataaaatacacaagttggacaacatttttgtaattttttccaggcaatgttttttgaggtttacctcctgtttatcattttacttattcttaacatctctgagtgttatttggggatcattattttccaatattttgaagtatttttgaagtatttttttggaagtttcactgaaacatgtctgttggcaatatattttccaagagtctattcacctgtgagtgttttctttctttgtgttcttgtgcagtagttttgctggatacccaaatctaggttgttagttatttgctctccacaccttatatatattattatcccactgtcttctgctttccattgttgagtggacttctatcattctaattgtctgtcgttcctttgtaggtgatctgtcctttctctctggctgctttcaagatcttctctttgtgtttgatgttctgcagtttcactacgatgtgtctaggcgtggatttccttttatttttcctgtttggtataatgtatggaagcatcccatatatttgaaataaaatgcattatgaaata

SEQ ID NO: 15062 - DNA, 463 bp, Homo sapiens
atctccagcagtgtgtctgtgcctgcaaagcctgaaaggagaccttctcttccaccttctaaacaagctaacaagaatctgattttgaaggctatatctgaagctcaagaatccgtaacaaaaacaactaactactctacagttccacagaaacagacacttccagttgctcccagaactcgaacttctcaagaagaattgctagcagaagtggtccagggacaaagtaggacccccagaataagtccccccattaaagaagaggaaacaaaaggagattctgtagaaaaaaatcaaggtgatctgtcctttctctctggctgctttcaagatcttctctttgtgtttgatgttctgcagtttcactacgatgtgtctaggcgtggatttccttttatttttcctgtttggtataatgtatggaagcatcccatatatttgaaataaaatgcattatgaaata

SEQ ID NO: 15063 - DNA, 4558 bp, Homo sapiens
tgtttttgtttttctgtggacaagtttttagttttataactaaatggagtgacaattaccatggccctctccagagtagcgtatttcttgttcatgtatgtttgttgagaggcaagggtgggggggctttgtttgtgcctcggacctgtgagatactgaaatacctggggttccttaagaattctgtacgtttaagcagatgggtatatggtaactgccccagtttgtatgcattttggccacacgcagtatacacagattttgaggagttgagggaaaagttagttatgggtaatgaaaacattttggacttgggttaaatttttccttacaagctggctggctcaatgtaatgagctttatgagatggctttttggggcttcttttttttgccgggggtaggtcctatggatggaatcttcatttttaattcttttaaggaaatgatgtgggaataatacagctgtacatataaggagagtatgggatgagtctttttgtatcacaaagccttgcatagaggatgtgtttattgtattaatgagttcactgcataaaatatataccttttttattaagtggtgtgatttttatcacaaaagcttgtctttcttggtggcttggcttgagttaaaagcctgtgtttgtgttatcccaagctttggaataaatgattgtgtcctattttgatatatggtcttattttaaaatattctttttgttgctgttttttttgcatttctcaaaacaagtagtgatggggagtgtaaagagcccttatacacagaactaataatgcattgagaagattgaatatgaaatatgctttttttttgttttgtagagccttccccaattgtaaatttgctgaaaaatgtttgtttgttcacccaaattgtaaatatgatgcaaagtgtactaaaccagattgtcccttcactcatgtgagtagaagaattccagtactgtctccaaaaccaggtgagtgagtgactgtgctactacatttgggtaaaaaatataaaatggcattttgtgactgtaaatggaattgaacaaacaaaagatggtttcagaaataattttggcaggatcagttaatccaaccagtctttaaagagcaagtgtgcctatctgtagtattccgaagtattttgactagtgaatatataaaccttaccattctaatttaaaaatggttttcactttcaaaaaaaacatcagtagactgcattaaaaatgggttttccaaacagattggagatcagtcctggtttttattttgttagcagttgcaccaccagcaccaccttccagtagtcagctctgccgttacttccctgcttgtaagaagatggaatgtcccttctatcatccaaaagtaagaacttctattttctcaaatcaatttagtgacaacatctcaatttcctcatttaacttcttttttgtcagagttactacattggtgcaaaagtaattgcgatttttgccagtaaaactattaagttgttcctcgtcactgaacctccatctggccccttaggccaagtggtctgaaactgttcaatgttagtatcccaagcactcagtggggggaagcatatctttgctagtcacattttccattattccctgcatttaagtatatggatgggttttagcgggggctggggggcagtttgaacctaatgtcagaactgagatgaagaaatccagtaggtactgcttaaaaccatccaaacttgtactgatgatggttgatgaatctccagatgtttagttggtcaaaatgaattatctccttcttgccccggtagcttgaggaccatatgaaggccttcacttgcccccatctgtaactgggcgtagatgagggtactcagtgaagagtgtaagggataattagaagtttttgtggtatgctaaactaccttttgaaattgtacttgctgtgattctttgactagaattttgtgtctcaaggttaagtccatttttcaaggcttcactagtattaaaatggtccttatagatggaatctcttactctgttaatggttagggtgggctggttattgtctcctaagttgtatgttggccaggtgaggtgggtcaggcctgctatcctagtactttgggaggtagaggcagaagtggaaggatcgtttgagcccgggagtttgaaaccagcctaggcaacatttaagagaccccatctcttaaaaaaaaaaaaaacaggcttggtagcacacgcctgtagtcccagctactcgggagactgaggcaagaggtcatgccacttcactccagcctgggtgacagagtgagaccctgtctcaaataataaaataatgtgtttacttatattagccttgtggatattgttgaagctctgttatctctattcagcattgtaggtttaacactcaatgtacaagaccggactgcacattctaccatcccaccattaatgtcccaccacgacatgccttgaaatggattcgacctcaaaccaggtaaacattcaaattcgtttttctcatgtcagttcaaattcttttttctaatttgcagtttctaaatttataagcacacaaaattggaaactagactgttactttgaatttttttctttgctgtttaattatagaaggctcctttggcaaaataatttactacatgggctaaattttacattatccagtggttacttttttaacctagattatcttgctctgttgcccaggttggagtgcagtcacactatcatagctcactgcagcctcaaacccctgggttcaatccatcctcccacctgtagctgagactacaagcgtgtgcctctatacctggctaattttttttattttaagtagagatggggtcttgaactcctgagctgaagcgatatccttccaccgtggccttccaaagtaccaggattacaggcatgagccaccacacccagccagattttaacttctcattatatactacgcaaacatatactaaggccagcaggagtatatatatgtgtactgtacttgaatttcacatccattttcttcgacattagcaactgggagatactgaaaggaagtttcaaaatattttagtgtggccagaaaatttaattacatatggtattatcttttatctacctgacataattgaattatttttaaaaatctgccatttatattgtaatcttatgaccaaatatttattgcttaaaactagtcaactttttaaactgagatatatggtatatatggatacaaagcagataattaaaacaatttttggttctgttcattcagcgaatagcacccagtcctgcctggcagaagatcatgcagtttggaagttttcatgtactgatgaaagatactctacagaacttgtcaaatctttgaaacttggaatatattgctttcataatatgaagttttattgcctatctatctgaagtgtctaatttttcaagtttgtaagtttattatgtggttttaacattgggtgtttttgttttgtttttactatgaaaagacagcttaaggaagagctaaattctgttaaaatatttggggcatgtttgtgcactgctgttgtgaggatcagcatatgaaattgacatcatggttagtcatggtactgcagcttagggggctacacggttgctgtgtgagtggagagatgcagtgaggcagttgtcattattctaaaaattgtactactttcacttttcccaaagattatataatgttcataatccaccatgaaaacagcattggccaaaggtactgaggctgcttaaaatattcaattctgctttttaatttttaagtgaatttagtttgaaaagcatgattatacaggcctctcaggctgagtgctactttggtaaagttcccagttttcctgccttctgtgacaggatgaatgaggtgggtatggacagtggaggcagctggaatggcaagtgcagaaaataggaacagttctatacagtgctctcatttactaataacataatgccttctaaataatttttttgggaaactacattatcacaaaattatacaaatttttttacaagtatttacatactgtatctgaaaacagactttaaagtcacaagattataaatgtacatatatattctcacattctgaaaaataacattctcagaatccacagaaaatatacttagttactactgaagataatttttgaaatgtaaaaattagatttaaatagtatattttaaatgacagaactataattacagagatcagatcagataggtaaactgcaagatagataggatgaaacttttggcctactgtattacttacagagtttttttgtgtgtggtttttaaaactgttaaggcaagaagtgtcaaatgctttagagttaaataacagatcactgatttcaaagacttggtgtatagtgttaaaaattaaagcttaaaaggtggttagaaaagtggattaatgcaaaaggggtaataaagactgcaacattctcaggaccaaattaaactgct

SEQ ID NO: 15064 - DNA, 2724 bp, Homo sapiens
tgtttttgtttttctgtggacaagtttttagttttataactaaatggagtgacaattaccatggccctctccagagtagcgtatttcttgttcatgtatgtttgttgagaggcaagggtgggggggctttgtttgtgcctcggacctgtgagatactgaaatacctggggttccttaagaattctgtacgtttaagcagatgggtatatggtaactgccccagtttgtatgcattttggccacacgcagtatacacagattttgaggagttgagggaaaagttagttatgggtaatgaaaacattttggacttgggttaaatttttccttacaagctggctggctcaatgtaatgagctttatgagatggctttttggggcttcttttttttgccgggggtaggtcctatggatggaatcttcatttttaattcttttaaggaaatgatgtgggaataatacagctgtacatataaggagagtatgggatgagtctttttgtatcacaaagccttgcatagaggatgtgtttattgtattaatgagttcactgcataaaatatataccttttttattaagtggtgtgatttttatcacaaaagcttgtctttcttggtggcttggcttgagttaaaagcctgtgtttgtgttatcccaagctttggaataaatgattgtgtcctattttgatatatggtcttattttaaaatattctttttgttgctgttttttttgcatttctcaaaacaagtagtgatggggagtgtaaagagcccttatacacagaactaataatgcattgagaagattgaatatgaaatatgctttttttttgttttgtagagccttccccaattgtaaatttgctgaaaaatgtttgtttgttcacccaaattgtaaatatgatgcaaagtgtactaaaccagattgtcccttcactcatgtgagtagaagaattccagtactgtctccaaaaccaggtgagtgagtgactgtgctactacatttgggtaaaaaatataaaatggcattttgtgactgtaaatggaattgaacaaacaaaagatggtttcagaaataattttggcaggatcagttaatccaaccagtctttaaagagcaagtgtgcctatctgtagtattccgaagtattttgactagtgaatatataaaccttaccattctaatttaaaaatggttttcactttcaaaaaaaacatcagtagactgcattaaaaatgggttttccaaacagattggagatcagtcctggtttttattttgttagcagttgcaccaccagcaccaccttccagtagtcagctctgccgttacttccctgcttgtaagaagatggaatgtcccttctatcatccaaaacattgtaggtttaacactcaatgtacaagaccggactgcacattctaccatcccaccattaatgtcccaccacgacatgccttgaaatggattcgacctcaaaccagcgaatagcacccagtcctgcctggcagaagatcatgcagtttggaagttttcatgtactgatgaaagatactctacagaacttgtcaaatctttgaaacttggaatatattgctttcataatatgaagttttattgcctatctatctgaagtgtctaatttttcaagtttgtaagtttattatgtggttttaacattgggtgtttttgttttgtttttactatgaaaagacagcttaaggaagagctaaattctgttaaaatatttggggcatgtttgtgcactgctgttgtgaggatcagcatatgaaattgacatcatggttagtcatggtactgcagcttagggggctacacggttgctgtgtgagtggagagatgcagtgaggcagttgtcattattctaaaaattgtactactttcacttttcccaaagattatataatgttcataatccaccatgaaaacagcattggccaaaggtactgaggctgcttaaaatattcaattctgctttttaatttttaagtgaatttagtttgaaaagcatgattatacaggcctctcaggctgagtgctactttggtaaagttcccagttttcctgccttctgtgacaggatgaatgaggtgggtatggacagtggaggcagctggaatggcaagtgcagaaaataggaacagttctatacagtgctctcatttactaataacataatgccttctaaataatttttttgggaaactacattatcacaaaattatacaaatttttttacaagtatttacatactgtatctgaaaacagactttaaagtcacaagattataaatgtacatatatattctcacattctgaaaaataacattctcagaatccacagaaaatatacttagttactactgaagataatttttgaaatgtaaaaattagatttaaatagtatattttaaatgacagaactataattacagagatcagatcagataggtaaactgcaagatagataggatgaaacttttggcctactgtattacttacagagtttttttgtgtgtggtttttaaaactgttaaggcaagaagtgtcaaatgctttagagttaaataacagatcactgatttcaaagacttggtgtatagtgttaaaaattaaagcttaaaaggtggttagaaaagtggattaatgcaaaaggggtaataaagactgcaacattctcaggaccaaattaaactgct

SEQ ID NO: 15065 - DNA, 4449 bp, Homo sapiens
gcaacctgtgcttcccaggttcaagtgattcttctgattcagcctcctgaatagctgggattacaggtgtgtactaccacgaccagctaatttttgtatttttagtagagatggtgtttcaccatgttggaccaggctggtcttgaactcctgacctcaggtgatctgccctccttggcctcccaaagtgttgggattacaggcatgtaccatggcgcctggccccaagtttatttttaaattgttttatctgctgtttctcatgctataccagattttcttccccatggcttgctcctagagttcttttgtatcacatctgtatacctttttgggatttccagcatttgagatattaatcttaaattaatttggggggtttcaatcaattttagattgttcatggtaattgctagtgagcaaccaattaactctgttttattagtttcctcaatagcactatatgcagctgttgataaaataaatgtaaagttctaatttttgttttagctaaaggttgactgttagggataatatttatatttatagtatttatttatttatttattttgatacggtgtctcactctgtcgcccaggctggagtgcagtggcatgatcttggctccctacatcctccacctcccgggttcaagtgagtcttctgcctcagcctcccgagtagctcggactacaggcacatgccgccacgctcagctaatttttgtatttttatagagacagggtttcaccatattggccaggctggtctcgaaatcctgaccttgtgatccgcccacttcggccttccaaagtgctaggattacagatgtgagccaccacacccagcctcatatttatatttttacataaaaccaagaaatactctgtgaatttctcatattactgtgtactgtttttttcttaaaatggaaacattttgtggtagaactcttgttattttctgagattaggtaagcataaattttatctgattgcaggatgaaaactttcggaagagaaagttgcctgtggtaagttcagttgttaaagtaaaaaaattcaatcatgatggagaagaggaggaagaagatgatgattacgggtctcgaacaggaagcatctccagcagtgtgtctgtgcctgcaaagcctgaaaggaggtaccttgaacatggctgtaaattaatctttaactgccttggtggagtcttcctgatttattgaagagaataatcacgaaaataatttttgtttgttttttgagacggagtctcgctctgtcaaccaggctggagtgcagtgccacgatctcggctcactgcaacctctgcctcccaggttcaagtgattctcctgattgagcctcctgaatagctgggattataggtgtgcactaccatgaccagctaatttttgtatttttagtagagatggtgtttcaccatgttggaccaggctggtctcgaactcctgacctcaggtgatctgccctcctcagcttcccaaagtgttgggattacaggcatgagccaccgcacctgacataaatatttaatgtaataccgtgtaagacttttccattgggttttgagaaacacgttaatgagagaaattgcttaacattggagaggattgcagagaatattgactaatatggtggggtgaggaggaacaacatcaattaagattcagatttattatttaaaaaaactaaaaggggcctaggcatggtggctcatgcctgtacctagcactttgggaggctgaggcaggaggattgcttgagaccaggagttcgagaccagcctgggcgatgtaatgagtctttgtctcttaaaaaaaattaaaataaattagttggtcattgtggcaggcacctgtagtcctggactggagaggtggatgtggaagcattgcttgagcctagaagtttaaggctgcagtgacatcacactccatcctgggtgagagagtaagagtctgtctaaaaaaaaaaataaggttccagtgtagttggcattttctaaaaactgcagctagtctgtttaaaacctagagaaggttgtggtaaaggcataatagatggctggcctgtgaggaactgaaatttaaagtttaataaaaatacctttcttaactcttttagaccttctcttccaccttctaaacaagctaacaagaatctgattttgaaggctatatctgaagctcaagaatccgtaacaaaaacaactaactactctacaggtaatttaaatgtattatgtttacacttggtaagacatttctgtaattcttgagtaaggtgaaaatgattgctccttaaattgtaaaataaaggtgcctgtcagatgtcaagaccaagatgaggttcccatatagaaaaatggctttaaaaggaaattgacaagtttgagaaacttcgccaactgttattggactgtagtttttcaagcaccatataatgccttttatatctttccaatgtgtgtaaaatatatagtacgtaaatattttgaagagaattttgatgaagtaggactttcatattagtagcattagattcaacattagatatgaatttacgatgtgtaaaggggagtacaattggacaatgataggtatctgaagttatagaaatttgttaaacagtagtatataaacaaggttggtttcttcccttttggcggaactcattagtagaatataaggcagagaattgactcatttgtgatgttcctgctccaattctagtggaagtactgaataattttatgagagaatataaaagtattacgttttcaaaacaggagatgaatcagctgtaagctggtcttacggaaagctgattctgaaatgcaaacaactgatgggtgtcattttgtgttgtcaaattctgtactctctggccgacctgttgtagccaatgtgtaaacttgtgttaagaagctgatggtaatgagctactctaaaaagatttaagttttgctgtggatttggtgggtgtacttacagcattgccctgcttatccactctctcgcttttttttgtgaccccccttcctaaaatgaggtaaactgtagccatcagtttttttatttgttttctttttttgaggcgaagtcttgctctgttgcccaggctggagtgcagtggtgtgatcttggcttactgcaatctctgcctcctgggtccaagcgattctcctgcctcagcctcccaagtagctgggattacaggcgcccactaccatgccaggctaatttttttgtatttttagtagaggcggggttccaccatgttggccaggctggtctcgtactcctgacctcaggtgatcacctgcctcctcggcctcccaaaatgctgggattacaagcgtgagccaccgcgcctggcaccatcagtttttgatcctgatacttgtctgtcctcttggttctcctcatccctaatttaaccttgaacacaaaattcaacaggttttggcatatagaataaagattatcaggcaaaggcgcactcttgacctaatgatatatctacatttcatttcctgatctatcagcaatattaattgtctagaatgatgagaagtttagagaagttccatgactttgaaattttctttctttacctaggttatctaaattacaatttgaaactcatataagatcatgaagctaagcttaaataaaccgcattttgttgaaaatgaatacatatgtactatattgtattcatggtatgtggttgtatggatattgtttacatatgtttggataaataggttcaggtatctatctcagtaacgtaagaaaaaatgaatggtatctatggattgaactcctcatatatatgttcttttcttttctttttcttttttttttggagacagagtctcactctgttgcccaggctggagtgcacagtggtgcaatctcggctcactgcaacctccgccttccgggtttaagcaattctcctgcctcagcctcctgagtagttgggattacaggtgtgtgccactatgcccggctagtgtttgtatttttagtagaaacgaggttttaccatgttggccaggctggtctcaaactcctgacctcaagtgatccacccaccttgcctcccaaagtgctgagattacaggcatgagccactgcgcccagcctgaactcatatgtcctaaaccaaaggaggcatttatatttaatatgacatagtcactgtggagttttgacgtattactgcatttgtatttctatcttttttgcttttatgtgaaagttccacagaaacagacacttccagttgctcccagaactcgaacttctcaagaagaattgctagcagaagtggtccagggacaaagtaggacccccagaataagtccccccattaaagaagaggaaacaaaaggagattctgtagaaaaaaatcaagg

SEQ ID NO: 15066 - DNA, 634 bp, Homo sapiens
gcaacctgtgcttcccaggttcaagtgattcttctgattcagcctcctgaatagctgggattacaggctggagtgcagtggcatgatcttggctccctacatcctccacctcccgggttcaaagacagggtttcaccatattggccaggctggtctcgaaatcctgaccttgtgatccgcccacttcggccttccaaagtgctaggattacagatgatgaaaactttcggaagagaaagttgcctgtggtaagttcagttgttaaagtaaaaaaattcaatcatgatggagaagaggaggaagaagatgatgattacgggtctcgaacaggaagcatctccagcagtgtgtctgtgcctgcaaagcctgaaaggagaccttctcttccaccttctaaacaagctaacaagaatctgattttgaaggctatatctgaagctcaagaatccgtaacaaaaacaactaactactctacagttccacagaaacagacacttccagttgctcccagaactcgaacttctcaagaagaattgctagcagaagtggtccagggacaaagtaggacccccagaataagtccccccattaaagaagaggaaacaaaaggagattctgtagaaaaaaatcaagg

SEQ ID NO: 15067 - DNA, 1983 bp, Homo sapiens
gcggccgggggcggaacggaggaggaggcggtggtgtcccggctgcggggtaggagtccgcggcagcctccgggtaagccaagcgccgcgcagtgctgagttcccgcacgccgcagagccatggagatcggcaccgagatcagccgcaagatccggagtgccattaaggggaaattacaagaattaggagcttatgttggcttcatggtgtattagataaacttcgctctgttacaactgaaccctctagtctgaagtcttctgataccaacatctttgatagtaacgtgccttcaaacaagagcaatttcagtcggggagatgagaggaggcatgaagctgcagtgccaccacttgccattcctagcgcgagacctgaaaaaagagattccagagtttctacaagttcgcaggagtcaaaaaccacaaatgtcagacagacttacgatgatggagctgcaacccgactaatgtcaacagtgaaacctttgagggagccagcaccctctgaagatgtgattgatattaagccagaaccagatgatctcattgacgaagacctcaactttgtgcaggagaatcccttatctcagaaaaaacctacagtgacacttacatatggttcttctcgcccttctattgaaatttatcgaccacctgcaagtagaaatgcagatagtggtgttcatttaaacaggttgcaatttcaacagcagcagaatagtattcatgctgccaagcagcttgatatgcagagtagttgggtatatgaaacaggacgtttgtgtgaaccagaggtgcttaacagcttagaagaaacgtatagtccgttctttagaaacaactcggagaaaatgagtatggaggatgaaaactttcggaagagaaagttgcctgtggtaagttcagttgttaaagtaaaaaaattcaatcatgatggagaagaggaggaagaagatgatgattacgggtctcgaacaggaagcatctccagcagtgtgtctgtgcctgcaaagcctgaaaggagaccttctcttccaccttctaaacaagctaacaagaatctgattttgaaggctatatctgaagctcaagaatccgtaacaaaaacaactaactactctacagttccacagaaacagacacttccagttgctcccagaactcgaacttctcaagaagaattgctagcagaagtggtccagggacaaagtaggacccccagaataagtccccccattaaagaagaggaaacaaaaggagattctgtagaaaaaaatcaagctgagatgagtgaactgagtgtggcacagaaaccagaaaaacttttggagcgctgcaagtactggcctgcttgtaaaaatggggatgagtgtgcctaccatcaccccatctcaccctgcaaagccttccccaattgtaaatttgctgaaaaatgtttgtttgttcacccaaattgtaaatatgatgcaaagtgtactaaaccagattgtcccttcactcatgtgagtagaagaattccagtactgtctccaaaaccagcaccaccttccagtagtcagctctgccgttacttccctgcttgtaagaagatggaatgtcccttctatcatccaaaacattgtaggtttaacactcaatgtacaagaccggactgcacattctaccatcccaccattaatgtcccaccacgacatgccttgaaatggattcgacctcaaaccagcgaatagcacccagtcctgcctggcagaagatcatgcagtttggaagttttcatgtactgatgaaagatactctacagaacttgtcaaatctttgaaacttggaatatattgctttcataatatgaagttttattgcctatctatctgaagtgtctaatttttcaagtttgtaagtttattatgtggttttaacattgggtgtttttgttttgtttttactatgaaaagacagcttaaggaagagctaaattctgtt

SEQ ID NO: 15068 - DNA, 9125 bp, Homo sapiens
ctcctcccagcccccgcccgggggatccgaggtgcgcgcaccagcaaagtggcctcagccgctgcagagtccggtcttgttttcctagagccgcctttctcacatgcacgtttgctctttttctctcagagtgccattaaggggaaattacaagaattaggagcttatgttggtaagtgtttttttggttgttagtcttacagaatttagagtttgcagctaatagaattttagtgaatgcgtatttctcaccgtactttggacattgggagagactcccttctaccttcttcaaatcttatactccctggttacttctttatcatctttttgcaaccttgttttttttctcccaaacctccttctgttatggtgttttgaaatttagtttcctccgttaaggctctgtttgaccgaattttattttatgtttttcctattctctctctctctcattttaaattctagggacgggtctcgctacgttgcccaggctggtcttaactcctgggctcaagcaattatctgaccttagcctccctaggtgctgggagtgcggggattactggtgtgagccaccatgcctgtttaaagtttcctattcttgttactttcctcttgacatttgtttttagaactctgatgttggatgtgaatgtttgatgctttctggcatttgcttctgtaatggttcagtgagttttattttccgatctctttatgttttccctctctctctgaaacagtaaggctttttccgtctctttattcttttataatttgagtgtttactctgggtcaggtactgtgcttaactattgtatatgtattaactcaggataatccctacgagaatcctggaaggtaagtggcagtatctttgactgtgtaaacaaggaaactgaggctttgcctacttgagcaaggttttatggtttgcccccaaagctggtgcctcctataaaaataatagctaccactaatgacagtggttctcaaagtgtgggagactccaagggcctctgaagtcaaaactgttttcatattaatactaagatggtatttgttatttttcactgtggtggtggtgtttggattgtgtaaaactaatggttgataaaacttgtcagcatagtaacaccataatgaaatcatattcaaatcactccccccttgtagtttttttctttttgagccaattacacttaaaatgtcattgatgaagatgtgaagtccagggtttacaaaatattttttatcttcttagtattcagtgcgaggaaatagaaatgctcataaaacatttttattgtatactgaaatacgattgttctgaggaaaatcattttagttgagaactaagctagccacctctttcagggaacatcatttttaacttcaaagtactgacaaactggttacatacactaggatatttggcagatatttacttgaaagtgagcaaagaaaagaatccatagtctttgttgccaatcacatgtgagctttcaaatgaaaattagaattttggaaaatctgagcctgcctccatgaatttcacagcttcccagtacttaaaaaatttctgattaaataaatggtgatttaaaaaaaatttgttattattattattttttttgagatggaatttcactcgttgcccaggctggagtgcagtggcgtgatcttggctcactgcaagctctgcctcccgggttcaagcgattcttttgcctcagcctcccgagtagctgggattacaggcatctgccactacacccagctaattttttgtatttttagtagagacagggtttcaccatgttggccaggctggtctcaaactcctgaccttgtgattcgcgtgcctcagcctcccaaagtgctgggattacaggtgtcagccactgcatccggccaactcaatggcgatattaaaaaataattattttatactgcataatgaaatatatcaacgtgtcagtggtttttgtagctaagtgaaccaatcttttctaaataaccaatgcataatattacaaaattatgcagtggattaaagatttatttaaactctggggtgggtcagtggatttttgtgcaacagttcaaaaaggtcattgacgtatttgacattccacgttgctttaacatttaataagctaccacttgtttagttttggtgtagtgtcacagaagaatatccaccttatctgaaaagactatcagaatactcctttttcaactgcatatctgtgagaccagattttttcatattcttcagtcataagcacatagaacaagatatataaaaatatgaaacaaggccagtctttgcagtaaatttttctttttcttttttttgagatggggtctcactctgtggttcgggctggagtgcagtggtgcaatcttggctcactgcaacctccgcctcccaggttcaagcaattctcctgcctcagcttcccgagtagctgggattacaggcacctgccaccaccccgccccccccccccggctaatttttgtgtttttagtggagacggtgtttcaccatgttggccaggctgatctcgaactcctgaccttaggtgatccacttgtctcagcctcccagagtgctgggattacaggtgtgagccactgtgccttgcctaaatttttttttggaaaatttaataatgttacttgtgttaatataattggatttgtgattaacatgtgatggatttattttttaatgaattaataaatactttttaattaaaaatgatcagttctaattttgaacaccataaataatagaacctgcataaaccaaagaaggggcccaagaccaaacagtttgagaattggtaatttatggagtacttaccaccatttgctgggcactttcataaacgatttgttgtcaggattgttggaagactaacagatgagagaattgaggctcagagaaaataaagctgaaccaagatttatttattcttttattctttcaacacttgaactgcattttttatagttttctttgaaacaaaaaaagtacttctgaaatgaacctttctgcctgcatagaaatattacaagtatttaaggtattaaagaaatttgtcacagcatggtggttcacgcctgtaatcacagcactttgggaggccgaggtgggtggatcacttgaggtcaggagttcgagaccagcctagtcaacatgctgaaacctggtgtctactaaaaatacaaacattagctgggtgtggtggcaggtgcctgtaatcccagctactcgggaggctgaggcaggagaatcgcttgaacccaggaagcagagcttgcagtgagccgagattgtgccactacactccaacctgggagacagagcaagactctgtcgtaaaagaaaaaaaaaaaaaagagaactggaatggagttttgagggtcagagattagagttcctgataacagcttttgcttccttatcttcttagtgaggtttttgtttttttgttcttttaaatcctagacctcactctcataatcactgtaggattaccactaggagggtgttttttggcttcttttatttattttatttatttatttttttttgagacagagtcttgctctgttgcccaggctggagtgcagtggcaggatctgagcgcactgcaagctccgcctcctgggttcacaccattctcctgcctcggcctcccgagtagctgagactataggcgctcaccaccacacccggctaattttttgtatttttagtagagacagggtttcactgtgttagccaggatggtctcaatctcctaaccttgtgatctgcccaccttggcctcccaaagtgctgggattacaggcatgagccaccgcgcctggccttttttcttttttttttttttttatcctagacctcacccttataatcattgtaggattaccactgtgagggtaaaaccgtgcattgagttgacattatttaatgttaaaattgatttttttaaatgatgtggagcttttgggtctatttgtttattcgatgttgctacaagtttgttactgtgagtaattgaaacctgcctttagcaagggtaaagatgttcacttgagaaatgagtgttattttgaaactttgcaaattaaaactaaacaaaactcaattctttttcttggggaatgttcaaatatttcccataagcttctttgaaattaataagcattattaaaaagattcaaggaagtgaatgcatgctcaagtttgaccctataattcagaatgtttagttttgtaagtatcaattattcttaatttccattcttctagtatttgaaatacctgtggaatgaagagaaaaaaattaaagctaagccatcttgtccaatgtaattccagtagagctctgcgactctaaagcttagagctacatctatattttcaagcacatcaactttaagaagaaagttttgaggaaacaaagttttgatctacctttccttttaaatagatgaagaacttcctgattacattatggtgatggtggccaacaagaaaagtcaggaccaaatgacagaggatctgtccctgtttctagggaacaacacaattcgattcaccgtatggtatgtttctgaatttttgtgcctcagaccaaagtttggcacaagcctgagttgatattctgtccaaagagaggttcttgacacttgagttaggtttactttggagaggcagtttgtgagtgatgagagcacagcctctgtattagtccattttcacagtgctatgaagaaatacccgagactgggtaatttctaaaagaaagaggtttaattgactcagagttccacatggctggggaggccccaggaaggggaagcaagcaccttcttcacaagtcgacaggaaagagaagagtgaaggaggaacttccagagacttatataaaatcatcagatcttgtgagaactcactgtctcttgagaactcgggaactcactgtctcttgagaactcactatcatgagaacatcatgggggaaaccacccccatgacccagtcacctccctcccttgacaggtggggattacaattcaatataagatttgggtggggacacagagccaaaccttatcagcctctgaagccagacagccaaagttgaatcctggctgtgtcttgccttggtttctctagctataaaatggaaatagtacagccacttgctttataaaattattattgaggatcaaatgggctaatatgtgtaaagtacttataggtgtccctagcattttcctaaggaattcttagtatatgtcggctatacttaatatgtttcttttgtaaacttctatatctttttttttgagacagggtcttgctctgtcaccaggctggagcacagtggtacaatcatggctcgctgcagcctcgatctcctggtttcaagtgatcatcccattgcagtcccctccttcctgaactcccatgcctgactaatttttaaattttttgttcagacagggtcttagtatgttgccctggatgctcttgaactcctgggctcaagcagtcctcctgccttggccttcagaagtcttggggttataggtatgagccactgcacctggccagcttctgtatcttatagttccttttcccccaccaaaaccagttacagatgtttttttgaactgggttggcttcttacattgccttttacaatgagttacctttagagggcaaggttttctgtttctcacttttctgtttcttactttttaagctttttgttaaactcacaccttcattttgagtaataattgtagtgtaatgttacagcatattttgagattataagtttttttaagtttggaattttaaaataggcaactttgcttttatacataaattactgttatatgcctttagttgagaatactgactagaagagtaagattcaacttaagatgctaggtcctggtaccaggtttgaggtaaagtgaggatgagggctggaggataatgatgtagctgagaatagacagacgaaatactttattaggcttctcaggctaggaactaccagttaccgtgaaaggtgatgatgtagcagaagtgagcaagtggcctgccgaatttgagtgcaagaggaggcactgagtggggagatgagcctggttaagttcttgcctttataccaaaggtcgtcttcaaggtgtttttgcccaagtaggcaactgtatgcttatcaaccgtcttgaaattctgcacagaattctctgggtttatacattgcacaaatttgaagaacattgtatagtggtcatcagttgttatgatacactgctgcctcactgtgggtgacccaacccatttgttacaatttgtccccagaggttattccctcccagccccccacaaaaaaagactgtgggtcttttgactgggaaaattaccattattgtgagtactatttttttttctaaagcgaccgagtagatccttttctccgataacttgatagaatacttagatttttaaaacagactaccaaatgaatttaaaaccaaattaattcaacattctcatctggccataaattgagttctttaacatgtagtgaagcaaagggtgatgtccccattttggcactttgctttcttaagttagtgttcattaacaccagccccaaacagactattgtgattatttggagccttgaagtaattgtgtccgtggggacagtagcatgtgactagggttctcattgaaacatgaggtttctggcatattttgagaggtactgggaagggatgtaaggcaaagtacctcatttataactaccaaaacaggttatgttacaagcaagattacagccttacagcatcagttttgaaagtaatagagtgaaatgatatagcatagtttgagattataacttgttttaacctctcagaattaagttgtccaagacaccatctagtttaagcagttaatataagctgcttaaatggtggtaataataagcaatattacatgtttatgatacttgttttactgtaagctacagtaaatctttagtacttacaaacagggtgacatattttgtagactaagactggtcagatgatattctttcccatatttttgcagaggctagatgttgaaaacagtgaagaaaaaaatacaattttttattgacttctgtaggatttatacaaagcccttttttaaaaatgtgaagtttgaaagttcataccatttattcactaaatacagtttatcagtatttatctcagctaggtgcggtggctcacgcccgtaatctcaacactttgggaggctgaggcaggtggttctctcaagtccaggacttcaagaccagcctggacaacacagtgaaaccccatctctatttaaaaataataaaaatataaaaaaatttaaaaaattatctctgaatataatgtcataaatttagagtgacagttgaaatgaaatctttcttaacagaaggtttatttttgttttttgtttttttcctcaggcttcatggtgtattagataaacttcgctctgttacaactggtaagattcataacttttttttttaatttctgcttgctatggcatatgatttgtttctttctaaagtcatagtgctttgggaaaaacccatcaatttcaaaacggttcatttgaacttttttagaaagcacatacttttatgaacttaagagcagtaaatttaacataattcaaagataatttaagtgtgggagagggagcagtgcactttatccgaaggaaataattacatatatgtgcaaagatttagcctcaaggatatttcagtattttataattgaaaacaatttaaaagttcagtcataataaacgaaattgttgtattaccatgtgtggaataatatttaactattaaaaataatgttgtggaagaataacagaatatacacgcataagatacatgttttaaaaaatgtgtatatatgctcttcccccgaaaaatcacctttgagataattggtgatttttattatatttttaaaattttctacaataaacatactgcttttgaattggtgatgaggaaggaaacgacttaaagtaataaaaatagatggccgggcacggtggctcacgcctgtaatcccagcattttgggaggccaaggtgggcggatcatgggctcaggagatggagaccatcttggccaaccaacatggtgaatctccgtctctactaaaaatacaaaaattagccaggcatcgtggcacatgcctgtaatcccagctacttgggaggccggggcaggagaatcgcttgaaccagggatttggaggttgcagggagccgagaacgcgccactgccctccagcctggcgacagagcgagactccatctcaaaaataaataaataaataaaaataagaaataaaaatagattaaaaggactgtatttttcttttcagaaccctctagtctgaagtcttctgataccaacatctttgatagtaacgtgccttcaaacaagagcaatttcagtcggggagatgagaggaggcatgaagctgcagtgccaccacttgccattcctagcgcgagacctgaaaaaagagattccagagtttctacaagttcgcaggagtcaaaaaccacaaatgtcaggtaagagtctggtgtagacctgctgggggcagatggctctgtgtatgtgacatttatattagtttttatatctttcagtttgctgttctcagcaatttttagaaacaatgaagtgatcgtgagtagttttttgaataaaataatggataagatctaagtatgattatcttttatcacaaatttagtaaatcaaagttgaaagaaagtgcaatttcaaagcagttttgaatggaatatgtaaagggagtatcctcagttttttcattgaaatttttcaagtaaacattctttaaagatttggtgataattgccctaatttggctgtaatacattttgttgttcttttaaatagacagacttacgatgatggagctgcaacccgactaatgtcaacagtgaaacctttgagggagccagcacc

SEQ ID NO: 15069 - DNA, 593 bp, Homo sapiens
ctcctcccagcccccgcccgggggatccgaggtgcgcgcaccagcaaagtggcctcagccgctgcagagtccggtcttgttttcctagagccgcctttctcacatgcacgtttgctctttttctctcagagtgccattaaggggaaattacaagaattaggagcttatgttgatgaagaacttcctgattacattatggtgatggtggccaacaagaaaagtcaggaccaaatgacagaggatctgtccctgtttctagggaacaacacaattcgattcaccgtatggcttcatggtgtattagataaacttcgctctgttacaactgaaccctctagtctgaagtcttctgataccaacatctttgatagtaacgtgccttcaaacaagagcaatttcagtcggggagatgagaggaggcatgaagctgcagtgccaccacttgccattcctagcgcgagacctgaaaaaagagattccagagtttctacaagttcgcaggagtcaaaaaccacaaatgtcagacagacttacgatgatggagctgcaacccgactaatgtcaacagtgaaacctttgagggagccagcacc

SEQ ID NO: 15070 - DNA, 8464 bp, Homo sapiens
aggatgtagggccctacgtattagggcttcttagttgtagcgaagagcaattggtctggtacgtttagctttttcacatttagttttgaattctgactctagaaatgtacaaccccatcttttgaattacaggttttaagatgttatttgctcttaatacgtcttaaggtaacagccttgatcactgcttttactttcgatgaaataacttaatgagctgtgaagaaaaaattatcagattttaagggagagaattttatgaaaatgtctttgaggttcctgtcacctttatgagaatgtcttcaaagtttccatcaccacctctaccaatttttcttccaccggagccagtggacttaggttccataacaagctcctcttgttcactgaatgagctagacaatatttcccaccttttaaggaaaatatcagctgatatcaatgaaattaaaggaatgaaagcagctattttgacagtggaagcaaatctttttgatctaaatgttagagtgtccaagaatgaagcaaaaatttcatctttggaggttaaaatgaatgaatattcaacaacatatgaatgcaacagacagtttgaagatcaagaagaagatactgaatcacagtcaagaactactgatgtaaaaataatcggcttccttagaaacgttgagaaaggtaaactcttaatatatgatatgttctaggtacccatcctttgatctgtatctttccacgtatgttgactgtagctctgatgtggagggagcaagttacagagaacttgaatttttcatggacctttaatgacaaatttggattctgcttgatttagcttagcaatctagaattgatcagaattccatcctctttaatggagctctctaaaacgatgttttgaaaagacagatgaacctagagcaatgaagcaaaacttgaaatgtggaagtgtggtctttcatgtgtcttgtgaaattattttaaaatgtctcattctttcatcatgtactgttgatgtgaaggagacctgttgcagtatttggatggaaagagcattcttcctgtaacttttcacctcagttttccaagcttcccacaggaatgcaacttgacctaagtgtcatcttcgttacagttcctcagaatgtgtgtttttttatggtaataattctggaaggaattgacttttttgggacgcaccagtaaaatttcatataacttatgttttaaaggaaactaactgatacaatttcaaatcgagtataggttttaaaatttaaaaacaccttttaatgaaatgtggtgcttggtgggagatggcccacttaacatctttgcactgagtaagcaaagcctgtccttgtgaagccacctgtaatggatatacccaaaatcagcatgtgggcatcttagtaagatttcagtatttgcaaccctatcagttacatccctttgtacactgtagtgcagtaccttataatgagcaagtgagtgcctgatgtctgctaagcgctgtgggggctacagaaaagtgtgacattctcccatcctcaaggagcttaacatcaaatcgaggatggaaaaaaatcagttctttgtccctattttgtgcagtcagactgctgggcatattattgttaggaatagtgaacctaataggaattaatgttaggagcctattttagaagaaataagtagttgaacatcttttcttgtggaagaggcaaagaattattatcatgctttgctaacatagggtgtggattgtagagctgagtgtcttattgttttctttgcatgcatcgaagcccagagtttgtcttttaggaactcttgtttagatgatgagagtgttttgttttgctatttcgattatcttcaaaggtcatgagtgagtcgtgatggtaagagctcaggtgatggagggaggtgcttgccatgcttattgtgcagttggctgtgatgcgagctgctgggccacaaggtgccttttcctggattttccacccgtttgccacctttactttccccgcagaattcaaattcaggaaaactgatgtcctcatagagggagaaccaggagtgttttaaattggcatttgtggtttaaccctgagtacagccttttttgtcttacaggatatgtctttggtctataaatactattaaattgaattgttgaagctttaagttacttttaagacttcaagttaagaacccagaaggattgatttttgggaaccacatgctggtattgtctgtgttgtaagcttagtgaagttttaaaatttatattctaggaactcaacagaggcaattattatcccgactgcaaatcgacccagtaatggcagaaactctgcagatgagtcaaggttggtaatgtttcaagttgtactgtaatccagccatttcagttgccatttccatttcttacaccccatttaacgtatctcggatctcttagatcctgccctaagatgttatatttagatctgtgaaaatattttagggccaggagataagatctgcatttctttcatgttatatagtgttataattttttgcctcattggaaaactttgttcctttcacaccattccaagtgtgtccctagcactgtcggctgtcactctcctgctgtcaggagtgacctgcgtttctgatttaccctcccactctacccagcttttgtcattgccatgagtggcttttgtatcctgtttttcacctggttagccttatcctcttgtacttcattttggagtcttatcaccagggccacacctggaacttgttgttctagtgttctagagccactctagtttgcctgtctcctttcctctccccacagacacacatgccaggggctactccaggactggagctgacgccttcatttttattatctctgtcctcagtgcccagcccctgccagatgcatgttcaatgtcttaaaaatgactgcaggataaacacaggcaaccatgagagacccggaatcatctcagtccttctgtttcccctaagtctgtcttttgtgggaagctctggtccctagacccctctcagtcaggactccacagtcagtcactctgttccccgaccctcccccagctttccagctcagaaagtgtgcttttcctccctaagggtcagcctccaccagaggccagatcccactgggttggtgagccactggcatgtcacccactcctccaacttcattctctgcctcctgtcttctctctgtagaggtgttcagacattctctgcccgtgattttgctctctcatctcccagcagtccgtcctgcttcctccacaggagtatttgaaaaggttgacagccgagatctgtgtgtgggatccacttcatcagctcttgtgcatgttttctcttctgcctccttcagcttttcattgtacccatggtgcacgcagtttgaaatagcaagtagttctgtgaggcttatgaatgactgcagtccttagctcctatcacattttttattctaagatccctttgtttctgcatattctattaattttctaaaaacatactgattttgtgtacacaatactctttgttatttctctgtggtctgaaaggtggttttgacatttttcccctccctgcttcgtcttgttttctctaagtggtctgttttggctgtcttttatgctggaggttcccctctgatgtctggggatcctaggtggtcttacatttaagagtggagcactcagaaggtcactggtattctgggttcatgagttggggcatggggcactttgactttctgtttgaaactagaccctgtggtggaaagtgatttgtcctgcctgtctggtttgtgggcaccctgatgtcactgccttcaagactttcctctcaggctggtcagcttctccaaaacaaagtttttcaagtaatagcctggtagtcagagttctgcgagcttaagtggggaaagaaggctgggggaggcacctcaccattaattattatgtaatgtttatttaaccctcccccaaccattgtcagtccagtacttctttcatcatggctggtgtctcttggtccagggactctgttcttatcctctgaagagtctaaagctccactttctccaagggagaatgcatgcagtgggtaaagatttatcaggaaatctaattgcctttaaaaatttttaacagtgtaccttcaggtgattttgtcgtagcatctttctggcagagaccctaatgcttcatccataggcctctccgaagattatctacaggaaagcacatcaccagtcatcccaggtgtcttcagtgtagaggtcgggattggtgtggcaagcatcaaaaccaagaaaacagtggccaggtgcagtggctcacgcccataatcccagcacttggggaagccaaggcaggcagatcacttcaggtcaggagttccagaccagcctggccaacatggcgaaacccaatctctactaaaaaatacaaaaattagccaggcgtggtggtgcacatctgtaatcccagctactaaggaggctgaggcaggagccttgcttgaacccaggaggcggaggttgcagtgagctgagctcgcaccactgcactccagcctgggtgacagagcaagactgtctcaaacaaagaaaacagatacatggaattagagttgaagaagaactaactgcttcttggacacatctaatacacctcttttttgcctgccatttcttccatttcttcctaaggtccttttactgccagttcctgagcctttggagaatcttgtggtctgaattggattgcttcattattgccttagaattcagcttttacagatcccctgagttcttaatcatctgttttccactttgaaaatttctttttacacttattttctttgtgagtttatgctttcaaaacaaaaacaaaacccttattgacatttctgtgggctttcaggagggaacaaaaagtaaatgcatggggtcagcctgtggtctctactcagaagatgttacttactcccccgtctgtctggtctccatgtgacctgggctgctaacgttccgcttgcagagaggtgtgcgggagggaccggtgcacgctttcctcaaccctggagcatgttacacttgggttcccatactttctccaagctttgacctttcggcttccagttcactctgtctttattcttctcattccctttcattctcatgtgtcagcgcatctcctccattcctcctcaaaaggttagctttgctctctcccaccttcagcattattttcatctcttctgtgttcacccaacctatgaactggtagaactccttcgtctcagaaagtgcagagtggtgggaaggagtgaagcagcccctgggccactgttgggacccacctttgacagttgtgagacctcggtgaatcatttaataacttggagctgcaaacagtcatctgtaacatgggaggaaaccgactttgtaggctttgagtgaggattcagtgagagacggccaccctgaatatgttaaacacttctgtcaccttcggttttgactcagcatcttatttctgtccccccacctacaggtcaaatctgaattttctacttcctcttaaacatgggagagtcccacaaagactttaaatctaacatggaaatgtatctttgccccttttaactttgctctttttcttttgctaagtttctcatcccagctttctcttccgcctgtctccctttaccatctgtactgcccttgctggggaaggcgggcacgccccttcccaggatggagcatgtcttctcttcctgtcaggtgtgtgagaccaggacagacagcagagaatcttttcattcagagcctcaccctctgtcccgggcaacagcaggtcgagaactctggttcttccttaacactgtttttctaaaaaccagtttgatcaggccacttccttccttaggaacctctcttgatttcttttctcttttttttttttttggtttgagatggagtctccctctgtcactcgtgctggagtgcagtggcacaatcctgctcattgcagccttgacctcctgggcccaagcacttctcccacctcagcctcccaagtagctgggactgcgggcatgtgctcccacgcctggctaattttatttatttatttattttctggttgatgggaggtctcactatgttgcctaggccggtctcaaactcctgggcttatggaatccttgtgccttggcctcccagaatgttgggattacagacatgaaccgccacaccaggccacttgatttcttactaattatagaccagaatcgagagtcactgagacatagaagaacctttattatatgtgtcagccttccttggtatgtactgctgagcccaccacacacacccttccagccattccacattctaacctttctcagatgccttcggccttgtgaaagcccctttccttctacgtgcgttttcctctgcctgaagtgctgtgttcgtttctccgagtctctctccttgtttattcctgcttgttcctttactgctgacttcagatgttcctccttgctaagcttttcgttggttcttggctggagtgggctgttctgtattctcagcaccttgttcacatcccttttgggtcatgctattctgaaattgtatatgtgtctgtttttctttttttctttgtgtatctagctcagttctcttagttgttcagtaaatactcagtgaatgaacataaatgaataccctgtaaattttggtctctaagctttaaaagaagtgtattaacttcagtccgttgatggcgtattgataggtcagccattctgggttgtaggtcttggcatattttataaaatagtagatgatgtgagcttatggttatttgcattaaaggccagtgtttttcttgatacatatgtttaagtgtccattcacctttcagttaccttttaaagtagtcctcggtttataaccaactggaaattataccacttgaattctttttatcaggacatgattctaagtggtactgtgcgaagtgaacaaaccagattttggaaaagtggttcagcagtctgtgtattctaattatagggagcattaggactcaaattctccaggtttttagaaaagatttttgtactttaagggtatattgttaatatctgttgagatgcctcacctgagaacctttctctgctgtggttagggagtgttaatcagaatcacttgtgccgtgccctacgcgagaaggactccttgagttctttgaaaacatgtttggaatagaattatagccctgttttcctgagtggaaccagttgtgattttcctttgaaataatttgaatatataaaagattgacattcttctcacatatataatgttgggaatgtaaggtatattcaaaagtaaacatttgtggccaatttttttggctcagattactatgacatggaatccatggtccatgcagacacaagatcatttattctgaagaagccaaagctgtctgaggaagtagtagtggcaccaaaccaagagtcggggatgaagactgcagattcccttcgggtactttcaggacaccttatgcagacacggtagatggtttctttttcttgtgtagttaatttgtgtgattagatagtaaaggttaaccattcgtttgcagcttccctcctccccgccctaaccgctagcgtagagtgctttcattgattcagtagctagcccatgaatagttagccaaattcagttttcaagaattccagttcatctttcttgttcagaaatccattaacctacaaattacaactcagtgtatgatttaactctattaaagattcttttctttatgcaaattcaggaaatgcaagtttaaaagccagctgaccataatcaggtcagctctaaagagagttggcagatcaggtttgggtgatttttcccttagaaaattgactgtttctataaaagaagaaacatacagataattagcataaatgctgctggcccttgtgttctgagcattgatgctaattttttggtttgtttccatgttgaccctatgaagatcgaatgggtgatggggtcaggcttgaggggagattgtccttagtaagtacaggctggagggtcactggtgatgccactgtgactgttcatggccatcgtgtgttagcagagaacccaccagtgctgcacctggtagccctacctagtctttttttattgaaccaaacgcaaagccaagggagtgatagttctgctgaagagcactttagggggctcagcgttttgtgtttgtttccctaattctatggtattttttatctgtctggcagagatcttgtacaaccagataaacctgcaagtcccaagtttatagtgacgctggatggtgtccccagcccccca

SEQ ID NO: 15071 - DNA, 908 bp, Homo sapiens
aggatgtagggccctacgtattagggcttcttagttgtagcgaagagcaattggtctggtacgtttagctttttcacatttagttttgaattctgactctagaaatgtacaaccccatcttttgaattacaggttttaagatgttatttgctcttaatacgtcttaaggtaacagccttgatcactgcttttactttcgatgaaataacttaatgagctgtgaagaaaaaattatcagattttaagggagagaattttatgaaaatgtctttgaggttcctgtcacctttatgagaatgtcttcaaagtttccatcaccacctctaccaatttttcttccaccggagccagtggacttaggttccataacaagctcctcttgttcactgaatgagctagacaatatttcccaccttttaaggaaaatatcagctgatatcaatgaaattaaaggaatgaaagcagctattttgacagtggaagcaaatctttttgatctaaatgttagagtgtccaagaatgaagcaaaaatttcatctttggaggttaaaatgaatgaatattcaacaacatatgaatgcaacagacagtttgaagatcaagaagaagatactgaatcacagtcaagaactactgatgtaaaaataatcggcttccttagaaacgttgagaaagattactatgacatggaatccatggtccatgcagacacaagatcatttattctgaagaagccaaagctgtctgaggaagtagtagtggcaccaaaccaagagtcggggatgaagactgcagattcccttcgggtactttcaggacaccttatgcagacacgagatcttgtacaaccagataaacctgcaagtcccaagtttatagtgacgctggatggtgtccccagcccccca

SEQ ID NO: 15072 - DNA, 6188 bp, Homo sapiens
cgtgtgcgcggccgggggcggaacggaggaggaggcggtggtgtcccggctgcggggtaggagtccgcggcagcctccgggtaagccaagcgccgcgcagtgctgagttcccgcacgccgcagagccatggagatcggcaccgagatcagccgcaagatccggagtgccattaaggggaaattacaagaattaggagcttatgttgatgaagaacttcctgattacattatggtgatggtggccaacaagaaaagtcaggaccaaatgacagaggatctgtccctgtttctagggaacaacacaattcgattcaccgtatggcttcatggtgtattagataaacttcgctctgttacaactgaaccctctagtctgaagtcttctgataccaacatctttgatagtaacgtgccttcaaacaagagcaatttcagtcggggagatgagaggaggcatgaagctgcagtgccaccacttgccattcctagcgcgagacctgaaaaaagagattccagagtttctacaagttcgcaggagtcaaaaaccacaaatgtcagacagacttacgatgatggagctgcaacccgactaatgtcaacagtgaaacctttgagggagccagcaccctctgaagatgtgattgatattaagccagaaccagatgatctcattgacgaagacctcaactttgtgcaggagaatcccttatctcagaaaaaacctacagtgacacttacatatggttcttctcgcccttctattgaaatttatcgaccacctgcaagtagaaatgcagatagtggtgttcatttaaacaggttgcaatttcaacagcagcagaatagtattcatgctgccaagcagcttgatatgcagagtagttgggtatatgaaacaggacgtttgtgtgaaccagaggtgcttaacagcttagaagaaacgtatagtccgttctttagaaacaactcggagaaaatgagtatggagcaaagacagggtttcaccgtgttggccaggctggtcttgaaatcctggccctgtgatccacccaccttgatcttggctcactgcaacctgtgcttcccaggttcaagtgattcttctgattcagcctcctgaatagctgggattacaggctggagtgcagtggcatgatcttggctccctacatcctccacctcccgggttcaagatgaaaactttcggaagagaaagttgcctgtggtaagttcagttgttaaagtaaaaaaattcaatcatgatggagaagaggaggaagaagatgatgattacgggtctcgaacaggaagcatctccagcagtgtgtctgtgcctgcaaagcctgaaaggagaccttctcttccaccttctaaacaagctaacaagaatctgattttgaaggctatatctgaagctcaagaatccgtaacaaaaacaactaactactctacagttccacagaaacagacacttccagttgctcccagaactcgaacttctcaagaagaattgctagcagaagtggtccagggacaaagtaggacccccagaataagtccccccattaaagaagaggaaacaaaaggagattctgtagaaaaaaatcaaggaactcaacagaggcaattattatcccgactgcaaatcgacccagtaatggcagaaactctgcagatgagtcaagattactatgacatggaatccatggtccatgcagacacaagatcatttattctgaagaagccaaagctgtctgaggaagtagtagtggcaccaaaccaagagtcggggatgaagactgcagattcccttcgggtactttcaggacaccttatgcagacacgagatcttgtacaaccagataaacctgcaagtcccaagtttatagtgacgctggatggtgtccccagccccccaggatacatgtcagatcaagaggaggacatgtgctttgaaggaatgaaacccgtaaaccaaactgcagcctcaaacaagggactcagaggtctcctccacccacagcagttgcacttgctgagcaggcagcttgaggacccaaatggtagcttttctaacgctgagatgagtgaactgagtgtggcacagaaaccagaaaaacttttggagcgctgcaagtactggcctgcttgtaaaaatggggatgagtgtgcctaccatcaccccatctcaccctgcaaagccttccccaattgtaaatttgctgaaaaatgtttgtttgttcacccaaattgtaaatatgatgcaaagtgtactaaaccagattgtcccttcactcatgtgagtagaagaattccagtactgtctccaaaaccagttgcaccaccagcaccaccttccagtagtcagctctgccgttacttccctgcttgtaagaagatggaatgtcccttctatcatccaaaacattgtaggtttaacactcaatgtacaagaccggactgcacattctaccatcccaccattaatgtcccaccacgacatgccttgaaatggattcgacctcaaaccagcgaatagcacccagtcctgcctggcagaagatcatgcagtttggaagttttcatgtactgatgaaagatactctacagaacttgtcaaatctttgaaacttggaatatattgctttcataatatgaagttttattgcctatctatctgaagtgtctaatttttcaagtttgtaagtttattatgtggttttaacattgggtgtttttgttttgtttttactatgaaaagacagcttaaggaagagctaaattctgttaaaatatttggggcatgtttgtgcactgctgttgtgaggatcagcatatgaaattgacatcatggttagtcatggtactgcagcttagggggctacacggttgctgtgtgagtggagagatgcagtgaggcagttgtcattattctaaaaattgtactactttcacttttcccaaagattatataatgttcataatccaccatgaaaacagcattggccaaaggtactgaggctgcttaaaatattcaattctgctttttaatttttaagtgaatttagtttgaaaagcatgattatacaggcctctcaggctgagtgctactttggtaaagttcccagttttcctgccttctgtgacaggatgaatgaggtgggtatggacagtggaggcagctggaatggcaagtgcagaaaataggaacagttctatacagtgctctcatttactaataacataatgccttctaaataatttttttgggaaactacattatcacaaaattatacaaatttttttacaagtatttacatactgtatctgaaaacagactttaaagtcacaagattataaatgtacatatatattctcacattctgaaaaataacattctcagaatccacagaaaatatacttagttactactgaagataatttttgaaatgtaaaaattagatttaaatagtatattttaaatgacagaactataattacagagatcagatcagataggtaaactgcaagatagataggatgaaacttttggcctactgtattacttacagagtttttttgtgtgtggtttttaaaactgttaaggcaagaagtgtcaaatgctttagagttaaataacagatcactgatttcaaagacttggtgtatagtgttaaaaattaaagcttaaaaggtggttagaaaagtggattaatgcaaaaggggtaataaagactgcaacattctcaggaccaaattaaactgctaaaaaaaaaaaaaaagttcattgacttgcttagtcgtatactcaaatgatgataaacctacatgtgcaaaggctcacgtttaagattgtcaagccagcagtctactgttgtgttgccattgcttttccattgggagaagaaagaattaaccagtcattaaaccatttggtaagttgcactttgctgtgctgatcccacaggaaaggcttgaaacacgagaagcagcaaagacagagcacacaagtgcataaggctgttgtcttcggcttgggtgaaatgacagttcctcttcattctaaaggtttactccattgaatttaaggcatttgttcattccagtgttgagatgctttgcatctctgcagaagaaatttattttaaattgtttaaatatctggaaatacttttagctatcatttataaagatagttttgttctcagtttcactataaattatagaacaaatgggaaacaagggtttaatttagttcagccattttacaaggaaataataaaatactaaaatctgattgttttttgctatttaatagccactgcccagacacatatttaagagtttaatctttcagttgctatggcttatgaacaagctaaggttgaccataaaacatttgttggatgacgtggtttaaaatgatcaccacaaaaagggaccacaaaaaaaggaaggaaatgagcatggttggcgattggaagcaagggtaccagagggcacagtgtgctttggcatgcattttatacataaaatgaatggaacaaaaggtgccagaagtcccaggttacacaatcaggagcttagatactgcacacaaaaataattatctgggttaaaaaagtaaacatagggcagattctatatggcctatcatgtttcttcaccttcccctcgttgctggctgatacagcgaggtggtcagctgatgactacttagtcaatatgacctttagtcgtgaaactgacagcagcagtgattaaggctgacttaatcaggttggccactttgaaggacagaaatgcagtggaaacagttttattctatgtagtttacatgcttaaggttacagagtttctacctgcactgtaatggaaatataatttctctgtagccaaaagctggcaaacttgacccagagggaaaatttaaaactgcagcaggctcaaatgtagagtatttttctttttatgggcaggttgttcagggatttttttcctcctttaatttattgactgactgtaaatacatgagtagaaacttaatagtcatgtatttcaaaatttggcttaatttaggagaatccactgatgaacaagtaccaacttacgtttcaagcttcttagccccataatcagtccttcagccacagctatttagagctttaaaactaccaggttcaatcactggttatgctttctgtgatgtaatttagtcatttctatttttagtattaaccaagtattagacacagaaaataggtattaagaatcttcatatatcctgtcagaccaaatgggattccaggaacctaaagcgatctattatgctataaagataattaacacattaaaaactcatagggtcaatacagcatcttaaacctcacacttagaaaaatatatttttaaatagcagtctacataattttcaatcttcaggaaactacagataggctagacagcgaattcctgaatgatgagtagtgatctttggcagcatttaaagtgaaaagaaataaggatctaagaattcagccctaatccactaaaaaaaggaattctaactgacaagtttttacaaatggagttgggctcattcattttggaaataaacctatggagtggcacacatctaaacaaattttcccaatagaaaaaaggctataaaaattttattccaagagtgattaaattgtataatgttgtatatgtgaatttaacacttttgtttacatgttaaacaaatgtgtatatattagactacattaaatatgcaattctttcttccagttaaatactgttgctccctaaaacccttacattgtacaccattgggaatgattgttcatcatactacttttccattagtgaggctacagttatgttttaaatgtgcgattacagagatggcatctgaacataaactgatggctcgaaaatgaaaatggaaatgtagcagccatatactgctaactttggatctgttcctgaattcaaaactactaggagaaaagtgtcctttataaaaaaggaccttattaatgcctaaaaaacatcatattctctaggaaagcttgtgtctgtttccttagggaaaatgtttgccttttaaaaactgtgatcctttaggatgatcatgactttccctttccttatggaaatgcaagaataaaatatttcattaa

SEQ ID NO: 15073 - DNA, 685 bp, Homo sapiens; identical to SEQ ID NO: 173

SEQ ID NO: 15074 - DNA, 5482 bp, Homo sapiens; identical to SEQ ID NO: 185

SEQ ID NO: 15075 - DNA, 144 bp, Homo sapiens; identical to SEQ ID NO: 189

SEQ ID NO: 15076 - DNA, 338 bp, Homo sapiens; identical to SEQ ID NO: 215

SEQ ID NO: 15077 - DNA, 11951 bp, Homo sapiens; identical to SEQ ID NO: 221

SEQ ID NO: 15078 - DNA, 1521 bp, Homo sapiens; identical to SEQ ID NO: 229

SEQ ID NO: 15079 - DNA, 1172 bp, Homo sapiens; identical to SEQ ID NO: 237

SEQ ID NO: 15080 - DNA, 1111 bp, Homo sapiens; identical to SEQ ID NO: 248

SEQ ID NO: 15081 - DNA, 124 bp, Homo sapiens; identical to SEQ ID NO: 263

SEQ ID NO: 15082 - DNA, 3376 bp, Homo sapiens; identical to SEQ ID NO: 267

SEQ ID NO: 15083 - DNA, 264 bp, Homo sapiens; identical to SEQ ID NO: 271

SEQ ID NO: 15084 - DNA, 1167 bp, Homo sapiens; identical to SEQ ID NO: 279

SEQ ID NO: 15085 - DNA, 782 bp, Homo sapiens; identical to SEQ ID NO: 283

SEQ ID NO: 15086 - DNA, 1084 bp, Homo sapiens; identical to SEQ ID NO: 301

SEQ ID NO: 15087 - DNA, 1388 bp, Homo sapiens; identical to SEQ ID NO: 313

SEQ ID NO: 15088 - DNA, 154 bp, Homo sapiens; identical to SEQ ID NO: 317

SEQ ID NO: 15089 - DNA, 1133 bp, Homo sapiens; identical to SEQ ID NO: 321

SEQ ID NO: 15090 - DNA, 739 bp, Homo sapiens; identical to SEQ ID NO: 325

SEQ ID NO: 15091 - DNA, 2603 bp, Homo sapiens; identical to SEQ ID NO: 347

SEQ ID NO: 15092 - DNA, 383 bp, Homo sapiens; identical to SEQ ID NO: 363

SEQ ID NO: 15093 - DNA, 189 bp, Homo sapiens; identical to SEQ ID NO: 369

SEQ ID NO: 15094 - DNA, 189 bp, Homo sapiens; identical to SEQ ID NO: 369

SEQ ID NO: 15095 - DNA, 1209 bp, Homo sapiens; identical to SEQ ID NO: 377

SEQ ID NO: 15096 - DNA, 1092 bp, Homo sapiens; identical to SEQ ID NO: 381

SEQ ID NO: 15097 - DNA, 2638 bp, Homo sapiens; identical to SEQ ID NO: 399

SEQ ID NO: 15098 - DNA, 2638 bp, Homo sapiens; identical to SEQ ID NO: 399

SEQ ID NO: 15099 - DNA, 141 bp, Homo sapiens; identical to SEQ ID NO: 411

SEQ ID NO: 15100 - DNA, 4423 bp, Homo sapiens; identical to SEQ ID NO: 444

SEQ ID NO: 15101 - DNA, 109 bp, Homo sapiens; identical to SEQ ID NO: 452

SEQ ID NO: 15102 - DNA, 710 bp, Homo sapiens; identical to SEQ ID NO: 480

SEQ ID NO: 15103 - DNA, 6349 bp, Homo sapiens; identical to SEQ ID NO: 484

SEQ ID NO: 15104 - DNA, 679 bp, Homo sapiens; identical to SEQ ID NO: 488

SEQ ID NO: 15105 - DNA, 2022 bp, Homo sapiens; identical to SEQ ID NO: 492

SEQ ID NO: 15106 - DNA, 1049 bp, Homo sapiens; identical to SEQ ID NO: 521

SEQ ID NO: 15107 - DNA, 8116 bp, Homo sapiens; identical to SEQ ID NO: 530

SEQ ID NO: 15108 - DNA, 8113 bp, Homo sapiens; identical to SEQ ID NO: 531

SEQ ID NO: 15109 - DNA, 3467 bp, Homo sapiens; identical to SEQ ID NO: 538

SEQ ID NO: 15110 - DNA, 188 bp, Homo sapiens; identical to SEQ ID NO: 557

SEQ ID NO: 15111 - DNA, 3493 bp, Homo sapiens; identical to SEQ ID NO: 561

SEQ ID NO: 15112 - DNA, 1087 bp, Homo sapiens; identical to SEQ ID NO: 569

SEQ ID NO: 15113 - DNA, 106 bp, Homo sapiens; identical to SEQ ID NO: 568

SEQ ID NO: 15114 - DNA, 138 bp, Homo sapiens; identical to SEQ ID NO: 577

SEQ ID NO: 15115 - DNA, 346 bp, Homo sapiens; identical to SEQ ID NO: 581

SEQ ID NO: 15116 - DNA, 7190 bp, Homo sapiens; identical to SEQ ID NO: 589

SEQ ID NO: 15117 - DNA, 1379 bp, Homo sapiens; identical to SEQ ID NO: 597

SEQ ID NO: 15118 - DNA, 87 bp, Homo sapiens; identical to SEQ ID NO: 603

SEQ ID NO: 15119 - DNA, 845 bp, Homo sapiens; identical to SEQ ID NO: 607

SEQ ID NO: 15120 - DNA, 128 bp, Homo sapiens; identical to SEQ ID NO: 617

SEQ ID NO: 15121 - DNA, 200 bp, Homo sapiens; identical to SEQ ID NO: 631

SEQ ID NO: 15122 - DNA, 696 bp, Homo sapiens; identical to SEQ ID NO: 641

SEQ ID NO: 15123 - DNA, 1387 bp, Homo sapiens; identical to SEQ ID NO: 667

SEQ ID NO: 15124 - DNA, 152 bp, Homo sapiens; identical to SEQ ID NO: 711

SEQ ID NO: 15125 - DNA, 563 bp, Homo sapiens; identical to SEQ ID NO: 727

SEQ ID NO: 15126 - DNA, 688 bp, Homo sapiens; identical to SEQ ID NO: 733

SEQ ID NO: 15127 - DNA, 198 bp, Homo sapiens; identical to SEQ ID NO: 741

SEQ ID NO: 15128 - DNA, 2425 bp, Homo sapiens; identical to SEQ ID NO: 757

SEQ ID NO: 15129 - DNA, 88 bp, Homo sapiens; identical to SEQ ID NO: 764

SEQ ID NO: 15130 - DNA, 446 bp, Homo sapiens; identical to SEQ ID NO: 765

SEQ ID NO: 15131 - DNA, 202 bp, Homo sapiens; identical to SEQ ID NO: 769

SEQ ID NO: 15132 - DNA, 225 bp, Homo sapiens; identical to SEQ ID NO: 775

SEQ ID NO: 15133 - DNA, 3415 bp, Homo sapiens; identical to SEQ ID NO: 785

SEQ ID NO: 15134 - DNA, 607 bp, Homo sapiens; identical to SEQ ID NO: 786

SEQ ID NO: 15135 - DNA, 247 bp, Homo sapiens; identical to SEQ ID NO: 791

SEQ ID NO: 15136 - DNA, 985 bp, Homo sapiens; identical to SEQ ID NO: 815

SEQ ID NO: 15137 - DNA, 74 bp, Homo sapiens; identical to SEQ ID NO: 819

SEQ ID NO: 15138 - DNA, 114 bp, Homo sapiens; identical to SEQ ID NO: 823

SEQ ID NO: 15139 - DNA, 1803 bp, Homo sapiens; identical to SEQ ID NO: 827

SEQ ID NO: 15140 - DNA, 106 bp, Homo sapiens
gtatgcggcctaagtcccctcctttcctctgcggcccctcctgtgtcacggggctgcctccactcaggcctccagagccagccagccgtgcgtgtcctcccagcag

SEQ ID NO: 15141 - DNA, 248 bp, Homo sapiens; identical to SEQ ID NO: 838

SEQ ID NO: 15142 - DNA, 83 bp, Homo sapiens; identical to SEQ ID NO: 839

SEQ ID NO: 15143 - DNA, 123 bp, Homo sapiens; identical to SEQ ID NO: 853

SEQ ID NO: 15144 - DNA, 4172 bp, Homo sapiens; identical to SEQ ID NO: 887

SEQ ID NO: 15145 - DNA, 123 bp, Homo sapiens; identical to SEQ ID NO: 891

SEQ ID NO: 15146 - DNA, 588 bp, Homo sapiens; identical to SEQ ID NO: 895

SEQ ID NO: 15147 - DNA, 167 bp, Homo sapiens; identical to SEQ ID NO: 901

SEQ ID NO: 15148 - DNA, 2276 bp, Homo sapiens; identical to SEQ ID NO: 909

SEQ ID NO: 15149 - DNA, 84 bp, Homo sapiens; identical to SEQ ID NO: 913

SEQ ID NO: 15150 - DNA, 1322 bp, Homo sapiens; identical to SEQ ID NO: 929

SEQ ID NO: 15151 - DNA, 657 bp, Homo sapiens; identical to SEQ ID NO: 945

SEQ ID NO: 15152 - DNA, 1135 bp, Homo sapiens; identical to SEQ ID NO: 941

SEQ ID NO: 15153 - DNA, 340 bp, Homo sapiens; identical to SEQ ID NO: 959

SEQ ID NO: 15154 - DNA, 453 bp, Homo sapiens; identical to SEQ ID NO: 975

SEQ ID NO: 15155 - DNA, 1633 bp, Homo sapiens; identical to SEQ ID NO: 167

SEQ ID NO: 15156 - DNA, 3615 bp, Homo sapiens; identical to SEQ ID NO: 995

SEQ ID NO: 15157 - DNA, 348 bp, Homo sapiens; identical to SEQ ID NO: 1003

SEQ ID NO: 15158 - DNA, 1897 bp, Homo sapiens; identical to SEQ ID NO: 1015

SEQ ID NO: 15159 - DNA, 91 bp, Homo sapiens; identical to SEQ ID NO: 1019

SEQ ID NO: 15160 - DNA, 117 bp, Homo sapiens; identical to SEQ ID NO: 1035

SEQ ID NO: 15161 - DNA, 3620 bp, Homo sapiens; identical to SEQ ID NO: 1047

SEQ ID NO: 15162 - DNA, 571 bp, Homo sapiens; identical to SEQ ID NO: 1065

SEQ ID NO: 15163 - DNA, 192 bp, Homo sapiens; identical to SEQ ID NO: 1073

SEQ ID NO: 15164 - DNA, 597 bp, Homo sapiens; identical to SEQ ID NO: 1081

SEQ ID NO: 15165 - DNA, 74 bp, Homo sapiens; identical to SEQ ID NO: 1085

SEQ ID NO: 15166 - DNA, 1501 bp, Homo sapiens
gtaagtagttgaaaagcacttatgttgtagctctcaaattatgaaagaattttatttaaaaagtttaaaactggggactcggtttattttagaaactatggcagataagaagataaccttttattcatttaatctaagacacaggtaaacactaatgtcatagggattttgtagataaactctattgtaatgtaaaccttttacaatttttagagagcattgacacagtttatcacattgcatctatgagaagggtcagcttaattatcgagtctttgcagttagtccagcagcaagagctctgagtttcttgaatccttacttcatactggtccatagaagtagcaacactatcaagactccagtggcaaagagaattctgagtgtagcgaggggtgggcagtccccaaaattttaaggaagcttatagaatcttggcatttaaaaaataagtggtatgtaggataaatatatatatgctggtgacagttgagggagatcacctcctggaagaatcaggtattcatatgcagattattttatggcatttataaactgtgaaacaacctatatttatgtataaggtttattattaataattttcaaaataactacaggatttttatgattgttctttatgtgattactgaatacaaaaagatttcctgatactgtatatattcttgttgcagctatggattaatgggtttacttttgccaagaacactaattaattattttttggtctgtaatatatggcctgcatgatgttcattgtttattcatgtttattggccggcatggtggttcacacctataatctcagcactttgggaggctgaggcgggaggatcccttaagcccatggttcaagaccagcctgagcaacatagtgagactctgtttttacaaaatattttttaaaattacccgggtatagtggcatgtgcctgtagtcccagctaactcaggaggctgaggtgggaagattgtttgagcctgggaggtcgaggctgcagtgaaccatgattgtatacttgctgtgttgcccaggccactgtataccagcctgggcaacagagcaagaccttgtcttaaaaacaaaacaaaacaaaacaaaaggtttatggagataggaccaatatccagaatctagttcaagaagccagaataggctacagtggagttggagaatgggagataagagagcagggatcaaaagaagacatgaaaagaatcaccaggaaaaagataatggaggagaacttagaaaaagtgaaataagacaagtaacattcaacatacagtacttagggctatagaggaattataggtgtggggaagagaaaggaagtaagcgggaaaaataacatgttttggcagcttcaaatttaagtgggttgattacagagatattttaaaacattgttagccactttggtaggtattgccatttttttcagatattgataagtaaaatactatttttatattttaatag

SEQ ID NO: 15167 - DNA, 261 bp, Homo sapiens; identical to SEQ ID NO: 177

SEQ ID NO: 15168 - DNA, 245 bp, Homo sapiens; identical to SEQ ID NO: 193

SEQ ID NO: 15169 - DNA, 605 bp, Homo sapiens; identical to SEQ ID NO: 199

SEQ ID NO: 15170 - DNA, 670 bp, Homo sapiens; identical to SEQ ID NO: 200

SEQ ID NO: 15171 - DNA, 735 bp, Homo sapiens; identical to SEQ ID NO: 201

SEQ ID NO: 15172 - DNA, 4635 bp, Homo sapiens; identical to SEQ ID NO: 207

SEQ ID NO: 15173 - DNA, 519 bp, Homo sapiens; identical to SEQ ID NO: 211

SEQ ID NO: 15174 - DNA, 614 bp, Homo sapiens; identical to SEQ ID NO: 225

SEQ ID NO: 15175 - DNA, 2406 bp, Homo sapiens; identical to SEQ ID NO: 238

SEQ ID NO: 15176 - DNA, 188 bp, Homo sapiens; identical to SEQ ID NO: 242

SEQ ID NO: 15177 - DNA, 2969 bp, Homo sapiens; identical to SEQ ID NO: 255

SEQ ID NO: 15178 - DNA, 2969 bp, Homo sapiens; identical to SEQ ID NO: 255

SEQ ID NO: 15179 - DNA, 1567 bp, Homo sapiens; identical to SEQ ID NO: 259

SEQ ID NO: 15180 - DNA, 1601 bp, Homo sapiens; identical to SEQ ID NO: 275

SEQ ID NO: 15181 - DNA, 1104 bp, Homo sapiens; identical to SEQ ID NO: 287

SEQ ID NO: 15182 - DNA, 8612 bp, Homo sapiens; identical to SEQ ID NO: 309

SEQ ID NO: 15183 - DNA, 1613 bp, Homo sapiens; identical to SEQ ID NO: 329

SEQ ID NO: 15184 - DNA, 1574 bp, Homo sapiens; identical to SEQ ID NO: 333

SEQ ID NO: 15185 - DNA, 371 bp, Homo sapiens; identical to SEQ ID NO: 337

SEQ ID NO: 15186 - DNA, 196 bp, Homo sapiens; identical to SEQ ID NO: 341

SEQ ID NO: 15187 - DNA, 2161 bp, Homo sapiens; identical to SEQ ID NO: 358

SEQ ID NO: 15188 - DNA, 2060 bp, Homo sapiens; identical to SEQ ID NO: 359

SEQ ID NO: 15189 - DNA, 645 bp, Homo sapiens; identical to SEQ ID NO: 385

SEQ ID NO: 15190 - DNA, 56 bp, Homo sapiens; identical to SEQ ID NO: 389

SEQ ID NO: 15191 - DNA, 9704 bp, Homo sapiens; identical to SEQ ID NO: 393

SEQ ID NO: 15192 - DNA, 4299 bp, Homo sapiens; identical to SEQ ID NO: 407

SEQ ID NO: 15193 - DNA, 20407 bp, Homo sapiens; identical to SEQ ID NO: 415

SEQ ID NO: 15194 - DNA, 178 bp, Homo sapiens; identical to SEQ ID NO: 423

SEQ ID NO: 15195 - DNA, 234 bp, Homo sapiens; identical to SEQ ID NO: 424

SEQ ID NO: 15196 - DNA, 82 bp, Homo sapiens; identical to SEQ ID NO: 428

SEQ ID NO: 15197 - DNA, 3080 bp, Homo sapiens; identical to SEQ ID NO: 432

SEQ ID NO: 15198 - DNA, 1928 bp, Homo sapiens; identical to SEQ ID NO: 436

SEQ ID NO: 15199 - DNA, 1059 bp, Homo sapiens; identical to SEQ ID NO: 448

SEQ ID NO: 15200 - DNA, 196 bp, Homo sapiens; identical to SEQ ID NO: 464

SEQ ID NO: 15201 - DNA, 445 bp, Homo sapiens; identical to SEQ ID NO: 472

SEQ ID NO: 15202 - DNA, 246 bp, Homo sapiens; identical to SEQ ID NO: 476

SEQ ID NO: 15203 - DNA, 277 bp, Homo sapiens; identical to SEQ ID NO: 496

SEQ ID NO: 15204 - DNA, 152 bp, Homo sapiens; identical to SEQ ID NO: 502

SEQ ID NO: 15205 - DNA, 514 bp, Homo sapiens; identical to SEQ ID NO: 517

SEQ ID NO: 15206 - DNA, 286 bp, Homo sapiens; identical to SEQ ID NO: 516

SEQ ID NO: 15207 - DNA, 458 bp, Homo sapiens; identical to SEQ ID NO: 525

SEQ ID NO: 15208 - DNA, 501 bp, Homo sapiens; identical to SEQ ID NO: 539

SEQ ID NO: 15209 - DNA, 343 bp, Homo sapiens; identical to SEQ ID NO: 543

SEQ ID NO: 15210 - DNA, 5035 bp, Homo sapiens; identical to SEQ ID NO: 553

SEQ ID NO: 15211 - DNA, 1752 bp, Homo sapiens; identical to SEQ ID NO: 573

SEQ ID NO: 15212 - DNA, 1323 bp, Homo sapiens; identical to SEQ ID NO: 585

SEQ ID NO: 15213 - DNA, 2648 bp, Homo sapiens; identical to SEQ ID NO: 593

SEQ ID NO: 15214 - DNA, 94 bp, Homo sapiens; identical to SEQ ID NO: 611

SEQ ID NO: 15215 - DNA, 73 bp, Homo sapiens; identical to SEQ ID NO: 621

SEQ ID NO: 15216 - DNA, 621 bp, Homo sapiens; identical to SEQ ID NO: 626

SEQ ID NO: 15217 - DNA, 605 bp, Homo sapiens; identical to SEQ ID NO: 627

SEQ ID NO: 15218 - DNA, 785 bp, Homo sapiens; identical to SEQ ID NO: 635

SEQ ID NO: 15219 - DNA, 1604 bp, Homo sapiens; identical to SEQ ID NO: 647

SEQ ID NO: 15220 - DNA, 1180 bp, Homo sapiens; identical to SEQ ID NO: 651

SEQ ID NO: 15221 - DNA, 877 bp, Homo sapiens; identical to SEQ ID NO: 659

SEQ ID NO: 15222 - DNA, 635 bp, Homo sapiens; identical to SEQ ID NO: 663

SEQ ID NO: 15223 - DNA, 113 bp, Homo sapiens; identical to SEQ ID NO: 675

SEQ ID NO: 15224 - DNA, 1642 bp, Homo sapiens; identical to SEQ ID NO: 683

SEQ ID NO: 15225 - DNA, 5173 bp, Homo sapiens; identical to SEQ ID NO: 689

SEQ ID NO: 15226 - DNA, 325 bp, Homo sapiens; identical to SEQ ID NO: 703

SEQ ID NO: 15227 - DNA, 193 bp, Homo sapiens; identical to SEQ ID NO: 707

SEQ ID NO: 15228 - DNA, 505 bp, Homo sapiens; identical to SEQ ID NO: 715

SEQ ID NO: 15229 - DNA, 98 bp, Homo sapiens; identical to SEQ ID NO: 719

SEQ ID NO: 15230 - DNA, 1897 bp, Homo sapiens; identical to SEQ ID NO: 723

SEQ ID NO: 15231 - DNA, 300 bp, Homo sapiens; identical to SEQ ID NO: 737

SEQ ID NO: 15232 - DNA, 90 bp, Homo sapiens; identical to SEQ ID NO: 745

SEQ ID NO: 15233 - DNA, 1094 bp, Homo sapiens; identical to SEQ ID NO: 749

SEQ ID NO: 15234 - DNA, 588 bp, Homo sapiens; identical to SEQ ID NO: 753

SEQ ID NO: 15235 - DNA, 87 bp, Homo sapiens; identical to SEQ ID NO: 787

SEQ ID NO: 15236 - DNA, 1254 bp, Homo sapiens; identical to SEQ ID NO: 803

SEQ ID NO: 15237 - DNA, 257 bp, Homo sapiens; identical to SEQ ID NO: 807

SEQ ID NO: 15238 - DNA, 3694 bp, Homo sapiens; identical to SEQ ID NO: 811

SEQ ID NO: 15239 - DNA, 108 bp, Homo sapiens; identical to SEQ ID NO: 831

SEQ ID NO: 15240 - DNA, 2500 bp, Homo sapiens
gtgagcaggtagggaagtaggtagctggacggggacccaggctccagagttgtgtctcagccagcgttccctagagtggtggaattcaaatactcttgctcatgtgctccctaaaagaatggaaaaactgttctcttgcacatgttcaagctgacacctaaaagttttcaccatatataaaaattgttgcaaaggatgtattttttggcatatggtaaaatctgacattttaaaatacaataattttaccatcactgataagtgtttggaaactcaactttaggcaaagcaggtccttttgttataacattgatgaaaacaaaaatatgttttgttaataagttgtttcacttcaagtcacagttatttaaggtgttaagtgagcacttaccgtaaatctgttgaatcttgttaaatattccagtggactctaaatactatagaggataagatctatcatttatttgaagaaatacaatgaacaagcttttttttaatcattagaaattttacattgttctttctttatctgaactcatatttctattctatttccccactggttttaatcctaatacatatttatggttgaaagtttggctaggcggggtggctcattcgtgtaaccccagcactttgggaggcccaggtggaaggactgcttgagcccagggatttgagaccagcctgggcaacatagcgaaagcccgtctctactaaaaatacaaaaaattagctgggcatggtggtgtatgcttgtagtcctagctactcaagaggctgaggtgggaggatcacctgagcccaggaagtcgaggctgtggtgagctgtgattgcgccactgaactcctgggtggaaaaaaagaaaagttttatcggtagccttactgtgcttctctgcctttgcctgtgtataaaaataaaaatttttggtaaattttcagtgcacttaaggctctaaatattaaaatatttcttttggatttagttatattatagctactgttaacacacaattgaccagacaattgtgtttatggtgaagagaaaacataaatacagcaaaattttgatacttagaaaaattaaagatatgaaatcttgccacaaaaataaaaaatttaaaatataaaatttatggaaaatgtatatcttaatgagatggatggtgctgttttttcttttcagttagtttatatatccatatatccataactgaatattacttacttcttttttttttttgagatggagttttgctcttgttgcccaggctggagggcaatggttcaatctcagctcaccgcaacctccacctcctgggttcaagcgattctcctgcctcagcctcccaagtagctgggattacaggcatgcgccaccccgcccgcctaattttttgtgtgtgttttcagtagagacgcggtttctccatgttggtcaggctggtctggaactcacaacctcaggtgatccacccgccttggcctccaaaagtgctgggattacaggcgtgagccaccgcacccggcctacttatttcttgaatgaacaattcagcattaattctattctgacttatttttctaaatagtactaaaaaatcttgtatctatgagtgagtagctgagaatggaaagaattgtgttatagtgtcactcatttatttgagtgctttctgagttattttttaaaaatcacagagcgctgtcatcaaacattgtatttaattctcaatcagcgaatgatgtgctcaggtccaccttctcttttggtgagaggcaggagctggacgccacctgatttacaaagggtttgctctcccgtccttacagaccattagatccagtgttcaaatcatccctttgtttcatatcccagaggtttttttttttccaagacgtagtctcactctatcacccaggctggagtgcagtggtgcaatctcggctcactgcaacctctgcctcccaggttcaagtgattctcctgcctcagtctcctgagtagctgggattacaggtgcccaccaccacacccggctaatttttgtatttttagtagagatagggtttcaccatgttgaccaggctggtcttgaactcctgacctcaagtgatccacctcccttgacctcccaaagggctgggattacagcgtgagccaccacgcccggcccggccatcccagaggttttttttaccttagggtgatgcacactgataggatttggggtgagtttctaatgtgccctttgtgtgttgggaagttgggaagggaggatcgtcttgacaccttgaccgcaggcacatgtccaggcagcccaggtctaggaagcagcactcgcgatggattctcacccagccttctgcccgtgcccctgtagcaaggccgccaggtgggagagtccggctttgaaccctgctgcttgaggaacaggggagttgtggcacgcctgccgctctcgtgtttgagttcaaactccttttctgcccccag

SEQ ID NO: 15241 - DNA, 289 bp, Homo sapiens
gtaagctactgtgctgtatgtttctagtagccacagaataccttttaggcgacataaaaatcctcattttcgtgtggttttgttgagggggttctggctgatagcatatgtccagttcctctttggtcctaaccaaagggaagtgtacttttagggggaggggagagaaattccaaaaactttcagaaggtactgaagacatggaatttctgagggccagtttttccagtgctttctgtgagaatacttcattatttgctgatgacgcacttttccttgacctctgtag

SEQ ID NO: 15242 - DNA, 125 bp, Homo sapiens; identical to SEQ ID NO: 857

SEQ ID NO: 15243 - DNA, 3189 bp, Homo sapiens; identical to SEQ ID NO: 861

SEQ ID NO: 15244 - DNA, 228 bp, Homo sapiens; identical to SEQ ID NO: 870

SEQ ID NO: 15245 - DNA, 184 bp, Homo sapiens; identical to SEQ ID NO: 871

SEQ ID NO: 15246 - DNA, 224 bp, Homo sapiens; identical to SEQ ID NO: 879

SEQ ID NO: 15247 - DNA, 5714 bp, Homo sapiens; identical to SEQ ID NO: 883

SEQ ID NO: 15248 - DNA, 2051 bp, Homo sapiens; identical to SEQ ID NO: 905

SEQ ID NO: 15249 - DNA, 400 bp, Homo sapiens; identical to SEQ ID NO: 921

SEQ ID NO: 15250 - DNA, 1508 bp, Homo sapiens; identical to SEQ ID NO: 933

SEQ ID NO: 15251 - DNA, 174 bp, Homo sapiens; identical to SEQ ID NO: 937

SEQ ID NO: 15252 - DNA, 1019 bp, Homo sapiens; identical to SEQ ID NO: 951

SEQ ID NO: 15253 - DNA, 1372 bp, Homo sapiens; identical to SEQ ID NO: 963

SEQ ID NO: 15254 - DNA, 531 bp, Homo sapiens; identical to SEQ ID NO: 967

SEQ ID NO: 15255 - DNA, 130 bp, Homo sapiens; identical to SEQ ID NO: 971

SEQ ID NO: 15256 - DNA, 134 bp, Homo sapiens; identical to SEQ ID NO: 979

SEQ ID NO: 15257 - DNA, 1569 bp, Homo sapiens; identical to SEQ ID NO: 987

SEQ ID NO: 15258 - DNA, 123 bp, Homo sapiens; identical to SEQ ID NO: 991

SEQ ID NO: 15259 - DNA, 2192 bp, Homo sapiens; identical to SEQ ID NO: 999

SEQ ID NO: 15260 - DNA, 2777 bp, Homo sapiens; identical to SEQ ID NO: 1007

SEQ ID NO: 15261 - DNA, 2186 bp, Homo sapiens; identical to SEQ ID NO: 1011

SEQ ID NO: 15262 - DNA, 2708 bp, Homo sapiens; identical to SEQ ID NO: 1023

SEQ ID NO: 15263 - DNA, 1047 bp, Homo sapiens; identical to SEQ ID NO: 1027

SEQ ID NO: 15264 - DNA, 5897 bp, Homo sapiens; identical to SEQ ID NO: 1031

SEQ ID NO: 15265 - DNA, 1672 bp, Homo sapiens; identical to SEQ ID NO: 1043

SEQ ID NO: 15266 - DNA, 1532 bp, Homo sapiens; identical to SEQ ID NO: 1051

SEQ ID NO: 15267 - DNA, 159 bp, Homo sapiens; identical to SEQ ID NO: 1057

SEQ ID NO: 15268 - DNA, 1580 bp, Homo sapiens; identical to SEQ ID NO: 1061

SEQ ID NO: 15269 - DNA, 996 bp, Homo sapiens; identical to SEQ ID NO: 1069

SEQ ID NO: 15270 - DNA, 844 bp, Homo sapiens; identical to SEQ ID NO: 1077

SEQ ID NO: 15271 - DNA, 377 bp, Homo sapiens; identical to SEQ ID NO: 1089

SEQ ID NO: 15272 - DNA, 1872 bp, Homo sapiens; identical to SEQ ID NO: 1097

SEQ ID NO: 15273 - DNA, 1841 bp, Homo sapiens; identical to SEQ ID NO: 1098

SEQ ID NO: 15274 - DNA, 1803 bp, Homo sapiens; identical to SEQ ID NO: 827

SEQ ID NO: 15275 - DNA, 1633 bp, Homo sapiens; identical to SEQ ID NO: 167

SEQ ID NO: 15276 - DNA, 196 bp, Homo sapiens; identical to SEQ ID NO: 464

SEQ ID NO: 15277 - DNA, 2276 bp, Homo sapiens; identical to SEQ ID NO: 909

SEQ ID NO: 15278 - DNA, 123 bp, Homo sapiens; identical to SEQ ID NO: 891

SEQ ID NO: 15279 - DNA, 588 bp, Homo sapiens; identical to SEQ ID NO: 895

SEQ ID NO: 15280 - DNA, 5173 bp, Homo sapiens; identical to SEQ ID NO: 689

SEQ ID NO: 15281 - DNA, 1047 bp, Homo sapiens; identical to SEQ ID NO: 1027

SEQ ID NO: 15282 - DNA, 264 bp, Homo sapiens; identical to SEQ ID NO: 271

SEQ ID NO: 15283 - DNA, 1532 bp, Homo sapiens; identical to SEQ ID NO: 1051

SEQ ID NO: 15284 - DNA, 346 bp, Homo sapiens; identical to SEQ ID NO: 581

SEQ ID NO: 15285 - DNA, 20407 bp, Homo sapiens; identical to SEQ ID NO: 415

SEQ ID NO: 15286 - DNA, 196 bp, Homo sapiens; identical to SEQ ID NO: 341

SEQ ID NO: 15287 - DNA, 621 bp, Homo sapiens; identical to SEQ ID NO: 626

SEQ ID NO: 15288 - DNA, 82823 bp, Homo sapiens
acagatcccagctgggtcacccgcactgagtcaacagactgagcgcgtccaggcctgacagctctgcggctcgggccctgaggtgaggcgggcgtcgcgggcggcggcggcgcttgaggctagcctgggacagccgtccctgggggagttgaggggacgaggaggggctggccagcgagggacggcggggagagaaggggagttcggcgtctgaggtgtggggtgaagcgggctcggaagcgggcagaggcggcgagctgagggaaacagacctccctcagctcccgggaagcgcgggttgccagcctcggggatgcggtgggagcgcccaggatgcggacgtgagggggtcggggccctgcggcgggggctccgcgaggctcccctgggaccgggtccggccgtgggacttcgggacactgcctttgcctggacgctgtcgttccaccctcagcaacctcagggaaagaaggaaaacaaatattgatgtaaatttccgtctgaacagctgggtaatgagcgcttgctcttccctgcgaggttacgcgcggatcattaccttgcgtgttaaaaggagtttcagtgagaagaaaatgcgcagatctcatgacacagtttgggagggaaattccctgatcctaaaacacgaataggagctccaggcatggaaatacttaattggatcggaaagctgggcaggctggagctattaagctgaaggaggttttcccctgggctcctcaggcttcgatttacgttttaaataaataagtccgaaaataatgaagataataaccacgtttactttctacaagggcgttctgaaggaatctaagggaagaggagtatttgctggactacagctttaagccaggctcggtattagctcttttcattctgacagcaaccctgtaggattggagggggttattccagttgggcaggtgtggagaatgggcctcaaagaggttaagtaacttattaaggtctcagctagtaaaaggatggagttgagattccaacccgggctgccagaccctaattctggtgctttatttagtatattttgtgtttgccgggagagcaatattgtatgtgttttagggaagactccatagtagggaacattattagggcagttagggctttgtgggtatttgtgttaaaatcaaactaaagaggcgttaatctttgcatatgtgctgtttgagtatatttcctttcaaacagatttagtgtagggaaatcttacattcactataagagcaaatttattagtacattccatgtgtattgcatgtcttttatttttaaagagacagcgtctcgggctagagtgcagtggtgcgatcaaagttcactgcagccttgaacgtctggactctagggaccctgctgaatagctggggctacaggcgtgtgtcactgcgcccaggtaattttttatttgtttttcagagacgaagtcttgctatattgcccaggctggtttgttgcatgtcttttacattccagataccatactatgtgccaagagtaccgatatgaatacaatttataatctctgtccttgagtttagttgagagggtgattgcataaaagaattttatgatattgtactaagtcataacttttctagtatgtaaattagttggattaaaaatagttttaagggcaagcttttaaggacctattatgcataagaaaatttattggatgacttgtcctctgtgtaccattgcattgttattttctccctcagcaagaaacactgtgataaaatttaggttaaattatattgacaactagcatttttttttttttgagacagggtctcattctgtcacccaggatgaagtgcagtggcaggatcttggctcactgcagccttgacttcgcaggctcaagtgatcctcccacctcagcctcccaagtagctgggaccacagttgtgtgcccctacgcctggctatttttttttttttttttttggtagagacagtgtctctctatgttgcccaggttgatcttgaactcttgggctcaagccttcctcccactgggattgccacgtgagccactgcacctgactgcattttgttttattattgcaccaccttacagtaaattttaaagcaataaagaagatgagagcatttataatttatccctttttaagctaaaaggcatattttgtagtgcttttatttcattgattgagaagcaaatgatgtagctaggcaggagtttgtttcatgtgccagatatgttcctaatttctcattccaaaaatatcttagtttaaaagtgtagctaataccagattgcatttaatttcttgtgtttcagagttgtaatgaaatcagtcttcagtttaggctgaaatggcacattgttgaaatgtataacattactttgtggtggattttggaaatctcttttaattgcttcagttttctcagtaaagtaggattcaaggtcataatctgagggtgatcctacagatggaagctttggagatttggggattgggaaagtgatggactagtggaatatgtgattgctaggaaattaaacatgactcacagttgtgaaaagtacagtagaggaaagatatgagtgcacaaattagggtgtctaattttggataccagaaacttcataatccattcccaatgcctgcctttaccgtgttatctagaacatacatctgcaccccttgctccggttcactttgccttatgcctctgccatatggcaggtatccctgttcttcacaaaagtcaagcccttttgtttgggagtctagctttaccattcttttctttctgcctggaaattccattccactcctttccaggctctttctctcttatcacattatattaaattttatctctctgcaaagttagtgacagtgtctaactttattttttttgcctcataatgttggatgcataaatccttcagtaaatgttaagtgaatatgccacttttctcacttcccctcttcttcctttttacaggagttgaccaacgttttttgtaaagtgccagatagtaaatattttaggtttgcagacagtatggtctctgtctcaataactttactgttgtagcacaaaagcagtcatagataatacataaatgaatgagcatggctgtgttccaataacactgtatttatagacactgaaatttgaatttcatataatttttgcatgtcacaagatattattattatttttcaaccttttaaaaatgcagaagcagtgttcctcatgggctgtgccaaacagactgagggttggatttagcccccacctctttcatcatagtttgcacatccttgatctttaaggactctcaggaagccttgataaaggaatctgtggtaagatgatactgggtttaatatttccattggtggtggagaaacaaagataaataagactgttgtttttttcatcaaggatctcatggtcaagttcaagatgaaaatatataaataaataatggtgacagggtatagttactgcagttacagttatgtttactgggtatagaggtaaaacaaaggagtgataatcagctccatgtcaatgttaataatgacatttaggcaatatgattaaaaattgagtttatttgagcataaaacttgaggatggtcacacaggaggacacagactcctgaaggatgaggtaaatgctccaaagtggagaggtttgagggtcctttacataggcaaggcctggggatgcttaacagggttacatcatttttcgtacgaggttagtgcatagttagagcaattcaattagttataggcagtgtttctttttgggggaagggtatatttaacatttcacattaaggatgtaatggtcaaagggtcttttatcacagtcagcggtcttttatccctggcatcatctggtgtgatctaggaacaagaaaataaggaaggaatttcatgtataacaaaaggtcagtaattaagaggtcaagcttcatgacccagtctccaaagtcaaccttcagtgccgaacaacgtttagaagccccaagtagacagactatccattttctgttacatctgcttaggtggatgagaagtaacctctaacagtcatttgttggaggtagggaatgtattttcagctagcctttctggaaatcttttaaggatgctaagaaggtgaccacgtttcttatcaggatggctctaaacatcaggatgactcaacttatttattttatagggtataatcttaatttgtttctcacagaaataaacatggatatgtttttaatcaggtctctatgaaaataatttaaaaaatttaaagttattttacctgctacataataaatggattgtttattccacaggtatttagtacctcctctgctgtgcagtgagttgttttactagctgaaaatatttgaaggagataatggtatcattagataagtgatggattttgcgggggaggtgggggaagagagaggctcttctaaggaaagcactgcttttaacaaaggcagtaggtataatagtagaactaccttagattttaaaaaatactttatagctttcaaatttcttattttaattaattaaattcatgcatcctaaataatttttctctaacaattatttctaaaggttatgtacatttttattacttttagtgatgtggaatatgtttcgtaggacttggaacgtagtaaccagcacttttttttttttttttttttttttgagacggaatcttgctctgttgccaggctggattggcacagtgtcagctgactgcaactttcacctcccgggttcgagtgattctcctgcctcagcctcctgagtagctgggattacaggtgcccgccaccacacccagctaatttttgtatttttagtagagacagggtttcaccatgttggccgggatagtttctgtctcctgacctcgtgatcttcccgcctcagcctcccaaagtgctgggattacaggcgtgaaccactgtgcctggccgtagtaaccagtactttaagataaattaagaagtgaatttttgatattgaactttggattatgcaactcctggtctttaagtcaattaatacattagaaaaggaagatgggctttagtaggctttccattttcttgcaacttattggatttagtataaattattttatctagtaaattatttatctaggaaagttaaatttgattaaatctttagagatgttaggtgtttaaaactcacctaattattatttaaagccctacaacaaacttagcacatttctcaggtatgctgtggaagtatggaaaataactttttttttttagattttgaacccgtatttctctttgtgccactgttttttaacagctaagaattggctttgttaaagagtgttttaaagtatttcattggtaagattttgagttggaaccatacaaattctgctttggtcttgtattaactcagctgctagtgagtgaactcctagatattgccatttagaggcaattaaacttaaacagttaaacttgaggcaggccatgcatctttttactgcgtttttctcttattcttccaaaaaccatcacataaagctataaaattttggaattctagtatagaaagaggaaatgtatagctccatgctaaatacggggtttcttgtatcccaagaaaaggcacctgataagtcaaacccttcatagatgtcccctttttggtcatgcctcatttgtaactttgcagccctgttttcagatatatgcttctgtcaggaacaccgctttcatgtcacctctgctgtgtggatctccacctttctttctggaaacctcattctttcatccacaagagttgttcccatctcaagatattaaccctttagttttgggtgttcgtcaatatagaaaagtactgccttcccacattcttccttcatcccagttttcccaccctaactccctgttaggctagtcagtattgtcctttgggattccagaccctgcaaaacagtggaggatgtggtgaagagaggggcctttgtgattaccatatcagtgagagttgtaatcacccctttttttattctatcttgtttctctgtcttctccccaaaggacaggtataatctctcgaccaattgtcgagagacaatgtggtctcgacacctgaaaaggaagccaaatattttccccagcacctcatcatttgcaaagaatttatagggtagagttagtgtttacattattatgcagaccagtccttgcttatttattcgccatatcccttttcaaattgggcctgcttagacactgtggactggcaggttggaggatgcagcaggcaaagaggagggtgaataggtacgttgttgggttagtttacaaagacctgactatagctttgaagtttctgttttagatcaacgttaaagtttaaaggtttatgaagaattaatgttaagaatgtttcattcttttcaatcaaacagctaaaccatgtatttcatactatgaagaaaaccagtgatcagatgggcttaagagattttttttttgtttcaataacttgaattgaagctcaagattattgaaagttaatattttcatatgattagactaaagcttttgagtataagaaaaatcagattgttgaggtcattcataatactgagtcattggtataatttgatgacagagttaatactttcatcatttttttctctctgtccttttgcaattcattctgtagggtttctttgactcacgcttcaatttagctcactaattcgtctttaaatgaagttcaccccatcttttagtgcttttttatttctatcagttttttatttcatttctaagttctgtaattgcttttttcttaattatctttctcttgttccaagaatatgatattctctattactcttttaaggatattagttatacttttatacacaatcgtgatcaatgtgtataattagttgccatgtacaagccaccattttcagcttttcatgtattaattcttttagtcattttaacaacccaaagaggtaggtactactattgttgtattttacagataataaaacttaggcgcaaaaacattaaataacttgcccaaggtcttgaagttagtatgtagcagaggcaggattcatgtttagttggtttggcttcagaggtcatactcttaacctatactactttgggcattattagttcttatgtttgttaattttggtgcctttgtaatattggttaagatgcttttttgcaagaaatagaatctgatactggttagcttaagtgaaaatgaaaatatattgggaagataataggacatttcacatactccaaggaagaaaaatcgagttgtgagcacagtaggtgtggtacattagaagaaagcttagagtaagaatgtgtaaactttctttcttaaatgttgccattcatgtaattcagtttccttgacttccatccagtctgtgggtctcttagttaattctgccaagagaaattttaactgacacagctcaagagtagtggtggtggtggtgatggtttgtgtgcgttgggatggtgtttggggagttggtttagttttgctttaaaaagctgtgatgagaggtggagtgggtgggcaggttttttagacaaggcccttagagactcaaccttgagttcaggaagcagttctcaaaaaaacaaaaaattctgtgaatccatctactctatgagtctgttatataaaaatgaagagttaagcatccaacattcaaagtggattaataatttagtagcattcacaaaatcaatgtgttttggcaagtaacttgagaatgttcatgctgcattaggttagtgtttctatgtttgtattgtagcaaataatgcttgaatgagtacagctttcttccttccttccctcctattatcaactctttgctaaatgtgatataacatagttgagactgttagaagaatttatttattgaccattacagaagtttatttaacagagtctaatatgaaaatatacatgacttaatttttacatcatagtaaaacaggcccttttgagagggagacatgggtttttctgctgaacagccattatttatacttgttccaaggcttctaacatgatgatgccattacatcgcattaccaccattccaatattgttctgttgcccactagttgccatctccacacattaatctatcacaagattcataaagggatcaaatccccacaatattccttggacatgtctgccaccatttaattttcaatgataactttttgtccatcaattttttcaactcgggagtgtaagctttgctcatggtgtctactccacaggttcacagatgccttggaatggaatgctggaagaatttattttaatgtatcttctattcttgactgcttttgttttgctgtttttaatttactcatttagtatttttacagtatgtctaattgtttaattgctttttttttactatgtaagtaatacatagaaaaaaagcatgaagaaaataaaagttgtctttaattccattgctaatttaaacagttctttccagtcttccttctgtgcatataaagaagatgctcatttaagccaaactttaattatatatatttactggaaaagacaaactgcctctcaaaaattatggaccaggcacggtggctcactcctgtaatcccagcactttgggaggcaaaggcagatggatcacctgaggtcagaagtttgagaccagtctgaccaacatggtgaaatcccatctctactaaaaatacaaaaattagctgagcatggtggcaggcgcctgtaatcccagttacttgggaggctgaggttggagaattgcttgaacccaggagccgagactgtgccattgcactccagcctggacaaaagagtgagactccatctcaaaaaaaaaaaaaaattgtgagttttctttatttaggtgtagacagtcttccagcttgcaacagatggtccttgttttggaggagagttatagcagtggcctcactagataggtttatttaaaacaagggcacagcaatttctctggaaggtttaacaggatttttttgttgttgttgttatttcccctgctatcttctcaatacttcttagtatgcagagatcctaggttactgggttgagtgtatttgaataggggcagtggacattgcagttgagactctgaccacttctattttgagttcagctggaatgaaacctctgaagaatcgagatagctccaatagaggtccacaggcagaaaggatttcaaggatcttcaaagggtaaatgtaccctggaagagggatactggacctgtgataggtacaatgatttagatcattcaatgttattttttgaagtaatttattaaggtaaaatttatttccaaggtaaaactccttaccttgtaagcagtttctcctcattctttactctccctggcctctgacaatcaccagttggcattctgtccctacatttatcttttctggaagtttcctataaagggaatcatataacatttgacatttttagtctgactttcacttgacataacgttttgtatgttcattttaattgtagcatatagcagtacttcattcctttttttttttttttttttttttgagacagagtcttgctctgatgcccaggctggaatgcagtggtgcaatctcagctcactgcaacctctgcctcccagatttaagcaattctgcctcggcttcctgagtagctggagttacaggaacgtaccaccatgcccagctaatttttgtatatttttttttagtagagacggggttttgccatgttggccaagctggtctcaaacccctgacctcaagtgatccacccgccttggcttcccaaagtgctgggaatacaggcatgagccactgcacctagccacttcattcctttctatggctgaataataattgtatgtatatgccacagtttgttcatttatctgtcggtaagtatttgggctgtttctacctttctgctattctgaatagcactactgtgaacgtgtgtgaacatgtactcaattgagtccttatgttcatttcttttgggtgtatacctaggagtggaattgtgaggtcatatagtaaaactgtttttctcagcatctgaaccatttgctttcccgccagtaatgtattccactttctccgcagtttcttatgagaagtctgctctcattcaaattgttactctctgtaggtaatacatcattgttctctgactgctttcaagattttttgttgtcttaattttcagcagtctaattataatgtgtataggcatggattttctttatgttttctgggcttcaccaactttcttgaaacttatgtgtttatatcccttgctaaattggaagttttcagccattaagtctttaattttttttttttttttttagcattaatactctttctcctctccttttataaatctgataatatgaaagttagactttttgttattgtcctatagttttcttttttcttctttttttttttctttgagacagggcctcactttgtcacccaggttggggtgcagtggaacaatctgggctcactgcaacctcctcctactgggttcaagcgattcttttgcctccccagtagctgggattacaggcgcccaccaccacacctggctaatttttgtatttttagtagagatggggttttaccatgttggccaggctggtcttgaactcctgacctcaggtgatctgtctgccttggcctcccaaagtgttgggattatgggcgtaagccagtgtgcccagactgtctcacagttttctgaagcactgttaattttttaaaaatcttttttctctctgttgttcagattggataatgcctattgataatcttcaagtttcctgactttttttctgttgtgttcattctgattttgagccactccatgagttttatttattattgtgtttttctgttctaaagtttccatttgtatttatttcttattgtgtttttgtgttctaaaatttccatttgattctgcttaatgtcttgtttctttgctaagattttctatttttcattgctttcaagagtactttcgattgtttgctgaagcccttaaatagctgctttaaaagttttatcagataatttcaaagtctgtgttatttcagcattggtatctttgattttattttcttagtagagttgctatttttttttttttttgaggcggatccttgctctgtcacccaggctggtgtgaagcggtgcaatcttggctcactgcaacctccgcctcccgggttcaagcagatctcctgcctcagcctcctgagtagctgggattacaggtgtgtgccaccacacccagctaatttttatatttttagtagagacagggtttcaccatgttggtcaggctggtctcaaactcctgacttcgtgatctgcccaccttggcctcccaaagtgctgggattacaggcgtgagccaccgcacccggtcagctattttctacatgcttcatttgcagtgtaatattggattgtatgagactttgggttttgtgttaatacctacagaaaatgttgatattttctcttagcaggctgtcaaccaggttaggttcaggtcataagtttctacccacattctttgaactgtagttgtcattttagtttatttttcaaaaacttttgcagtacctttttggtctgtcttgtgtgtgccttgcagtgaacagtctggatttggacagtggtctgtctgttagttcagtttctcaagcctttgtcacactaataggattggatttatgtatgtccagcttgggaattattacaggaattaaaaacaactttttagagtgctttcctgagctctctttctatttgttcccccttctactttttgcttccctgtggctgctgtttctatcctccagccagagagctagtgtttattttctccattgtgttacacacttgtgcagctgcaaccaccatatccagggcccaatggtaggaggtagagaagaaaagcaaaagggattggcctcatcctcttacaacgatagttccattgaatagagagaaaggttttcctgcctcagagtgttggctgcactaggcttttgttactgtagtctggccctgttaccatgggattgcttgcatgtggggatacaggagaattcagaaaagaaaaaaagatttgctatttctacattctccctgagcattaagacttcccttgcccattcctcaattcaaagctaaggcttcttctggagctgcctctgtgggcggttcgggagataccaaaggagaaaaagtaccactgttgatatggtggtatttcaaattctggtctaccctatttcacatgccttgtttacttttcagagctgacagattgctgctccatgcattctgtccagtttcctaagagagacagcttggagtatgcttaatccatcttacctgggactgaaacagctgcttattttgccgttaaaaattacatgcagtttactgcgtggctccgggtttgtttgtttgtttttcctctttaataggtttattcagaaaacatgtccactgcaattagggaggtaggagtttggagacagaccagaacacttctactgaagaattacttaattaaatgcagaaccaaaaagagtagtgttcaggtaagttaaataactctttcttatgcttttttgcagtttattttgcttgatatattctatcttgaagtgatgatttattttgctaaatatatttttattataattttatttttctttgcttgtaaagtaaaagcttgccatgttagccacagaaaaataactgaattacttaatgctttctaaatgttaaaaattttaataataatttctacatttagttaatttctaacatctgtgcttcattttcagcttttaggcatgtgtttcctaagtttcatgaactaacattccacaataactttgattccagagttttatatcccacaacctcgtattttatggactctagattgagttgcccatgagtattaatattatgacacagatttgtacccacagcatacattacttttgataagggtaaaagaaaggaagaacttgggtaaccagctagtaataatttcaaaggatgaaaacatattattcatcttccctgaaactggtaaaacaattaaacagcaagatgatataatagctcatttctactaaaactgaccgtagaatttaattcagtatggttttggtagtatacatttaggtataattaaagtatgatttctaattcagaattgaataaaggcatttttatggtgaatccatatagggatgttcggtaaattgctttagataaaattatatgagtaaatttattatgttttatgtcaataatctaagatgtttaaatattatcttttatgtcaccttaatttattttgtgacttgaattttaaaatatttcagtaaaactaaatacaaaggaaaaaataatatgcatgttgggttggatgaggtgttcaacacaaaattcttttgggatagaattgcttttattttattcataagaaaggacaaccaaatttcctgttttttcttagtattatattatttgccaagaaatcttgatgatttttgctgccattgttatactttgtaattactttgtttcttttattgtaggaaattctttttccactattttttttattttggttaatattaattagcatgatgcatccaaataagaaatatgaagaagtgcctaatatagaactcaatcctatggacaagtttactctttctaatctaattcttggatatactccagtgactaatattacaagcagcatcatgcagaaagtgtctactgatcatctacctgatggtattgtgagcttatatatatattctgtttataatattaagccttttcaatatttatcagcttgctttattgaatgaatagcagtcttaacacttagagatgtgttcctccaccaaagtcagttttataaaaatactaaaattatttaattctgttgccttatttttcttgtgaaacattaatttatattcttggtggtaggaagcatattttatgtacttttatatttaattcttagaccatttataaaatagtttaagtatacttgtataagatacaagctttgatgggctatttcattttgattctgactttcatataattatgaagctagcaatgtttagctgaatgtggtagcatgtgcctgtagtcccagctactcaagaagttgaggtggggggatcccgtgagcccaaaagtttggggctgcagtgaactatgatcatgccacttcattccagcactccttactctgggcaacagaatgggacccccatctataacaataaaaaatttaaaaaggaagctagaaatatgtgataaagactgtaaagcagtcaccttttcagcttaccatgcttgtttatagaagtgtatggtgtaaactgaagaagtacctaactttggagactacaactatgactatggctaagtccctaactctgttttatttatttatatatatattttttgtagagatgggatcttgctatgttgcccaggttggtctaaactcctgggatcaaatgatcttcctcccttggcctccacctaaagtgccacctaagtcttttttctcaatgtgcacttctcacaaagaaatgaactagaaaacagtgtaagcagtgaagtgccactgaacttaaagtggctgtgagagaacctaaagcaaaagctggagaaagtgacagaaattcttatgctattaatgattaaacaaggaagtgctaaattgtagaaaatgacagattagcatgttattttttgccatatgggatagttgtaattagcttatatgtcatcgcattattggattttatgtcattgaatggaaagtgttaattatacagtcagaagccaggtaacttttattccattggtttctttctctggctatttctatttaatattttgattaaatacacttcttgttatatggtagtgtatcatattaggtacaagtagtatagattaccatgagaatttagtgtacaagctcaaaaagctgattaaaaatgttgaaatgaaattcattggtaattctgagtaggaggaaagaatataaaccaaagaaatatgaggccaggcatggtgactcacgcctgtaatcccagcactttgggaggccgaggtgagcagatcacctgaggtcaggggtttgagaccagactggccaacatggtgaaaccctgtctctactaaaaatacaaaaaaattatccagccatggtggtgggtgcctgtagtcccagctacttgggaggttgaggcaggagaattgcttgaacccgggaggcggaggttgcagtgagctgagattgtaccactgcactcaagcctggcgacagagcaacactcaatatctcaaaaacaaaaaacaaaacaaaaaaagaacaaacaaacaaaaaacaactaagtcagtgtgtattagatgccaaaatagtgtatacatatacacaaatttttttagacttctgtatttttaacaacagaactatctgaaaatgggttatgcatacatacataacatgactggtaggatgttgaactaacaccctctttattcatgtaaatcctggagttccctgtccctcttaaaaggcctggaaaatctattaattaacatttaagtaatactttagaatctatgaagcattttttttttgtctttttcttcttttgtttgagatgggatctcactgtcaagctggtttgcagtgctgtgatctcagctcactgcagcctctgcctcctgggctcaagtgatactcccgcttcagcctcctgagtagctgggactacaggtgcacaccaccacacctggctaatttttgtattttttgtagagacagggtttcgccatgctacctaggctggtctcaagcaatctactcctggactcaagcaatctacctgcctccaccttccaaagtgctggcattataggtgtgaggcaccacatccagcctacaaagcgttttgatgtttgttacttcacttgttcttcacaacaacccagtgtcatcagctaggcattgtagatgaggacactaaagtctgaagagttcaaatcgcctgtctgtgctcacacagttaatacatgaagacgttaagtactaattctatattctttccatttcaccacatgtttgaagcttctgtagtgaaaattagttgcttgtaaacaaaactacaagaaaatatttaaaaattagtcttatctgatgagaaagaatgattacagtattttttccacttatcttctaagaaaggaacaagcaatattggatttgaatgacaatttttatttaaggaggagttgtgtcatagttactaaaatgcctatttagtttctgagaaggattgtggaattttctttataagaaatatttaaaaataaaaaattcatatatttactaaaaagttatttttgtgcaggtgcactggctcatgcctgtaatcccaactagtccggaggctcaggtgggaggatcacttgaggccaggagttcaagaccagcttgggtaatgtagtgacacctcatttctaccaaaattaaaaacaaaaaattagccaggcatggtgatgagtgactatcgaccaagctctactccagaagctgaggtgggaggatctcttgacccctgaagtttgagtgcaagatccagtgcactgcaggctgggtaacagaacaaagccctgtctctaaaaaaatataaaataaaataacgaagttattttttagtttaacttcgagatagataaatgaactgcattactaataatttttataattttattgctgcctgaaattagtataattaattgaggttttgagaaacagcaatttcttgaagaaatatgagttctgcatattgttttatactatatttcatatatttataacataagtataacactgacacatttctgtaatcaaatgacagctgagtagtgtctgcaacattgtaccattttattattattattttgttggaagaattgtcttctttttgtttgtttgttttttttgagacatggtctcactctgttgcctaagctggagtgcagttgctcagttatggctcactgcagcctcgacctcctagctcaaatgatcctcccacctccgcctcccaagtagctggaagtgcaggcacacatcactacacctggctaatttttttattttttggagacagaacctcaccatgttgcccaggttggacttgaacttctgagctcaagcaatcctcccatcttggtcttccaaaatgttgggattacaggtgtgagccactgtgcttggactgttttcattttttaagaagtaaatatagcaaaagtgtttataaaatattccattcatcaaaataattgtaaacttgatctactgtattgtggtattttaatttgtgagctaactatattgttatgatatcttacagtcataattactgaagaatatacaaatgaaaaagaaatgttaacatccagtctctctaagccgagcaactttgtaggtgtggttttcaaagactccatgtcctatgaacttcgtttttttcctgatatgattccagtatcttctatttatatggattcaagaggtaaatagccctacataatcattgaagatcaattaaatgcatatctttgctgcttgcagttcatagtcaaaattttatatagttcaatattggcattttcaactattcttacttgttccaataggaaaactgagaagtatagcataaaaatatttatttataaatacctatctacttctacacataaaacatttttatatatacccattttgatttaatacatttatatatattaaatacagtagcataaagcaaaattgcattttgggttatatgactttctaaatctctttttttcatgtaattgtttttacttgtggtatgtacaaatctttaaaatcttgaggtcttctactagtgaacttgattagttttatatttgaaacatgggaaacaacctttggttgtttaaatctatgaagaaatattatcaaccacaaacatttattgagcaatgttaaagtcactatgctaaatactgaatttgtgactttatttcaaaaagcccttctgaaaattcttttttcctgtttgcttaactttgacttttccttgcttctggaagtgctttagagctaagtcatgtagaatgatttactttaaaacaaaaaagtaacttgttttaaataactacaattaatttctttctttacatttttattcatttactatttagtattctaacacatataacttttatttcaaaatttcaagtaaatgatcagaaatcttgtaagtattgtttacctttgaaagtcagtagcttatttctttggtcctgtaaagattgattgattatattgttttggtaggtatctctccatataatatctttaaaacgatgcacttgcatgttgtacagaatcttagatctcatattcttccccccatagctggctgttcaaaatcatgtgaggctgctcagtactggtcctcaggtttcacagttttacaagcatccatagatgctgccattatacaggtaaatatgataaaggaagaaatacaaaaactatgccattttaaaataaatatttccttattctttacaatagtatttggtttgactactgtcaaatgtacaaaatatgtaacctactacaactcctttgagaaaaaagataaaaaagtcatattttctgatttggtactttttgttgtgtttcatattttagcagaaaaactggccatgaaatttatttttaaaaatcttacttttgtgtctgggctagataacagtagatgaagttaccttagaattcaaactattcaaattaaccatatttcattcttccatgttctgtatggatctgtggcttttttttccatttgccctttctaattgaatttactatgctacaaaatttactatgctacaaaatattgtaatttcaaaatgtatatcaaccatcttgtctgctaaacaatacgtttaaagtatgtatgaataatgatggagctggaatcaaaatctgaacaggagtcttgtctctgttgttacactgctatgtagtaaaatgactattataatagtactttacttgacagcattgtcgtaagaaccaaatgagatgatttatgtataattgtcttgtaaacttttgtagtacagtataaacatattagggacgtgtaatattgcacaaattcaataatacagaaatttaaggtaaagatagtgaaatacggatctattacattgatgatgttgtatcacctatttgtattttggccaaagtttttagccatccacagcacagaccacactggatgaataggcaggatagatttcaatttaggcattaattggaatgttagaagtattatgtggcataaatagttttattatttggtctatatgtgctaaatatatagactttaaagcagtagaagggcatggtatttagaagaacattttttaaacaatcataggaatgatggcactaataatcactcctaaattcctaaattttgaagatgtatatttttactaagatacatataattgtctgcttaagatgataattgtgcaattttattttatttgacaaattatttaatcaaaatttatacacttactgactttaaactttaaactttatggtatacttttagaataaattgaatgcaatattctactcagaattatgatattggggtcactcactttatttcaggtatggagctttttgaggattgtatttgtactaggttactgaccaaatttagggatatagctgtcccgttttactaggggctgctatcataactaaattaatttgatgtatttacattttctaattatagttgaagaccaatgtttctctttggaaggagctggagtcaactaaagctgttattatgggagaaactgctgttgtagaaatagatacctttccccgaggagtaattttaatatacctagttatagcattttcaccttttggatactttttggcaattcatatcgtagcagaaaaagaaaaaaaaataaaagaatttttaaagataatgggacttcatgatactgccttttggtatgttattaaaaatttattacttaatataattaaaaattgtattaaatatacagattttcaaaattgtaattttgatatttacctaacttgatgatgtgcttatcctgttttcttacaatgattgccttagtcttggaatttgagattagtcaagaagtttcaacaactaattggcttcatttaacataagggatgaagaatgtcaaagcttgtgttgacaatacgtgtttaaattttatttcacattttatttgaatcatgggcacactccgtgtatatttcagtgtatttcaatatactccacgtatatttctgtgtatttcagagttcaggaaatgtgaaatcttggaacattagaaattaattgcttgttacagttcttccataatatagcatatatataatattaaaaatttagttatagtgattaaagtctgtatatgtggtatatggactttttttccctcgaaagttttagttatttgggtgaattaagatgaatatggaaataattttagagaaagaaatgagaaaaccatgttttcactagtgacctttaatgtatcagcatttttgtacagtgataattttacaaaggcatgcatttttataaatctaagtgtagtttccttactcttttcactatgtaatgaagttcattctggggggaaggttaatactgtgcatgtgagctgttatagtctgttttacaaaattttattccaattagcccaatgtaacaattaatcattaacactttacataatggaattattgtatataacatatttcctttgcttgtttttctttcatttgttattttagaaattattggttttggattattttttgagacagggtcttgctctgtcacctaggctggagtatagtggcatgatcatgggtcactgtggcctcaaactcccaggctcaagagattctcccatctcagtctctcaagtagttgggactacaggtgcatgctgtcatgcccaactaattttcaatttttttgtagggacgggggtctcgccatgttgtgcaggctggtctcaaagtcttggcctcaagtgatcctctcatcttggcctcccaaagtgctgggattacaggcatgagccactgtgcctggccaaaggattggtttttaaaatttattgggttattaaagtattttatggagaaccggtagctggaagaatttaggcaaatcattctctcagggtctcagttttgcctcagtaaaatgatggattcaattttgataatttcgctacctttttagccttaactcagtgatttcatgacatcattaaatcctgagctaacttggaaaaatatgtaaaataaaacttaatactgcagcaattccattgagctctgatttgtaaagaagtcttgagcaaaaatagtgaattcattactgatcttgttgatttcacattgtgtaattgtagtaattatgtcattgattagtgaggtaaggtagcctttattgtttatagttacagaagccatcagaggtttaattgtagcacatgccataaagaaaattgttatcttgactcattaaactcctacattttaagaaaatcagagacattgtgtgctattgaacttttgagaatattagatttaaattaattatgaattactattcattttgaaagcttttttaactctggaagatagtattttttatcagattacacttttacctatcacttaaccaatactatttttaattacttacaagactattaatttttagtacataagcatacacagaaatgaacagtgacttaattttaagaataaaatggctaaaatctaaaaattttgtttaaaatgattttttaactggttaagcctatgcatttgaccataactatatctgtattctcattttaggctttcctgggttcttctatatacaagtttaatttttcttatgtcccttcttatggcagtcattgcgacagcttctttgttatttcctcaaagtagcagcattgtgatatttctgctttttttcctttatggattatcatctgtaagtattttaacttgtgataggaataaagaactgtcaaaatgtttgataacatagcaaagtctttttcttcagtttacttatagtcaatttgccatgaaagacagattttactaattgataagtgacttaataaataaatgatgtggcatcactgtattcctgtatttttagtaatgttacaaaatagttttagatttagatttagcttttgtcatatgatgtatttcacatacaactcctctatctgttgtctttatataatgatgtatataattaagactgtcaagtattggactatttttgtttgtcttcatggaatccttactctttcaagttaatttatgctccaggatgatgatttttaaagatacatctttgcaaatgtaactctttagcagtcttgatattcatttgatatattggctgaatgagaggttttaatgaccagcctttgttttaagtggttccatcttccattctgattggtttatgtgcccaccctgtatcagttgttaaatgttttggctatcatttctgctctttaaaataataaattgcaaataactaacatacttccatatgtaattgcctggtttttttttaaatgtttaattttacttttttgagacagggtcttgctctgtggcccaggctggagtgcagtggcacactcatggctcactgcagccttgacctcccaggctcaatccttcaacctcagcctcctgagtagctgggactacaggtgtgtgccatcacaccttgctaatttttgtgtgtgtgtatgtatatatgtatatatatatatacatatatatatgtatgtatatatatatatacatatatatatatgtatgtatatatatatatatatatatatttttttttttttttttttttttttttagagtcgaggtcttcctaagtgtccaagtttggtcttgaactcctgggctcaagtgatccacttgccttggcctcccaaagtgctgggattacatgagcgagccactgcagcaggccttctggttttttttttctttttaaactgttttttttatcttatgaataaattaagtttaaaatatgggtcttgtacttaaaatttttgttgatttattattttttcacatattttatgcatcttactgcagaaacacatggctatttatggtttctgtaatgtagaggtggtcatgtttacctatgatacagataaaaatacagtatttaatatttgttagtttaagaccagatgtggtggctcacacccgtaatcccagcactttgggaggcaaggcaagaagattgcttgaggcaaggagtttgagaccagcctgggcaacatggtgaaaccctgtctctacaaaaaaaatactaaaatgctggacgtggtgccccacgcctgtaatcccagctacacgggaggctgaggtgggaggatcacctgaacccaggaggtggaggttgcagtgagccaagatggcaccactgcacttcagctagggtgacagaacaagaccctgtctcaaaaacaaaatcaaaacaaaaacacaaaaatatttgttagtttaaatttttaaaaggtatatcactatttgtttgaaaataaaataccatagcatttagaaattatagttgtatttttatgaatgcatttttcatgaaaatagcttgttctttcagaagcaaactttaattttgttttcatactggtatatatgaacattgcactaaccttaatatttgtattttataggtattttttgctttaatgctgacacctctttttaaaaaatcaaaacatgtgggaatagttgaattttttgttactgtggcttttggatttattggccttatgataatcctcatagaaagttttcccaaatcgttagtgtggcttttcagtcctttctgtcactgtacttttgtgattggtattgcacaggtaggtaatatattaatcttgcattcactaaatattttctttctgttttatgtagcttcttatactaccatgaatactacctttgatttaccaaaaaaattattttaaaattttagcatgaggaagaaatgatttctagagtatattttatatctagttttatttatgtttgtccaattttaagtttttagttaaatgttctgtttataaattttttactttttacttcagtgtatctcagtgatttatttcactgcagaaactcagtttgatagtaatgtgtttaaatgtcaagtaattcttattgcctatggcctggttatattgctatcatttgtacatttatctcagaagaatgcatgggagaaaattgtgtgtggagcagaacaaatttaccgtgagtgtagtggtggaataagtaggcctggtggattttgttggcccaggcttcatggaattgtcattcaaaataacattcagacttacaaatattatttttattagtccttacaggagtagttaggttctaaatggaagaagtcttataagaaatggctttgtagtggaacatgaatttggctaatgtacaaagaaaaaaatgtaattactaaatataagaaattactcatgttggttggatagaagttctgatttatgagatataattaaatattgagttaatcattttacttttttgagacctgagaatgattgttatacattttgagagttcattgagtccccgagtccgcgttctctaggaacgaagaattatagattcataggtttttgttgtgagtgggatggcctttcagtgtcattgaatttatcttcttcattttataaatgagaggactgaagcctagaatagtataattaaagcgtattcacttaatggcagggctaggacctaaatgaggcttcaacctccagtacatttctctttccatgctatcacaaatatctactatgaatactttaataattgtgttaattaatcaaaatacttgcttttctctattggaaagatgctaacctaattttattccctaatacttaatttgtttggctttcatatggatcataacccttttgtttgcatttgttattattaatattgcagtttgtttttatttcatttgttagtaattacattggaattaaatgcccctagagtgaatatatcccagttaaagaagcacaacattaaaaacatgattgaaaggaattggtttgataaacttacatttttgtaaagtctttattgttttccttataaatttatattattaatttggtcaagtgtttaatctattaaaaggcccagttggttactatcactctggatatgctaaataactcttaagtagtgttagcttttgcttgtttttgtcatttttatgtaataaagttagtgtttgtatttttcaggtcatgcatttagaagattttaatgaaggtgcttcattttcaaatttgactgcaggcccatatcctctaattattacaattatcatgctcacacttaatagtatattctatgtcctcttggctgtctatcttgatcaagtcattccaggtatgcagatggtttttgaattttactttaaagatttttaggcttttttgcccacatagggtcagcttaattttaagattttttttcctaaccagggtaccctaagtcatattcattgttaaagcttttaatttgactttaaataagtatattttgtaccttaggctatagccactagtgaacataaagagatcgtgtaaaaagagagcagttttgaaagccttaagtctctagttgatcttaccttggtccttctttatatcagtcttttttaattgaagtattttattttaccctctaaggtctaaaactatgaagtgatcttgtaactcctaccattttctttatctcctgtccacatctatagccaatatagcaaactcctgtagattcaatagtaatattaagtattgagcatatttccttttccacttgtattcctcattacctgtgtctgtattctacacctgtactgtcctgtatggtaactactagccatgtgtggcttttaaaatttaaattgattacaattaaatcaattaacaatttatttttttcagtagcacaggccacattccaagtgctcagtagccatatatggctgttagttactaaattgcatggtgcaatctagatgttctgtagaacattttgaccattataaaagttgtattgtgtaatactagtctagactagaggttcccaacccccaggacacagatcttactagctgcctgtgaggaactgggctgcacagtaggaggcatgtgagtgaagcttcatctgtattcacagctgctcctcattgcttgcattaccacctgagctccacctcctgtcagatcagtggcagcattcaattctcataggagtatgaaccctattgcgaaccgcgcatgtgaaggatctaggttgcatgcttcttatgagaatctaatgcctgatgatctgtcactgtctcccatcacccccagatgggaccgcctagttgcagaaaaacaagctcagggctcccactgattctaccttatagtgagttgtataattgtttcattatatattacaatgtaataataatagaaataaaattcacaataaatgtaatgcatttgaatcatcctgaaactatccttgctccctgtctgtggaaaaattttctatcacaaaaccagtccctggtgccaaaaaggctggggaccactagtctagaccattgcagtatctctcatctagttacatacctcaagtctgtctgagcacttcacccctttttttgaggttttattattttttaatagatttttggggaacaggtggtgtttggttacatgaataagtcctttagtgttaatttctgagatattggtgcacctgtcaccctagcaatgtacactgtacccagtgtgtattcttttatccctcacccccctcccaccttttccctgagcccccataatccattgtatcgttcttatgtctttgtgtcctcatagcttagctcccacttatgagtgagaacatacaatatttggttttctattcctgagttactttacttagaataatggtctccatttccatccaggttgctgcaaatggcattattttgttcctttttatggatgagtaggattcctttgtgtgtgtgtgtgtgtgtgtgtgtgtgtatgtgtgtgtgtgtgtatcacattttctttatccagttgttgggatgggcatttaggttggttccatatttttgtaattgtgaattaattatactgttatcaacatgtgtggggaagtatatttttcacataatgacttcttttcctctgggtagatgcccaggagtgggattgctggatcaatcggtagacttaccttagttctttaaggaatctccacactgctttccatagtggctttactagtttacattcccaccaacagtggaaaagtgttcccttttcaccacatccatgccaacatctattattttttgatgtttcgataatggccattctcgtaggagtaaggtggtatcacattgtggttttgatctgaatttccctgatcattagtgatgttgagcattttttcatgtttcttggccatttgtatatcttattagagttatctattcatgttcttagcgtactttttgatgggattgttcgttttgttcttgctgatttgagtgactcatagattctagatgttagtcctttgtcaacatatatatatagtgaagaccttctcccactctgtgggttatctgtcaactgctgattatttcttttgctatggagaagctttttggtttaattaagtcctatctatctttgtttttgttgcatttgcttttggcttcttggtcatgaagtctttgccttttttctgatgttatcgtctcaaatttttatggtttcaggtcttagatttaagtcttttatctatcttgagttgatttttgtatagggtgagagatgaggatccagtttcattcttctacgtgtggcttgccaattatcccagcaccatttgttaaatagggtgtcctttccctacatttatgtttttgtttgcttgctgttggagcagtaacagttcccagaggaatgccaagtactgataaaatcaattggaatcctctgtacttggcatcagatccctttgaaatgtggccaatctaaaagaagagtagatatttgaaaaaaatgaggagtgtaggtattttgagagggaaaagggagaaaatggaacatgttgtctgggcagttaccactgtatgccctttctttccttctttccttccttccttccttccttccttccttcctctctctctctttctttctctttcccctccctcccttccttccttccttccttccttccttccttccttccttccttccttccttcctacctaccttccttccttccgacagggttttgctgtgtcttttttgagacagggttttgctgtgtcttccaagctggagtgcagtggcacgatcacagctcactgcaggctcagcctcctgggctcaagtgatccccttgcctcagcctcccaggtagctgggactacaggcatgcaccaccgcatctgactaattttttgtattttttgcagagacaaggttttgccatattgcccaggctggtctcaaactcctgggctcaagcaatatgccagcctctgccttccaaagtgttgggattataggtgagagccaccatgcctggcctcattgtataccatttctaagtctcatatttctatcctgttgttttgttgctctccataattctgtagtcttttccatgaagcatatccacttttctagttactacctattttcaaagatcatttaagatggtgcccattcaagtcttcaacacattcagcctgtgttgtgttcttgccatttgctatctacttgtactcataaaggcattagttcctttagcatagaagatgtgctttattcacctttacctcccactcagcaattctgaaactatttatggactagaattatttatcaataaaactttgattcatacaatattgatttaatacaatacagctaatctttatttacttattacttttcaatgacaaatgaaaattgtatatatttattgtgtacaacatgatgtttggaaatatatatatgttgcggaatggtacctaaactttagatgcaggttgtcatatgtttgaaatgctgtctttatgatttaaaaactaattatggtaactcagttttttaatgtttatttttcaggggaatttggcttacggagatcatctttatattttctgaagccttcatattggtcaaagagcaaaagaaattatgaggagttatcagagggcaatgttaatggaaatattagttttagtgaaattattgagccagtttcttcagaatttgtaggaaaagaagccataaggtatggttcaatctttggcaatttaggtataagaactgctgatgaaacatttaaatcctattctttaaatatgtatgtaaatatggtatattagatttggtacatatgccatgattttaaaacattaataagggctacttttctctttttcttattttctttgcaaccatttagaataaagttggtgctaggtttgaaattttatgtttctttctttctgttttttgagacagaatctcgctctgtcgcccagcctggagcacagtggcacaatctcggctcactgtaacctccacctcccagattcaaacaattcttgtgcctcaacctctcaagtagttgagtctacaggcatgcgccaccatgcctggctaatttttgtatttttagtagagacagggtttcaccatgttggccagactggtctcgaattcgtagcctcaggtgatccacctgcctcggcctcccaaagtgctgggattacaggcgtaagccaccacacctgtcccctgaaattttatgtttggatggaaaattttaaaagtaataaaacctgatgtttatacaattaatgtttaaagcttttcccattatgtagactgaaacatgataaatattaactatataattttgttcatgctacattgttttatacagcatattaaattgtcatctgttaatttcatagatttttagggtttgaggcataattagaacatttcattactttaatttttaagaaccaaagaaattcattacgattccttgttaggtcagtcagtaccaaatttagaaataaaattaggtgaaagaaaagaaataaaataaaatgaaataaaaaagtgaagcataatattttttaaatttaagaaaaatgtaaaaattccagagaaagtcaaaatacttaagatgtaattcattggccagtggcctgctttcttaacggtaaattttaactgattaacaaatcatttccttaaaaaaatatgaaaaaaataaggtagaataagaaaatcacttcacatttgttaatggtttgaaatttgtgctgacatgaaatgacatctggtttatatcccccttcactgatgtaacaagtgtttgataatcagaaatgaaaaaaaatccataaattgcttaaatcagattcttcacttagttttagaagttgggttggcatgaaaaatgaatcaatgacgcttacaatggaaaggaatactatgcttttctcttgtaccttctttaaaataattttatagttgatccctgaaaaatacaagtttgaactacaccagttcacttatatgtggatttttttcagtaaatatattgaaaatttttttggagatttgtaacaatttgaaaaaactcgcagatgaactgttagcctagaaataccaaaaacaaatgttaggtatgtcatgaatgcataaaatatttatagatattagtctattttaacatttgctaccataaaatatacacagattatagtaagttatgctttatcaaagcttaatgtacacaatattgacagacctacattatgccaatgcccagttgagagaaatgtaaacaaatgtgaagatgcagtattaaatcatagctgcataatattaactacagtattactgtaccactgcaataattttgtagcaccttcttttgctgttatggtgagcttgtgtgttccaagcatatacttcgaatgccatgtgactcaattatctccttgtgagctgttcatctctccagtaaattgcatatcatgataaaaagtaatgtctcagggttcttgcttattttttattatgtgtagtgcaataccgtaagccttgaatagcatcatgggatccataggaattgccactagtgatgctggaagtgctctcaagaagcagagaaaggtcatgacattataagaaaaagttgaattgcttgtatgtaccatagattgaggtctgtgggtgcggttacctgtcatttcagatagactgtgcatcttgttcatcttataaatagatgatgtgaactgacggcattgataaatacagtataataatgtaaatatatattttttccttataatttcttaacattttctttagtgtacttcataaaaatacagtgtttaacatgtaaaacctacaaaatatatgctaaacaacggtttatgttatctgcaagacttcttatcaatagtaggctattaatagattagttttaggggattaaaaatgttatatgtgtattttcaactatgtgtggcagttggcactcctaacctgtgttttcaagtgtcaattgtattttcattatcaacattatttggttcattgttttagtaggaaagtactttattattattttattattcttataaaatgtgatagcattgataaaaatatgcatggtaaataaacacacatacttataaattgctttaaatacttaaaatataaaactttatatttcagaattagtggtattcagaagacatacagaaagaagggtgaaaatgtggaggctttgagaagtaagtagttttcctagtattcaggccatagtatttaaagtacaactagaaaaataatttgcatagcttgtgggaaatttaaacttctctaccatgattttctgtcttgcttttattttattttattttttttgagatggagtctcgctctgtcacccaggttatagtgcagtggcgttctcttggctcactgcaacctgcgccttctgggttcaagtgattcgcctgccttagcctcctgagtaggtgggattacaggtgtacgccaccatgcccagctaatttttgtatttttgtggagacggggtttcaccaagttggccaggctggtctcaaactcctgacctcaggtggttcgcccgcctcagcctcctaaagtgctggaattacaggcatgagccactgcgcccagcccctgtcttgcttttttgagatactttcgtttatgtgattaatattcaaaataaaactaacaacatgacatttgtaaaagtaaaatgtagtatctattaaaatgaaaaatactcaattatttgaataaggctatgtccttgtttcagtttattattttgcatgtatatgcaatacatgttagttactttttgaaaaattcatttggcctatcgtagggtttttcaacctcagcactactgacattttggtcctgataattctttgttgtgaagaactgttctttaatgtagaatgtttagcattgtgtcaatgtgttagtcagtccccagaaccaatagaatacacacacacacaaacacacacacacgcacacacacacacacacacacacacacacacacacacaccagtatgattgtagggtgggggattaggggaggtttgttttaagtaattacttcatgagatagtgggccctggtaaatgtagaaatctgtaaggcaggttggaaactcaggcaagtgttgaagtttcagtcttgagctcaaaatttgtagacaggctgacaggctgcacactcatgtaggagtctgttacattcttgaggcaggactcttccaaggaacctgttttttctcttaaggccttcaactgattggataaggtttaccattattatcaagactaatcaagtttaactcagatgattataaaagttaatgacatctacagcaacttctacatcagtatttgaccaaataacggcaccatagcctagccagggggacccataaaattaaccttcacaagcagcatccctggctttgatcaccaaagagagaaggagttctgcctcaagaatgaaacagattcttgcgtgagtttccagcctgtcagcctatgaattttggacccaagatggcaactttaactcttgcctgagttttcaacctgccctacagatttttgggacttactagaccccacaatcttctgaagcaatttcttaaaataaaccttccctaatcccccaaccccacactcatacttgctccattgtgtgtgtgtgtgtgtgtattctgttggttctggagactgactgacacgctgctaaacatccctggcacactgctaaacatcctctcccagttgtaacaaccaaaaatgtctccagtctttaccaaatgtcttctaggaggcaaattaatttattaagaagaaagtaggtatagtggtatactaatagggttttagtttgcatttgcctaataactaatgttattaatcacctttttatatgattattggcatttggaggttttcctttatgaaatgcctattcaagttcttttcacatttttgtttcaagacctttgttagatacaggtatttaaatatttgatctcagtctgaggcttgccttttaattctactagcagtgtcttttgacaaacacaagtcttaatttgaatgaagtccaatttatgaatctgttcttttatggttacagtgcttttcacgtctttttattcaacattggagattatatataacctccaatgtaagttattggtacaactagttaagtataattataattgtaataacaattacaactaattgtttctaatgcaaagaagcaagagaatgaaataaaaggcatccagattggaaaggatgcagtaaaattatttgcagttgacacaataatctatttttaaaatcttttagattgacaaaaaataatagtggaactaaacagtgagttttgcaagatgataggatacatgataaataatggaaaaatcaattgtatttctatatgttaccaacacataattggaaattaaaattaaaaatagcatttagcatcaaaaaatatgcttacaggtaaataagacaaaaatgtaaaagacatatcctgataagtccaaaacattgctgagagaaattaaagaagatttaaataaatagaaataccacgttcatggggcagaacacttaacgtttagttgttgagttccctttcttattttaacttagattattggcgttaggatctgagactttttccttcttgttttatatgttagccttcttagtctagtttttgttgttgtttgtttgtttttgagacagggtcttgctctgtcccccaggctggaggacagtggcacagtcttggcttatcatagccctgacttcccaagctcaggtgattctcccacctcagccttccgagtagctgggactacaggtgccaccatgcccagctaatttttatattttttgtagagacgggatttcgccatgttgcccaggctagtctcgaactcctgggcccaagtgatcctcccacctcagcctcccaaagtgttgggattacaggcacgagccactgtgcctggccagcctagttttttgataagccatttctgcttcatcatttcaggtccccatctcctgtcttccttcattcctttacatatccattcagtgatattgcttcattaaatctaacctttcaagccatttctatgctattggttaatttcttgtttttttgccagtttatttaaatgcctataaatatccttgggaacaaatttttgtttaattccattggttccattggtaattcccaaaaattgggacacagaaaattcccaaatattttgtatactcttaaatcttactgtatgaacaaataaagtttatttttatttactttcattactgtttatatcgttgactgtaacaaagaagctgttttacctgctatcaaatatgctggtaactttaaatatgtatttatagatatagtgccttgaagattgctcaaatattatgaattatcatgcatagctgaacagacataaaaattacatttgagtcttcttttttcctgaactagatttgtcatttgacatatatgagggtcagattactgccttacttggccacagtggaacaggaaagagtacattgatgaatattctttgtggactctgcccaccttctgatggtgagttttctgtcttaaagaaaaaaaaacttcattatatatattctttaaatgtgtattgaataatttttgtcaatgggaccaacttctgtatctgtaaaggtgttttctttttttcttgattatacacatgtggttgtttttagtagaagataaaaatgattctatcatgtttaataaagtaaaaaggatctaattttgtacatatttctatacatatacacacgtagatgtgtatgtatgtgtttttattcatcattttcaagggaggataaatgagtaacttattggaaattaaatcagaactatagactatttgaggttgagaaaataaacacaaatatctaaatatacagcaatagttcagcaggaaataattgtaaatgttcatactatcttctaaaatagaattttaaaggcatacctcaaaagtataattttgatatgtgattgtttggtaggtgagaattcattatagtagctccatattatgacagtaaccaaatagagtggcagtacaataaatattttactttacaaaagggctgaattgtattgaatctgcatttcaactctttaaatgttatttaacttttaaaattagtttgattttgttctttgtccttagttgtatcactctttgatggtagtcataatatcttacatttgtataagaatttatgatttttcctcatgattcttcataatgtatgattgttttaattttcactattaaaacaatgaatatattagtgttcactgtataaaaaaggaaagctggaatttaaagagattaagtaatttggccatgaccacacagctagttaggataaaatttatagttctttaatccctccactattgcacagtgtctagaaaattgttactggaatacaagtgtaaatagtgtatcaatagatatttatgtttagtgtcaagcttttactttcttgcttttcccactatgttatatgacctgtaagtgatggaaaatgagattgaaatataagtggatgcggatcaccaataatattgaagggtgtgttgtgccttgtaaatttatattaatttttaccttatatgtctgttataaccaaataactaagttatcaggatacttgaaaacatacacattataaaataattaatgtacatttaaatatatattttgcttttagggtttgcatctatatatggacacagagtctcagaaatagatgaaatgtttgaagcaagaaaaatgattggcatttgtccacagttagatatacactttgatgttttgacagtagaagaaaatttatcaattttggcttcaatcaaagggataccagccaacaatataatacaagaagtatgctattcatatagaaatctttacttttatttcctgtaatcaataaccttttgtaatgacttgtgcaataaaaatatgcttgaaaatctaaatataacacttgttctgagccagcaaacagaaagctattacaaagaattagacagaatttggagtaaatgttttagcacacataaaagtttgtttcatctggaggatgcttgcctgccttattcctgccttctcttgctctcatctcctctaccccctcccacttccacacatacattaagagccatcacagtgatctcttattccttccctaccacccaagaaggcacaaaattaaaacctttccctcaagaatcttgttacctgttgttttcataattatatatgagtatatgtcaaaggcagttccatgctaaaggatcatttttaaagttgatattaaaattatttaaaaacctatgttacttaaatatctaacacattaaaacttaaaatatttaaaaagtaatattgataattatataaatggtatgatttttaaaataacattgttcatgctttacttttacaggtgcagaaggttttactagatttagacatgcagactatcaaagataaccaagctaaaaaattaagtggtggtcaaaaaagaaagctgtcattaggaattgctgttcttgggaacccaaaggtaaataaatattacttttacagatgagctcattttaaattatgtcgaattaaaaagcaggttgtagaaagatataatacattatgtaaaggttaagtgtacataaaatgctgtatgttattatggatataatcatagtaatgagattttaaaagtgaagtcagaaagatgtataactttttttaattttagtagctgtcaaggtactaaaggtttttggttacatggatgaattatatagtggtaaattctgaggttttagtgcacccatctcctgagtactgtacatggtactcaatatgtagttttttttattcctcacccccttccaccctttcctttctgagttataacatctttatgataactggttacttttaggaaggagaatggaagaatagactttagttatgactgccatgttttctttctttctttctttctttctttctttcttctttttttttttaatttgtagagacgagaccttgctatgttgcccaggctggtcttgaactggcctcaagcgatcctcccgcctttgccttccaaagtgttgggattacaggcatgagccaccacgcctggcctccatgttttatttctttaaaaaatgatctgaagaaaatgtggccaaaaaataacattgctgaattggaatggtagctataatagtattactctcttgttctctatagtttaaaaaatatttgttatagttaataacaaaagttaagaaatagaacaaaatcaaaggagtgattcagtttatcactgtcctgctttgattttgtatgtatttgttttatgctgttctctgtcatagaaacagagaaacaactgatgtaccactttacacagggcatcaaaactgacaggtgcatgcatgcagctaggatgatctcctattgatccccaccatcctgccacattcccccttgctgttgcagctggggaatgattctggatcctggctttatgttcattagtcttcctctcagccaccaccaccatgttcttttttatattaaaaatagtcttgaaacaaattgcttcccttgaactactataaaaccatatattcttctccaaaaaagcaagtgttacatctacaaatttaattgttaaggataatagcaatatacttaatgttttgtttttagtttgtttgtctgactgttgttatacttttgtcttgtgtattacaggcagtcttttagaattaaacctgggaaaatattcacatgtcaaatttataattttaaaaatttatgtgaactcaattatgaatgaaaaaatctgatctaatatatttctgattgaaaataataatttgaaatggggcagttttttagtgtccacatgcctgtttaatatttagtttttctgaggattccctgcccttcttcacctcttttcacacagatactgctgctagatgaaccaacagctggaatggacccctgttctcgacatattgtatggaatcttttaaaatacagaaaagccaatcgggtgacagtgttcagtactcatttcatggatgaagctgacattcttgcaggtgagatttttgttttattttcgaaggctgagatcatgggccaaaaggaagatggatatagagatgctaattcctgaggtataaatagagaagcttttacctagtggtatgtttccttcacaaaaaaagttctaaaaaattttaaaatgatacatttttgtgttgagaatctccaagaccatcccaggtttagtgatgtcctagaagaactcatatgactcagcacatagtcatactcatgactatgatttattacagcaaaaggatacaaagctaagttagcaaagggaaaaggtatatgaggcaaagtctcgaggaaaccaggtagaagcttccaagagtcctactcccagtggagtagacagatgtgctttaatttcttcagcattgagttgtaacaacatgtgtgaaatatctacttgggaaagttagtatatactcagtgttcaagattcttattgggtgctgatcacataaacatcttctgcctagcacataccaaagttccagattctcagaaggaaagaagttgtttggcataaaccacattgtttgtacagtttaggcactgagccactcttacctgttttgagaatagtaggaaccctcccaaatccaagttctcaactaacagccaagggccaaccttgtaagcaggcctttctaaggatagaagcctctgacctgctatgttaactcttttctgcacaattttatacacatacatacatataaagaatccaagttgaagtcaacacatgacttttaatagctatgacagatatagaagtttgaaattcttgagcaacttctgtctgcttataatataatctaataaaattgggcaagtcattcatgtcttcagtagtacctttatttttaaaaacccaacaaactaacatttgttcttcttattacttttgttgatttttggagttgtttctacatttggttataaaggaaattgtgaaagtgcttgtattggtaagccttttaggaaaaatatatttggaataacatatggtaagtagactctagagtcagactccttgagtagagttcctggctttgttacttaatagctgtatgaaacatatataaggaatgtattttctttttaccttagtattcatatctgaaaaatagttgatgataatctagtaccatcctcataagactttttgtgatgattaatgatatcataatgtggatgactctcatatgagaaaccataaaatgtaaatgccaattattaatgctgttgatactttagaaattgaaatgtaaatatttatctgcagataggaaagctgtgatatcacaaggaatgctgaaatgtgttggttcttcaatgttcctcaaaagtaaatgggggatcggctaccgcctgaggtatcattcatttttattgacattattctatattatactcttgctatactgttattatgttggaggcttgctgttatatgctttgaccatcatttatggtactaaatttaatttaaagccttcataatttacttttggctgtttattgtataatcattaattgtgatttttggtattctctagcatgtacatagacaaatattgtgccacagaatctctttcttcactggttaaacaacatatacctggagctactttattacaacagaatgaccaacaacttgtgtatagcttgcctttcaaggacatggacaaattttcaggtattacttactttaagtctcttggtgtttgaactgggatcctatattgggaataggtttcattgatttcctttttgtttccttctccatgtagtattgccatgctcccaggtggccagagttaatattctgtttctgctttattttgtttttgaaagccagaaaaaacacagcaaaatttttttttttacaaacaccatgcaagaaactgtaactaatatattaaatacttaagaaaatgttaaaaaacgtaaaaataattgtgtttactttgttgtcaagaaaaaaaagaaattgcttgtaggcctcctgagagtaaggcatatatgtatatagtttatatacattctcaggttcttttatagtttcatgatttcataatgaattatatgataaatccttgaattcttttaattgaggcattattttttaattttttaatgaggaactcaaactcagtctccttcctctgtttaggaattgcttgatagacaaaaggatgttattgatgtaagtacattgtgcagaattttcatagcatttatctcataatcagaaaaatacttgttttttttttaaaaagaaatcacaaattaagtggactgaagtacacttgccaacttaatgcactctgcctatcattctatctacttatacccacctatctcctattctttagtaacatttatatgtgcttattttctaccagatgctggtctgtgccttttgcaattattagtttatttcattatcccaatatttcaagaaatacatgagataaatactattattgctttcattttacaaatgaagaaactgagacataaaaagatttaaggaacttgcccaaggtaacacaggtagaaagtggtggagctgagttttgaacccaggcaaatcagttccagaactcatggttttcaccaccatactttgttgttgactcttacatttctttgaaaaattgtcacggtatttcactggatttcacagtgtcttctgggatctcctgtaggatggaccgtaagacctcttaagggaattcataatgtcagcactttttctaataataccaaaatgttatttgccttattgaccctcagcttctcatgattatacagtgttttccagagactgcataatatgtgctatcacaacagattgaatacagaaacaaatatgagaacccatctgtcttctgttaagacagacattaaagagatttgcagaaatgtaaaacaatattctcttctcattatttttgttttaaaagatgcagtttttaaaaataaaattgtgttaacccgtaataggtttacttttttattttttaaaagatgaataagtatttaaatgattactgtatgttttctaatgtacatatttattttattattcaatatagtaacattctcagttttaatttcaaatactgtaaaatttttgttagtttataatatgatatagatataatatggtaatagatatgataatagatatattcccatatataaaatttctttgaggtccttaatttataagaatgttaagcctgttacttaggctggagttcagtgccacaatcacagctcactgcagcctcaaactcctgggctcaagtgatcctcccacctgagtctcctgagtagctaagactacaggcttgcatcagtatttatgcctagctaatttatttttattttttgtagagatgggtcatgatatgtttcacaggctgttcatgaacttatttttaaaggatattttacaataatttatgataatatgcttaaagatatactattctttcatttttttcttttaggtttgttttctgccctagacagtcattcaaatttgggtgtcatttcttatggtgtttccatgacgactttggaagacgtatttttaaagctagaagttgaagcagaaattgaccaagcaggtaaaaacagaactaacaaaacattttaggcaatgaatcagacagatggtgaataagacaaaaattatataaatgtaattttatattttttttagaataaagggtagaaataagtaaataagtaatgagatactgatagtgataggagtaatgcaggaaataatggggtggtcttagaaggcagcgaacttagattatatcatcaggaaggactttgttgagatgatacttgacctgaggcctgtataatgagaaaaatcaagtaggtgaagattttagggcagaaattttcagataaagaactgcaactgcaaaggtattaactgaggaatgagttggatgtctttgagggataaaaaaaggctaccatggccggagccatagtgaagctattacacagcaaagtcaggaggatactcaaagggatagatcatgttctgcctttgaacgtctggaaaacaatttcatttgttttcctattgtagtgtggaagctatcagagagttttaaagcaaataggtaccatgatctgatttgaatttttaaaaaaacacgttctggttgttgaatgataagagtattataaaggaagtgtggaagtaggaagaccagttaggaaactgctatagttaatactatcttgaactagggtgtcagtgaaaatagggaggccgggcgcagtggttcatgcctataatcccagcactttgggaggccaaggcagggagatcgcttgagcccaggagttccagaccagtcttggcaacatggcaaaaccttgtcacaaaaaacacaaaaattagccaggtatggtagtgtgtgcctatagtcccaactactctagaggctgcggtgggagaatcacctgaggccaggaggtcaaggctgcagtgagccatgattgcaccactgcactctagcctgggcatcagaaggagaccctgtttaaaaaaaaaaaaaaaaaaaaaaaaagggaaagaacagatatttgggttatactggtggtagtggtgatgagttgctgatagattgagtgttagaggctcaggagaagttggaatgaagaataattcctaagcttttgataactgggaatgagattgccatttcctgaaaataggggaagaataggtttgtggaaagaaggaatgcaggcatgagttttttccttttttttttttttttttgagtcttgctctgtcacccaggctggagtgcagtggcaccatcccggctcactgcaacctccgcctcccaagtccaagtgattctcctgctgcctcagcctcccaaacagctgggattacaggcgcccaccaccacgcccagctagttgttgtattttttagtagagacagggttttgccatgttggccaggctggtcttgaactgacctcaggtgatccgcccgccttggcctcccaaagtgctaggattacaggtgtaagccactgcgcccggccgaggcatgaattttgagtatattgtttgagatgcatctggagttaaatgaagatgttacggctgaagatacagatttggaagttactcacaggtagatggtgctatggaattggatgaaatctcttagttgggtaaggagtgtagataagaattgaggggcaagcctcctgggtgagcagtggagaaggagccaagagggctgaccgtgaatgagcaattattactctactttttcatgaaagagtggaaatggaaaaacctagaaaaatggtgtttaggaaagaggaagtggtcagttatttgtcaattgctgtgaagaataagatgaggacaaaaaaggtagttttggtaacagaggacggtgagggatttggtagactgtaagagtggtgatcttgacagatcaatttcatgatgcagtaaggagcaaggtggatctattcagtttacggtaagaacatgagttgaggaaactttcttatgatcgaaggttagcaaaatgtttgtagtggcaggtgaggagagcaaaggaaaccaggatgttagttcacagttgttaaaagagttgagatgctgcaaatacacattttgcatgaatgccgagtgggtgatgattaaaatcattgtgataccaaagtcaagaatcaagctgaatatatcatcatgaagtaaacttgcttatattatgctaaaataaatctggaacttaaaatattactagaatttaattattcatggtttggtagtcaaattttaaaagattggccttattgtgtgggaacaataatttgtcagcattgctaactgtaaagttgctcctgtagtcctacgtttatgataccagatgcccactttcaaatgcagtgaggagaagccatatatttttgagttcttaatttttcttttgttattatgtctggatcaaagaagatttatctgaaaattaatgtatgtgattttgtagtttctccttcttttgaaatttttaaatgatgaagtgggcattctgcttttagttcaccctcacaaattgtggaagaatccacaataaaacttttatattgaaagtgcgtggccttaatggaattaaataactaaaaaaagaagcaagtctcccaaatttgttttaatatcttgagtactaatatactgaaccactacataaaattaatattatataatctgatttctttttatattattatctaaattaaaaaatacatgtattggcccaaaagttataatgttcttcctaaagttatctcactagtacattctctttaatatttgcattaactgttaatatttttctgtgttgaaagttctgaatgtttttgagtttaaaataaacctcaattgtgtagtattttattcttgccattaaataaatatatgtttatggtttaattggtagaattttatttttttatttatttatttttatttttttttattattatactttaagttttagagtacatgtgcacattgtgcaggttagttacatacatatacatgtgccatgctggtgtgctgcacccactaactcatcatctagcattaggtatatctcccaatgctatccctccccgctcccccaaccccacaatagtgcccagtgtgatgttccccttcctgtgtccatgtgatctcattgttcagttcccacctatgagtgagaatatgcggtgtttggttttttgttcttgcaatagtttactgagaatgatgatttccaatttcatccatgtccctacaaaggacatgaactcatcattttttatggctgcatagtattccatggtgtatatgtgccacattttcttaatccagtctatcattgttggacatttgggttggttccaagtctttgctattgtgaatagtgccacaataaacatatgtgtgcatgtgtctttatagcagcatgatttatagtcctttgggtatatacccagtaatgggatggctgggtcaaatggtatttctagttctagatccctgaggaatcgccacactgacttccacaatggttgaactagtttacagtgccaccaacagtgtaaaagtgttcctgtttctccatatcctctccagcacctgttgtttcctgactttttaatgattgccattctaactggtgtgagatggtatctcattatggttttgatttgcatttccctaatggccagtgatggtgagcgttttttcatgtgtcttttggctgcataaatgtcttcttttgagaagtgtctgtttatgtcctttgcccactttttgatggggttgtttgtttttttcttgtaaatttgtttgagttcattgtagattctggatattagccctttgtcagatgagtaggttgcgaacattttctcccattttgtaggttgcctgttcactctgatggtagtttcttttgctgtgcagaagctctttagtttaattagatcccatttgtcaattttgtcttttgttgctattgcttttggtgttttagacaggaagtccttccccatgcctatgtcctgaatggtaatgcctaggttttcttctagggtttttatggttttaggtctaacgtttaagtctttaatccatcttgaattgatttttgtacaaggtgtaaggaagggatccagtttcagctttctacatatggctagctagttttcccagcaccatttattaaatagggaatcctttccccattgctcgtttttctcaggtttgtcaaagatcagatagttgtagatatgcggcattatttctgagggctctgttctgttccattgatctatatctctgttttggtaccagtaccatgctgttttggttactgtggccttgtagtatagtttgaagtcaggtagcgtgatgcctccagctttgttcttttggcttaggattgacttggcgatgcgggctcttttttggttccatatgaactttaaagtagttttttccaattctgtgaagaaaggcattggtagcttgatggggatggcattgaatctgtaaattaccttgggcagtatggccattttcacgatattggttcttcctacccatgagcatggaatgttcttccatttgtttgtatcctcttttatttccttgagcagcagtttgtagttctccttgaagaggtccttcacatccctcgtaagttggattcctaggtattttattctctttgaagcaattgtgaatgggagttcactcatgatttggctctctgtctgttgttggtgtataggaatgcttgtgatttttgcacattgattttgtatcctgagactttgctgaagttgcctatcagctgaaggagattttgggctgagacgatggggttttctagatatacaatcatgtcatctgcaaacagggacaatttgacttcctcttttcctaattgaataccctttatttccttctcctgcctaattgccctggccagaacttccaacactatgttgaataggagtggtgagagagggcatccctgtcttgtgccagttttcaaagggaatgcttccagtttttgcccattcagtatgatattggctgtgggtttgtcatagatagctcttattattttgagatatgtcccatcaatacctaatttattgagagtttttagcatgaagggttgttgaattttgtcaaaggccttttctgcatctgttgagataatcatgtggtttttgtctttggctctgtttatatgctagaattttaacataaagtacgtaaataaatttttattccaaatacatttggaatgtttaactgtaatttaaatgaatattaaatattaaaatgaaatctgaatgacataccttattcacactactgaatttgttataccttttaagtgttgtgctaataatctgtatgatcacactgtcattgatcatgtacaacctcagtaatcccaggaaattatattgaagtaggcattggctcttaaaccttccaaagactaaagatgaagttgaagggcagaatttggctgaaaactgagcctgaggctaaattttaattgagaagtaatgtaaagccaggagaggactctcaaacatggtgataagagagaagtctcgtgtatgatcaggatatgatgctaagttgtggtcagagaggaaaagttcacataaaagttggatattatacagatacagagataataagatcttaaatatggatatgtatccagtttgattttgaactagtggaattataccatgtgtctcctttgcatctgtcctctttcactcaaaatgacatttgtgaagttcagccatgttgttatgggtacagtagtttgttcattttcattggtttacactattccatagaatagtgttcttgttcttagtagaacaagaacattctcatgttcttgtacatgtgttttggtgaaacctgtattcatatctctgttgggtttatacctgttggggatctcttgggtcataagatatacatatgttcagctttaatagatactgccagaatataagagagttccatttgttccacataactgccagaccaatgcttctttaaatgttcctgcttcagaaagtttgtatcttttttaatgaacatactgaaatgtttgttttgttttggcaaatagattatagtgtatttactcagcagccactggaggaagaaatggattcaaaatcttttgatgaaatggaacagagcttacttattctttctgaaaccaaggctgctctagtgagcaccatgagcctttggaaacaacagatgtatacaatagcaaagtttcatttctttaccttgaaacgtgaaagtaaatcagtgagatcagtgtaagtataattatcacccttatacctgatggattgctttttaaggatacacattggttttaccatcttaatttttaaaatgttaacatatgtaaataatttatatagtttcgaaagattaccactgtaatttcacaatgttagagaaaaaaattacaataatttcatcgaataccctgtcttacactttttaaactagcatttattgtctcatctataaagtgaggaaataacaaatattccctaattgtataattttttaattactgtcattgtatctttttctttctttcacctgggagcacagattcaagtttccttgaatatattaatacactccccattgtatcttaaattttgttttgcgtttctattttttcgctattttttgcgtctattagttagtttttataaccactttttgtaagtagcaggaaaaatgagttttacctctatttatcctatgaggaaactgaaaaataaagaaggctacatagctagtagatctgggatcaaaatgacatctcaagttagctttagcccttctcagttaggttctcctagggtactaggaactgaataatttggaaataacattaaccactttcatataccacacacctatcttgttaagtccaaaatgtcagtagtaataaggcttaatcattaagattaagaatattgttatatgtttggaatatgctaaatttatatgctcttctttgaccaaattcagtgtcaaacaaatgtcaatcacgtatctgatttattccctggtcggcattactgaaagaaaaatgtttatttaaatcagcatgtttcaatttattttattatttttttatactttaagttctgggatatatgtgcagaacttgcaggtttgttacataggtatgcatgtgccatggtggtttgctacactcatcaacctatcactacgttaggtatttatcctaatgctatccctccccagtcccaaccctccaacaggccccggtgtgtgatgttcccctccttgtgtccatgtgttctcgttgttcagctcccacttatgagtgagaacatgtggtgtttggttttctgttcctgtgttagtttgctgagaatgatggtttccagcttcatccatgtaccttcaaaggacatgaactcatccttttttatggctgcatagtattccatggtgtatatgtgccacattttctaaacaccactctcataaaatacactcagaaaaataattaaaataccatctgggctcggtggctcaagcttgtaatcccagcactttgggaggccaaggcaggcggatcacaaggtcaggagatcaaggccatcctggccaacatggtgaaactccgtctctactaaaaatataaaaaaattagctgggtgtggtggtgggcgcctgtagtctcagctacttgagaggctgaggcaggagaattgcctgaactcgggaagcggaggttgcagtgagccaagatcgtgccactgcactccagcctggcaacagagtgagactccgtccctgcccccccgcccccccaaaaaaagaaaattaaaataccttagtcagctttgactgccatgacaaaataccatttactgggtgacttaaacagagtattattttctcacaattctgatggctgcagttctgagatcagggtgccagcatggtgatggctgtcttcctggcttgcagaaggccaccatctcactgtgtgctcatatgacctcttcatgtacactggcatgcaccctctggtgtctctttataaatgtactaatcccatcatggggaccccaccctcatgatgccatctgatgcagattacctttccgaagtcccatttccaaataccatcatatgggagttagggcttcaacatacaaatttggggaggcacaaacattcaatccataacaaaatgtgttccatggtcaaatacatttagaaaatattactcttatattccctatattaaagagttattcattagcataaaaaacatgagatgttctctggtaaagaaattccttcaactttgtttaacctcatgtttccaaatattatttaattgtgaatattttttaacctaaatcacttcttaacttattatggaacttgatcaatgccatatgcttttgaaatcttagatataacaatttaagaatttttttaaaaaaattacggggtatgtgaaatttataaattgctgaagtatgataatctaagctctccaactgcttgttaggacacttattacatgtgatatatagatattttatcagataagtagctgctcttcagataaaagggcattgtagtataccttgctttgcctcctgagagcagcagtggcaattaatatgataaaattgcgattaggatgagatttcaaagatatcagccattcagagtttaattgtatttttatttgcttctctatatctaaaatatttttcttgttacgtgaaaagtaaatggggctgggtgcagtggctcacacctgaaatcccagcactttggaaggctgcagcagctggatcacttgaggccaggagtttgagaccagtctggccaacatggcaaaaccctgtctctactaaaaatacaaaaattagccgggtacagtggcacatgccagtcgtcccacctacttgggaggctgaggcatgacaatcgtttgaacctgggaggcagaggttgcagtgagccgagatcacaccactgcactccagcctgggtgacagagcaagactccatctcaaaaaaaaaaaaaaaaaaaaaagtaaatggttaagatagagacaggacaggaagtaattccttcaggagtagagacaaatatttgagacataatgtcttgtgttttaacagttataactacgtgtttacatactcttagaaaaatttaagggcatcactgatctaaaatacacttttataacttttaattttgtcgtacagtattggctttctctccagtattgtcataagatcattttggggaatacgatttcttatttttttttttcagttttttttctttgtttttttcagtgattatcttttaactatctagagtttaaatctataccaatgtaggctggtcaaggtggctcacacctgcaatcccagcactttgggaggctgaggcaggcaagctccttgtttgagctcaggagtttgagaccagccttggcaacatggcgaaaccccatctctataaaaaataacaaaaattagttgtgtatggtggcgtgtgcctgtagtctcagctatttgggatggtgaggggagaagattgcttgagcctgggaggtggaggttacagtgagctgagatcatgccattacactccagcctgggtgacagaaccagaccctgtctcaaataaaaacaaaaaaagtccatatcaatgtgaagggagagttttaattgattttcatattaatgtacctttgtaccctgagctgtgttgttttttttttcttttcaggttgcttctgcttttaatttttttcacagttcagatttttatgtttttggttcatcactcttttaaaaatgctgtggttcccatcaaacttgttccagacttatattttctaaaacctggagacaaaccacataaatacaaaacaagtctgcttcttcaaaattctgctggtgagagtgtgtgaaggtctgtgaacgagtgttggcatggagcatggggttgaggggtggataaaggtctggattttaaaactatatttaaggtaaaggcatggtctgtctgcatgaaatctaaattatagttcaatacgtatcttattgatgctgaagaatatattacagtaaattttggtttacaaataaatgacagttttggccaggtgcgatggctcccacctgtaatcccagcactttgggaggccaaggcgggtggatcacctgaggtcaggggatcgagaccatcctggctaacacggtgaaaccccgtctctactaaaaatataaaaattagccaggcatggtggcacgcgcctgtagtctcaggtactcgggaggctgaggcaggagaatcgcttgaacccgggaggcggaggttgcagtgagccgagattgcaccactgcattccagtctgggcaacagagggagactctgcctcaaaataaataaataaataaataaatagttaaaaaaatttatactttgtataatagtagaatttccttttttaataataacgttattcttactagcatgttttatgctgataagtccatgatgagcaaaatatacttcaaaagttgaaaaaccctctttacaaagagttgtagtacataatatttatacaggtatgtgtctgcatagaagtgttttaattcttcaaggacagtctgaagaattagttaaaactaagaaaaataagacttaaatataaatatctctaattgaatatattagatttgtaatggatatttttggctttgctattagtattcttaccatgtagttgtcaaatatgaaaaaaatttaaacatacagacttgagcaaagctcaaaacaaaaaactgacatagtgttctgattttcaaaatattaaaagctaatacaaactttattcatatgtgatcagttgttcctataacatctcctattctgtagcagactctttggggtttaacctttctaacacttcacctacattctagtatcattcctttttgattcactaattcaaaaaagactttgcccagtattaaaataataagcatggctaggaatgattataaattagtattaaaataatcactgttaaaatctggtgcgtgttatattacataaccttcattctttctggtaaagatgtatttattgatggataaatgagtgagaacatggaaaattacctggagcatggaaaattaatggaaaattactcgaatggaaaatgttaggttttgcaattttttttctttcattaggaaatttcattatgaattctcgttttggttttaaaatacattttatattgctaatatataatccttacactgtgctaatcttgacattttttatatgtgtccagggaattgtacatgtatctcaaatatttcttttttttttaaaggaacttggattcaaatcatatctttttgctttgagttaattctcattgatctgcagaaattctagtattttcagtttgtctcttaattttttattattcttagagttgcttgcttatgcatgccatattttcctaagccttgtgtgtgttccaaaataaaaccacttttttttgaaccactggcctctgtgtgtatatatattgggtggtatcttacccaccttgcagagctttttgtatctcttgtgctgtggttccttcacttataatgtgtctctcttctcagggtacatagctggtcttgcaagttagagataagagatcagttaaggtactaggttgggagtaaagtagtgtcaccattctctatgacactgagatctagtgctgtgtctgatccaccctgccatactattcagttactagtaatgttttgctttgtttgatttaaatttctctctaaagtcacatttgtccttccctgaatcctgatttttgttatgatggaggagaaactgcatctattcggcagacatgttggtatagatttaaatcccgacaggatttaaaatcttactcttggctccaggtactttagagaatgtagagatgtgattatgtgtttgaatattttaaggtagttaaggcaattgacatgtctgcccagagcctacaaaaaattctctagggagtgatgttaccacacctatacctttctgaacttagcaggttatcttgttacctaaaattgtcagatagatttttattcttattatttaaccaaatttcatgtgttataggttaacttttcaatgttaataatagttgtagcagcagcagcagtggtggcagcagcagcagcagcagctaaaatatgcgcagttactatgtgtcaggttctaaactctgtgtatatattcagtcatttaattctcaggatgatcactctacctataaggcagatatacttattttacccactttacaaaagagggaacttaaggtccagaacatctaggtaacttgcttgaaggacgaatagtttaatgttacaactcaactttaaaaccaggctgactggcttcagagccaatgtacttacttgcgtattcgctaatgaaaataaaatatttctctaaaaatagaattatcttcccagtgttactaaaagcctcgtttagactcattttttattatttgcttattttctaacaccagactcagatatcagtgatcttattagctttttcacaagccagaacataatggtgacgatgattaatgacagtgactatgtatccgtggctccccatagtgcggctttaaatgtgatgcattcagaaaaggtaagatgaatgcagtgaatgaatatccatttgggagttatgcaagattaaaacgtttcttctaaaattaattatttgttgatttgaccttatgagttagaaattagattttacttttggaaataactagctgtctttatttatgatatatttcattacttcacagatgaccaatatataaagttacagaaatttagttttttaaaaaattatatgcttgtttaaaatattaaaatatctgtacattccaaaccagattgtctttatctgtcattgagtattatttctgtgagttgttgaagcagtttttctgtatgagaattagctttgttggtgagaaaagcttggtacatatcaataatatatccgcttatatacagtatgtaataagtgtcttttttttaattgtaggactatgtttttgcagctgttttcaacagtactatggtttattctttacctatattagtgaatatcattagtaactactatctttatcatttaaatgtgactgaaaccatccagatctggagtaccccattctttcaagtaagccaatgtatatacagataaatttccatatgcatgtcatatatataataaccattaaaaactaagcaaaaataacaaaatatgtagaaatttatcttgtgagatctcttagacttcttaaaactcaagtgagaaacggtttacattaaggtttaggattccccagtagaagtatgtttcagggtaaaggagattctgttttggtattaatatttgtataaggaataagtgtgttctatattgatcatagaataaaatataagataatttttaaatgaatattttttacctaaaatccaggtattgggtattgaaaaaaacttgagaagtcacccaggcaaccatttttcctctagatagaactgttggattgtacatatcagaatcaagattacagaaaagtatccaacatattttctcttaatccttttgattttcatatgctaaaaaataaatggacaaatatctgtaacaatattttctatcttcttcttttcatacttttaaaaacagcttcattgaaatataatgcccaatcaacctgaccattattcaaagtatacacttcggtgtcttttattatgcttatagagttgtgcagtcatcactacagtcagttttaaatatgccatcacccccctccaaaaaaaataacccttatactcattagtaatcactcatttcctctcatacccactcccaaccctaggcaaccactaatgtactttctgtttctatggatttccttattttagacattttatataaatggaatcatacagtatgtagtcttttttgtctgctttcttgtacttagcatactgctttgaagattcatctgttttgtaacacgtatcagtgcttcatttatttttactaccaaatcatatttcattgtgtggaatgtatggaatgtttatgtgaaatactgcattctacttatctgttcatcagttgatggcatttgggttatttccaccttttggctattatgagtaatgcttatgaatatttgagtagaagattttgtatgagcatatgtttttatttctcttggatatataattaggagtggaattgctagatcatctagtaactctatgtttaacacttgaagaactgccaaactgctttccaaaatggttgcatcattttccatttccagcagcagtgtctgtggagaggtatctcatattatgaaatatttcaaacgtacagaaaacgaaccacctactatccaaatatttcaaatgttaatattgcataatatttgtttttagtaaaacttttaagacacaggtgaaaactcatgttacccctctccaatcttgtttccttctctcctccgtaggagtaaccgcaattcacaatttcacaatttgtaattcccatacgtgtttttttgatgttactacatatgtctgtatccataactattacacaagattttacaacttacaattttcaacaacactgacatataatcatactatatttcgaaagaaatacatgggagtttttgaagctaactattcatatatagtcgtattaatatttcaaatttgtttcttcattagattctgtatgattggatccaactgtagtctcattcatttccacttcttgcactactagtctacatatttgtgggttctttctgagcctccactgtcatattacgagagtttcagacaaattctgcaatgtcatatgacctgaactttggaattgacttaattgctaaataggaaaactcagaaggctaggtttcagcaagacagtgatgtactctgtctctatgtcatcccatggaggggtgtgccagtgcgagggtatctgctaggcactgcggattctattccagtgcagagtaccttctctgtcccacgggtctgtattcttatagaacaaggggaggaaactgaccttggtgagggtggctgataatatagtatccttggacttgggtaatctgcatttgaagtgctagctgtttattgattgtctgggaaagttagctgactgcacctggatccctggggaagctaacgacattggggcctgtgggagttaattcctcttctgcttgggagaagaagttctagttccataggaagctgagcttggatatagcttttcccaattaaaaagacaagagcaacaaatatcattcttagatatttattattatttcataggaccactatggtggacatactaactgcttttcaaatacatcattcatttttatgaaattgtgaagcgtaatttatatgcctgattattctgtgttgtagacaggaaaatgaaagtaaaatgatttgcttaggatcagatagttattaataagtggcagagttggtaatattgtccacaaccacctgttaatacatctgccactcattctttcatgtagactatgcctgggttagatattctaatacattctttctgaggttttgatttttttttgatataagatatatcctaagatatatcttaagatataaaatgattctcagttccatttgttactctgtggttgtctttcaggaaattactgatatagtttttaaaattgagctgtattttcaagcagctttgcttggaatcattgttactgcaatgccaccttactttgccatggaaaatgcagagaatcataaggtaatgactcagttaaaaatatataatttgctaataagaagtgtcatataaaaataacctatttgcttgattgcaaggcttagtataattgttatttcagaaataagtaaatggaatataaatacatttattatagtttcttattgtaataagtgataattaatatttattatttgagacttgctacatgctttaaaaattatattctctaattctcacaacattgtgaggtaagttttttgttactgatttcttatagatcaggaaatcaaagatgggattgttcatatgacttgctcaggttgactcaacttgtttaaattgtggatttgggaagtgactgtgatctttatgttcttaactggcaaactaacatgcccgtcccttttatcctttaacagaggtattaagtagtcaaggtgctaaattcttattaatggaaaaaaaatagatgaaagtgattgtcatcattagggccttggagaaattgctaagtatacagaggttctttggtattctttcactttctttttacgcctttcccttttgttttccttcaggcatatagcgatcttgtacagtctttggttgttcaaagcctcccactttttcactctgctgagattatatcttactgctctaataaaaattctgatcttcttcatggatgatcttaattcagtaaaaacaaatttgtctaaattaatttacagactgtgatgaataatgagctcattattttaataaattctaaaaaaataaattgtaggccaggcgtggtggaccacgcctgtaatcccagcactttgggaggccgaggtgggcggatcacctgaggttgggagttcgagactagcctgaccaacatggagaaaccccgtctctactaaaaatagaaaaaaaattagggcgtggtggtgcatgcctgtaatcccagctactcaggagggtgaggcaggagaatcacttgaacccgagaggcggagattgcagtgagccgagatcatgccattgcactccagcctgggcaacaagagcaaaaactccatctcaaaaataaataaataaataaataaataaaataaataaatacattctaataaaaattttgttatttgtttactataaaagtaacacatatctctatttttaaaataatattcaatttttgttaaatatactcattgtagtaatgtataaattatagaaaagtataaggaatatagaaatccataacccactgcacaataataaaatttactggacatttgcattttctttcttgtttcaactgaaacattttttttccaatataaattttttatttttatttatttattttttaatttttttatttatatatatatatatttttattatactttaagttttagggtacatgtgcacattgtgcaggttagttacatatgtatacatgtgccatgctggtgcactgcacccactaacttatttttaattaaagtttctattttgagatagttgtatattcatgtttgtttgttagaaatgacagagagatcctgtgtactctttacattttgtcccaataataacatctcgtaaaattatagtacaatgtaacagggtattggcattgacacagtcaagatacagaacatttctgtcaccaaaaagattcccattttttgctctttcctagcctctctgacctgtggcaaccactactctgttctctatttctgtaattttgatagttcaaaaatgtaaaatggcatcacaataagttttcttttgggattggcttttttcaaatagcattttttttgaagttcatcctatttgtatttatcaataatccattccttttcattgctgagtaatattccatggtatggatacatcacactttctctaaccatttgcctgttgaagaacatttggattgttttccgtttttggcttttgtaaagttgctgtggacatttgcatacaggttttgtgtaaacatcattttcatttctctgagataaatgcccaagagtgcaattgctgaattatacatgttaattttataagaaattgccaaattattttccaagatgagtgttccattttatgttatccctaccagcagtgtgtgaatgacaaaagtttgaattatccaaaataattgcatttgccttagcttatgtttttattcttgtattagaatttacatgtgtctcatgttctcataattcattgaacagaaaacttgccaattttgttcatttctcctcttcttaactaatctttatatttcatgcttcctttatctctgtggacagctctttcatataataccttcagttattaggagtagatatttttatagatgacaaaaatcaactaaataaaattgttaggtatttggatttatgaaatattttagaaatttcaaattaaatgagaacatgagataggaaaactatgatcatttgagtttaccattaacaaacttgtgacgtaaataacaccttagatttatatgctataccagtgtacacaaaaggctttgaacatttcaaaagctttcacttaagctgaaagccttatgtaaatccaaaggatacttggcaatttattagtgtttttatttatgaaaggttcatttttaaaactgagaattctttttctgtgtaaacatgtcttcccatctgtttccacagtatttcaaaagtagtaatgttttggctatttattatttgtatagctgtaaccccaaccgccatgacaccttttgctttattttaatctcagtttcttggcagcactactgtattctgattcttaaaaattttgttgaaattgttacatctcagaaataatgagccaaattaaaggctaaatggaatttgtatttagtgtgagggggacttttattacctataagcctggaatgtaacctttttggttttgctgatgtaaaattaagagatctacaataatttactaatttatttgtgtgtttctaaagtgtctaaaattataataaattgtttttcattttttttagatcaaagcttatactcaacttaaactttcaggtcttttgccatctgcatattggattggacaagctgttgttgatatccccttattttttatcattcttattttgatgctaggaagcttattggcatttcattatggattatatttttatactgtaaagttccttgctgtggtaagttaacgttagttgtactcatgctatttatagatagaatgttatttaaaatctgttataaacatgacagttgacttattgcataatttggttattaatttgttaaagaaaatagagcaagtgtgtctggtatttaatacatgtaatcattttatatgataagtgacttttaaaaacaataacttaccaccattttaaaataatttcttgaaactaaagtgatctttcatgtagaccacctacttgggtgtaatcaggaacgttttaatatattccttccttaaaatgccttccttcgtttttcttatgcctgaaaataatttcacaaaggataagctcttttattccatagtttaaaatatagcttaacatttctctatctcaataatgggcaggctgcgagccagatgaagaacacaactccatttacaatagccacaaaaaattaaaatacctaggaatacatctaacagaggagatgaaagatctctacagggagaactacaaaacattggtgaaggaattcagagatgatacaagcaaatggaaaaaaatttcatgctcatggattagaagactcaatatattaaagtggccatactgcccaaagcaatctacagattcaacactattcctatcaaactaccaacattattcatcacagaattttaaaaagctattctaaaattcatatggaaccccaaaagtacccagatggctaaaggaatcctacataagctgggcgcgggggctcatgcctataatcccagcactctgggagaccgagacgggtggatcacgaggtcaagagatcaagaccatcctggtcaacatagtgaaacaccatctctactagaaatacaaaaaaatagctggacgtggtggcatgcgcctgtagtcccagctactcaggaggctgaggcaggagaatcgcttgaaccggggaggtagaggttgtgttgagccaagatcgtgctactgcactcaagcctgggcaacagagagagactttttatcaaaaaaaaaaaaaaaaaggaatccatgtaaaaagaacaaagccagaggcatttcattacctgacttcaaactatactataaaggctccagtgaccaaaacagcatggtattggtacaaaaacagacatgtagaccgatgaaacagaatggaggacccagaaataaagccacacatctatagccatctgatcttcaacaaaattgataaaaataagcaataggaaaggactctgtgttcaataaatggtgctgggatagctggctagccatattcagaagaatgaaattggacctccacctttcaccgtatgtaaaaagtaactcaagatggattaaagatttaagggtaagacatcaactataagaattctacaagaaaacataggaaataccattctggaccttgggaaagaatttatgggtaaataagtcttcaaaagcaattgcaacagaaataaaaattgacaagtggcacctaattaaactaaagagcttctgcacagcaaaagaaactatcaacagagtaaatggataacatacagaatgggagaaaatacaaactatgcatccaacaaaggccaagtatccagaatctataaggcacttaaacaattcagcaatcaaaaaacaaaactccattaaaaagtgggcaaaagatatgaacagacacttctcaaaagaagacatgcaaatggacaacaaatgtatgaaaaaatgctctacatcactaatcatcagagaaatgtaaatcaaaaccacagtaagataccatctcatgtcagttagaatggctatgattaaaaagtcaaaaccaacagatgctggcgaggctgcagagaaaatgaaatgcttatatactcttatatactcttggtgggaatgtaaacttcagcagccatggaaagcagtttggagagttctcaaaaaacttaaaacagaactaccttataactcagaaaccccattactgggtatatatccaaaagaaaataaatcattctaccaaaaagacacatgagtatgttcattgcagcactattcacaatagcaaagacatggaatcaacctaggagcccattgaccagtgattgaataaagaaagtgtggtacatatacaccacggaatactgagcagccataaaaaagaatgaaattatgtctgttgcagcagcacaggtgcagttggaggccattattctaagtgaattaacaaaggaacagaaaaccaactattgcatgttcccacttataaatgggagctaaattgggtaaacatggacataaaaatggcaacagtagacactgggcactactagacgggggcaggaggaaggggagcaagggttgaaaaactaactgttaggtactgtgtccagtacctaggtgacagaatgaattataccccaaacctcagcatcatgcagtatacccatgtaacacacctgcacatgtatcccctgattctaaagtaaaactagaaattacttaaaataaaatatagcttaaaatatcaaagaagagactgatttgcattcatgttcacatgtaaatgactgacagcaggccctttcattgattactttattaggaaaaagggaaaacagagttacatgaggttgatgctgaaagtaaatttaccgattttgtcagagatcataatgaccttatatattagtttctgccatataaaataataatgtttttcttacacattaaaaaataaagtgctgtatattaaaatagtagctaatatttgagagagagaacgttgtagctagctatacttgctttttataataatgagagatagtattttacttggtacaaaaaactacaagtagtgttcagtttaaatgatttatttaggattatattaataatttcatattttaatatggctagtatttcatgtcatgtgtattgcaagctattcatatttttatagaaacatatttctgatttacaggttttttgccttattggttatgttccatcagttattctgttcacttatattgcttctttcacctttaagaaaattttaaataccaaagaattttggtcatttatctattctgtggtaagtcacattttacattatttcaactttccatagcagtttaattaacatgaattctttcctgattatactaaaaatgttacatgtcttttgtaagtgaataatttagataggtaattggcagcttctttttgtgtgtacatttgtcttctgaatcatcctttccacgtaggaacaatatggaagagatttagcaactagtgtatcaaggatactagctacaaacaagtggtattcttgttgcttgctggctaaatatcatctcttgttccatgttttattagaggattgaaaaaatagtttaatgcgtagacaccaatttgtaagaagtttctaaacactttgtcacttttatttatttatttttttctttaggcagcgttggcttgtattgcaatcactgaaataactttctttatgggatacacaattgcaactattcttcattatgccttttgtatcatcattccaatctatccacttctaggttgcctgatttctttcataaaggtaattctgctaaatattttaatatgttaaaaaacataaaataaatatggtctaatttggggatgttagttcttgtatagaaaacagtaaaatgcattgggctaatggctactacttgatttagatattattaatgcagcataaattattgtgagctcttgtcaaactgtaaattctcaaaggaaaagggctatgttcattacaggttctctcatgctcaaaatgatgtatataattagaagtgtgacatggtttcagtcagtatttgtttttaggagtttatcagtgattaaataacgtatttcactataaagggatgagaaagaataaagtgtaagagattttctccaagaaaaaatagagacaaaaaccagattgattttattaaggctggataattgaaagaaatttccatgtgattagaaaaaatattgttatgaattcttggtttggaattgctaattaattctacttactaatcctactacccctgcttccctttttaggtctcagttcaatgtgtttaatttatactgatcctcagaaatattttgggacagggaagattttaagtaaaaaacataacttactaatatgaacagctaacttattatagaaagtacacgtttgctaaacaaaatacattttttcattttaatccaaatatttctacatattgcagcgtatatattttcaaatctttttgtcttagatttcttggaagaatgtacgaaaaaatgtggacacctataatccatgggataggctttcagtagctgttatatcggtaagaaataaagtgtttttgtgaattagcatgtaccttaagaatggtttggtcctatggttttaactatgtttagttttttatcctgttgcatgaaaaagaaggtgcataaaaagttaagcatgttagttaacgctagctaatctgtatttcagtggggagtacctttcatttactgaatatgttcactttaatatacttagccttttacatgttattaattctgtttaattacagttctgtcttagaagcaaaaacaaagtttttgtgttcgattatattttatgaagctgacaataaatgaatgatacagaggcagaaaatatgtgaataatttgctaaaaataattctgctttggtttgtattaaaatttatttttaattatctttatcatgtaaaatataaaaaagttgtgattacttcttttggtaatggcaaggaacttgatgtatgtagtcttagttctgttggcaaaggaaaaaacaacaacaacaacaacaaatcttttagtcatgagctgctacatgttcttcttttagccttacctgcagtgtgtactgtggattttcctcttacaatactatgagaaaaaatatggaggcagatcaataagaaaagatccctttttcaggtcagttgattttttaaaaattttaaatgtttttagtatatttacagaactgtgtaaccattaccataacataattttggaacatttccagcactccaaaaagaaactttgtacccattaacagccactttcttatccctattcccatagctcccagtcttaggtaaccactaatctactttctgtttctgtcagatttgcctgttctgaacactttatataactggacaatggaaatatgctttggaaaacttgagtcaaaagaccaacaattctcttaaataccttgtatttaacttttatatctgtttgctttttaccatagttggttggcatgttattttaatgttggaaaatcatcagatttgccagataacatctttgaaaaattgctaggatttgggcactataattagtatctagcatatggttttacacttagtataatgtttggagggcttatcatgtagtcgtgtgtagcactttttatatatcttaatgagttgcttttacttttcaactattatgaacaatgctgctatgaattcagctattatgaacaatgttgctagtttgtatacaactgtttgtatggacatatattttcatttctcttgggtggatacctagaaatgggattgctgggtcatttgaggaattgccagactgtttctaaagtggtaataccattttacactcccgctaggaatgttttagggttctattttctccacatccttgccaatgcttgttattgtttgtcttttttacatattcttccaaatatattagctaatttgtttttactttttcttctatccagccttgcttacatgattcatcactttattatcatttcagcatcctcaacttttgtcttttcgaactgtccactaaaaattataattattggtgaatcgaattatatgctggaaaaaataacataaaagttccatttgataatactacatatttattccatataaattcagctggttttttaaaaaaaatattttagatttgggggtaaatgtgcatgtttgttagctgggtatattgcatactggtggggattgggcttctattgtaacattacccaaatggtgaacgttgtacctaataggtagtttttcaacccttatccccacccccttttggagtccacagtcctagtgtttccatgtttatgttcatgtgtatccactgataagtgagaacatgttgtatttgattgtctgtttataagtgagaacttataagtgagaacatgtggtatttgattgtctgttccaaattagttcacttaggataatggtctccagttccatccatgttgctgtaaagaacataatttcattctatttatggctgtggagtattccatggtgtatatgtaccatattttcttcacccagtcaactgttgatggactcttaggttggttctatgactttgctattgtgaatagtaccatgatgaacatatgagttcaggtgtcttttttatgtaatgattttttttttcctttggatatatatccagtagtaggattgctgggttgaatggtagttatattttaatactgtttggtaacgaataacattttcctagttagcaccttcttatctctttcttttcaatagttattcaaagctttctctttattccttgtattcctcaaatcaccttatcttacttcctacttctcagtaaataatcttgtcatttatctcagaaaatagaagcacttaattataagttataaatttctacaaacttactcacatcttccatcatttttgccttttcccagtcctagaggaagcagcagtccatcctattacccaaatcttcatttattctatatacttggaatattgctcaattttctttttctctttttctctttcctttctggatctcaaaagtgtattttttctctttttctctttcctttctagatctcaatagtgtatttttttctctttttctctttcctttctggatctcagtggtatatttttggggttggggagggtcacctttctttcatatatgaaagaacccatggatctcatttgaacatgaatccatccctaattcctattctatatctctctttcctttcatagccaaaattcttctatctccagttactcaccttccatccactcctataactccctgcaatctgggttttcccttacctttccattgatactattttcaataagataactaatgattttgtcttttcattgtctaataggctcaacttatttaactaatctgcaggctttaatatgattgacattgttctccttacacatttttctttttttttttttttttgagatggaatctcactctgtcacccaggctggagtgcagtggcatgatctcagctcactggttgaaacgattcttctgcctcagcctcccaagtagctgggattacaggcatgtgccaccacacctggttaatttttgtattttattttttagtagagacagggtttctccatggtggctaggctggtgttgaactgctgacctcaagtgatctgcatgcctcggcttcttaaagtgctaagattacaggcaggagccactgcgcctggccacatttttcttgttcctttgttttccattatgtcttctgtttgcctctgtacttcaaaattgcctttgcaagcacttcatcctctgtctatccctaaaaatggtgttactgtgggttctgatgtcaaccctctacatctactctttctgggcaatttcatttatactcaggttgtaaattttttgagggcaaggttcatgttttttcatctttctttctgtgtaataatacctgacacctactagtcataaataatattgttgaataaatgaatgaatttagataatatcgtccaaatgttatcagtcattgaaaaataatgcttgtggctgggcatggtggcttgaacctgtaatcccagtactttgggaggctgaggcaggtggatcttttgaggccaggagtttgagaccagcctgggcaacatggtgaaaccctgtctctactaaaaatacaaaaatgagccgggcatggtggcgcgtgcctgtaatcccagctactcaggaggctgaggcaggagaatcgcttgaacccaggaggcagaggttatagtgacctgagatcgtaccactgcactccagcctgggcaacagagtgtgagaccctgtcttaaaaaaaaaaaaaaagaaagaaagaaagaaaaaaaaagaaatatcgcttataattccacctttcagagataatcctagatcttatgttagtgtattttttcagtcttttctctacctagtatctgaatttcttactattttaattatttgaaaacctactgtcttttatatttattatatatatgtagaaacctttcaacgaagtctaaaaataggaagcttccagaaccaccagacaatgaggatgaagatgaagatgtcaaagctgaaagactaaaggtcaaagagctgatgggttgccagtgttgtgaggaggtaatttattctttatggctaagtcatagtaaatatgaaatgatcaattcccggtatatagaaattaatctgaaaaatatttttctttgcatatgaagcaatctgaaaaaaatctttcttggaaaaaaatacttcgtttacttacttttgaataagccagaatttcagtcataaatggatatttatttgtacagtatccccttattagccaatataatttttgtaatatggatatgaggtatgtgcagcctgtcatttcatgataagttttataactttctttttaaatacaatttttcttattagaaaccatccattatggtcagcaatttgcataaagaatatgatgacaagaaagattttcttctttcaagaaaagtaaagaaagtggcaactaaatacatctctttctgtgtgaaaaaaggctggtatttaatttttccttacataacttttctagaagagtaatttctacttttagtatgatttgattatgatttttttttctttcaattcctttaggagagatcttaggactattgggtccaaatggtgctggcaaaagcacaattattaatattctggttggtgatattgaaccaacttcaggccaggtatgatatataagagtataggatatgttgaatgtgatttatattgttaattaacataaacttttagtgacaaattcggattttatattcaatttttatgtatatttttagaattttttgtacagcctgatcaaattatgatcttttgggttatctgtaaaaataatgtgcatggtgaaattttcatagacacatgtagacacacgcatatacagtatttctgcttttgtaatgcttacatgcgtgagttatttgtctaccaacttaatggaagacagttttattagcttcaggagatatgggagcttgttttgacctgccatcagctagtcttttattataagcatgtcactgaccactttgtggatacttcacaaaactaccctgatcccatttcctgcttctctccccttgcttactttatgccagccacactaactcattgctttcctggaaaatgccaggcatactcttttctttgggtttttgcccaagatgttttctttgtttggctataccttataccctagaaatacatatactaaattcacttacctctttggctcaaatgtcaccttccagtgaagctccctgatcattagaattacatcttgctttttcatccaactctgtattaccctttctgaccaagtctctgaactctgacttagctttatatgtccttccatcatcaaacatcaaaaaggagtaaaacatctgggcgggtgcagtggctcattcctgtaatcccagcactttgggaggctgaggcaggaggatcacttgagctcaggaattcaagactagcctgggcaacgtagtgagacatcttccctcctaaaattcaaaaaagaaaaaagcaatagccaggcatggtggcacatgtttgtagtctcagttacttagtgataataataataatgacaataaaggagtacaaatctgacttgatattagtctggctgtaggaaggggttttaattaatgtacttgccacttccttcacagtgtaaattaagcaaaataataaaaattggtttgtgtttctataggtatttttaggagattattcttcagagacaagtgaagatgatgattcactgaagtgtatgggttactgtcctcagataaaccctttgtggccagatactacattgcaggaacattttgaaatttatggagctgtcaaaggaatgagtgcaagtgacatgaaagaagtcataagtcggtaaaataattgtctttagattccttttgttacttagaggaaaggtttgcatttcatatttttaaaatttcataacaagcatttctgtggacaatgatttttatagaaaatgtttattactttttcatatattctttatgatatatgaaaatatactgatagctgtaaattatgatagttataaaaaggtcattttttaatttctagttacaggataaatatacctatagatatcatgaaacttattttaattcaaagtgaaccattttatcaagatattaatttatttaaaatgatgtaaattggagacttttgcccttacctacttataataagcttcgactaagtaactattctagagaaaacaacatcagggatcacacccagttggtatttgtgtttatatatatcatggtattctcattttgtattgttcattttgcagaataacacatgcacttgatttaaaagaacatcttcagaagactgtaaagaaactacctgcaggaatcaaacgaaaggtactttcattaaacaccaaataatgcctgtatttttattgatagtttagtacctgatattgtcttgatagattccttatagtgaacctttgttaatttcccacccatctttttctttccatgtagttgtgttttgctctaagtatgctagggaatcctcagattactttgctagatgaaccatctacaggtatggatcccaaagccaaacagcacatgtggtgagtatggtacttgtgacacagtacatgatactttagaatagaacagtttcttttattataatagtttaatgttagttatatgtacatcttgattttaaatcctattcaaacgatacactagtaattaaaaattaaatagatttagagatttccttaagcttttaaaactttgcatatttttcatgaagtgttcataatattttacatattccgaaacagaaataagcatgagtcattattaagataaagagttctagtgttctgaatagtttttaagtttttttctagtcatttagcatacaaatgatcttttccataataatagtgtcttaaatttatgttgagactctttctaggacagtcatgcattgcctaatgacagagatacattctgagaaaggtgatgttgtcgttgtgcaaacataatagagtgtacttatataaatctctgggtggttatagcctactacacacctagactatatggtatagcctattactcctaggctataaatctgtagagcatgtcactgcactgaatactgtaggcagttgtaacacaatggtatttgtgtatctagatgtatctaaacacagaaaagatacattataaaagtattataatcttatggaatcactgttggaaatgtgtttcatcattgactgaaatgtcattatgcagtgcctgtaaagtactaattagttgaacaactctttttttttttttttttttgagtcagagtcttgttctgttgaccaagctggagtgcagtggtgccgtcttggcttactgcaacctctgcttcccaggctgaagcgattctcctgcctcagccttccaagtacctgggactacaggcaagagccaccaagcccggctaattttttgtatttttggtagagacagggtttcaccatgttggccaggctggtcccgaactccagacctcaggtgatccgcccccttcggcctcccaaactgctgggattacaggtgtgaggcacagtgcctggccttgaacaactctttaagcctcaacttccatgtctataaaatgtaaggtttggtttggatgcatgttacggttttcttatgattcaaagcctgttttggttataacatgaaaaggcatcaattttaaaatttatttgttgtcatacttttagcccatattaacatttgaaatcatagattttttttttccatttgacaagctttcaaaatgaagggaaaataaattagaatataaaagtcatggcctggcgcagtggctcacgcctgtaatcccagcactttgggaggctgaggcagcagaccacgaggtcaggagatcgagaccatcctggctaacacggtgaaaccccgtctctattaaaaatacaaaaaaaaattagccgggtgtggtggcaggcacctgtagtcccagctactcaggaggctgaggtaggagaatggtgtgaacctgggaggtggagcttgcagtgagccgagatcgggccacttctctccagcctgggggacagagcgagactccgtctcaaaaaaaaaaaaatcatagttgggcaggatgtaatagccatagcaattgatatttggtaagttttaattaacttaattaaccaaccggttggatttttaaaaacccatttttttttaacaaacagatgtgttcctctctttttgttttatttatgttttataggcgagcaattcgaactgcatttaaaaacagaaagcgggctgctattctgaccactcactatatggaggaggcagaggctgtctgtgatcgagtagctatcatggtgtctgggcagttaaggttgatgtctaaatagcgtgccattcaggggaagaggttgggggttggattttgaaagtcatcatttcaaaaacatggcaatagttagtaatttaaatgttaaatattttagtttttgagttagcttttgatagattgacttggaagtatgttgagttttttaaaaatatggctgtctactttgaatttgaattcacttaatatttcaataacttggaatattatttttaggcatagtacttgttatttcaaaaaattgttatatattggattaattatgtaacacaaatatgaaataaacatatgagtttctacttacataaataaataattgagtaaagaaatgtgtcagagaagaggtacatcttccttacagaacaattccaaataataatatatgtagataatacccacttcaagggaggaggcttaatctcctatcccccaagtttggacgggacttagccagtttcttgtaaaaaatgaacgacagaaggagaaaaatagtaactttacagttgagaaagctggcaaatactaccttaactaaacgatgttgtgcagatatcatgtattcactgatatgatatgatggaaaaagtactacagctgtgtaatattctctccaaaacccataacccaagtgtagtcatgagaaaaatatcagactaacccaaattgagggaccttctaacacacacctgaccagtacttctcaaaactgtcaaaatcatgaaaaagacagaaagagtaagaaactgtcacccacagttagagactaaggtgacgtgacagccaagaacactacggtatcctggatagaacctggaataaacaaaggacactaatagaaaattggtgaaatctaaataaagtatggagttcagtgacaaggaatgtaccaatgtcggtgtctcagttgtgaggaatttaccatggtaatataagatgataagattagggaaactgaaaccggataaagagtgtatggggatgctgtattttctttgtaatttttctctaaatataaaggtatatttttttaaaatgtagttatatgtgtgagagattattctttgaagctgtcattttatatctgagctttcttttaaaaaattacttcagatgtatcggaacagtacaacatctaaagagtaaatttggaaaaggctactttttggaaattaaattgaaggactggatagaaaacctagaagtagaccgccttcaaagagaaattcagtatattttcccaaatgcaagccgtcaggaaaggtaaaattttaaagaatgtggttatatttctttatagagcaaaggttataaaaagttattatattaaggattaagtgaaaaatcatcttttcattcatagaccatatatatatatatctctgtgtgtgaatatatatgtatattttttcatatatatgaaatatatgtatctgtagatagataatttatatatctctctctgtattatcaccaatactggactaatgaagtctgatggctggtgttttatatctgccttagtattagatttttcaatattcagtagtatttaaatttttttaacattcttagtagtaatgagagttgttttgcatgaaaatgttattattttaaacaattttcatccaactaaataccaaaataagttattgaatttaattttgaattttaaacatgttgaactttagctttagaacataatagtagtaatttttaatttttttccatattttatctttttttccagtttttcttctattttggcttataaaattcctaaggaagatgttcagtccctttcacaatctttttttaagctggaagaaggtaagtagtatcttctattttggcttataaaattcctaaggaagatgttcagtccctttcacaatctttttttaagctggaagaaggtaagtagttgaaaagcacttatgttgtagctctcaaattatgaaagaattttatttaaaaagtttaaaactggggactcggtttattttagaaactatggcagataagaagataaccttttattcatttaatctaagacacaggtaaacactaatgtcatagggattttgtagataaactctattgtaatgtaaaccttttacaatttttagagagcattgacacagtttatcacattgcatctatgagaagggtcagcttaattatcgagtctttgcagttagtccagcagcaagagctctgagtttcttgaatccttacttcatactggtccatagaagtagcaacactatcaagactccagtggcaaagagaattctgagtgtagcgaggggtgggcagtccccaaaattttaaggaagcttatagaatcttggcatttaaaaaataagtggtatgtaggataaatatatatatgctggtgacagttgagggagatcacctcctggaagaatcaggtattcatatgcagattattttatggcatttataaactgtgaaacaacctatatttatgtataaggtttattattaataattttcaaaataactacaggatttttatgattgttctttatgtgattactgaatacaaaaagatttcctgatactgtatatattcttgttgcagctatggattaatgggtttacttttgccaagaacactaattaattattttttggtctgtaatatatggcctgcatgatgttcattgtttattcatgtttattggccggcatggtggttcacacctataatctcagcactttgggaggctgaggcgggaggatcccttaagcccatggttcaagaccagcctgagcaacatagtgagactctgtttttacaaaatattttttaaaattacccgggtatagtggcatgtgcctgtagtcccagctaactcaggaggctgaggtgggaagattgtttgagcctgggaggtcgaggctgcagtgaaccatgattgtatacttgctgtgttgcccaggccactgtataccagcctgggcaacagagcaagaccttgtcttaaaaacaaaacaaaacaaaacaaaaggtttatggagataggaccaatatccagaatctagttcaagaagccagaataggctacagtggagttggagaatgggagataagagagcagggatcaaaagaagacatgaaaagaatcaccaggaaaaagataatggaggagaacttagaaaaagtgaaataagacaagtaacattcaacatacagtacttagggctatagaggaattataggtgtggggaagagaaaggaagtaagcgggaaaaataacatgttttggcagcttcaaatttaagtgggttgattacagagatattttaaaacattgttagccactttggtaggtattgccatttttttcagatattgataagtaaaatactatttttatattttaatagctaaacatgcttttgccattgaagaatatagcttttctcaagcaacattggaacaggtactataaagttaaatttttaaaaattattttatagaagaaagtatctgatatcgattgttttggtttatattagagagggagagatatcgtaaaccagtgacaaattggtacagaatgatcttaaacttggtataattttaatcaaccttaggttcttcacttactaattttttaaattttattttttaaattgatattattttaaattgacaaatcacactgtttattgggtacagtgatgttttgatacatgtgtgcaatatggaatgcttaaatcaagctaactttcatttgctgattttgaatatctgtttttttcattttgtaaagaaagtgagtcatgatggtggtgtttcacattagtgtatttgaaattacattgtttaagtagttatgaattattttttaaaaaacatatctattaatctaaaatagtattcatctttgcatgtaacttttgaaaataatctgtttgaataatgttaatgttaataaatctcttgatacttgttgatataactagatatagccttgtaccatttctgatttagttaaaagttctttgaggtacttgagatacagcatactgtattcatttatttcttttcacctaggtttttgtagaactcactaaagaacaagaggaggaagataatagttgtggaactttaaacagcacactttggtgggaacgaacacaagaagatagagtagtattttgaatttgtattgttcggtctgcttactgggacttctttctttttcacttaattttaactttggtttaaaaagttttttattggaatggtaactggagaaccaagaacgcacttgaaatttttctaagctccttaattgaaatgctgtggttgtgtgttttgcttttctttaaataaaacgtatgtataattaagtgaagctgcatgtttgtattgaagtatattgaactatatagtttgtatgtcatctttttcaccattcagaaacagtgcttctgaatttgtgatttaaaggaattgtaatagaatagttttatttttaagttatctttaagtttatgccatcttcttaaataagtacgtaatgttccaatctaaataaaaaactaattcataactaatgcatagaaaagatacataaagcaatgtgaaagtttcttgcttctcctttttaatttctaaaaaagccactttgaatggaagttgtcatccgtaaaagctgaagtgtaagcactaggaaatctcaatatagagatttgaggaaagttatatccactaggtggcagtcattgatcataataagtgaaatgagcccttgttctagtacatgattttaggcttaggtaattaggtatgtgaaattacatttctttaatttaaagtaaaattcagaaggttttagttattataattaaaggaagactgtgtgtagaatcttacgtaatagtctgattctttgactctgtggctagaatgacagttatctatggaggtggtagaattaagccataccttttccttcatcactcttggaacatataaattttttgtcatcttccttgcaaagggcacatttaattttgttcttgaataaaatattttattgggtatttgtttttattggtaaactttagtgaatctcttctataaaattgtaagtagatcagtgtgtagatttatttagtaacttacctcattgactttggaacatggtaggatatgaataaactctttcaagggttaaattaagaattgtaagtgcagtgcgcctatttctttttaataagaaccagaatttcatttttgatagagttaaaggcatggctaatattttcttagaaatacttccttgtacaacccatgtattggctcaaggtataaaatagtgtaaataatgctagttgacattacatttcaaccaaatgaaagtattaacttcataaaacaaatatattgagagtgtgattattgtattagacaacaacaacagcaatgacagaaggatttggtactgaattactttaaataagcaaaacctttcagtggcattattcattctttaatgtaggcaaaatttaatgaacttttagctttattgtgtaataagacatctgtgattttaggctctagcagtggatttaaaagtgttctttctcggtacaaagtacgtggctgatattttcccccattgctgggggcagttgctatacactttcctaaagtatatataatgttcacataaatacccagggacctcttttttgggatgtgcttttgtaattatgtgtaaccttgaatacttaagtttagtaaaagcaacaaaattatatctatagtttactaaggcagtcacgaaaaagcatagttttttttagaacctgaccatcctaagaaagttatgtcatctgaagatagagcatgactaatgaagaaaattacctgcttttgcacgtagatttggtaactttcactttacatttgtgaatgtgtaattggtgcaaagtaaattttttttcctgcaaagtgaaagttgagtagtcacaatcatgttatttattttgttcatttagttactttgcttttaatgtatatgaatacatgctcttgtaaacaattttaaaagacattcaaatttttttttagtttttatatactcagaatatattttggttgttaaattaaattatgttccctttttcacagtaacaaaatctgactcaggagaaatataacttaattcttaggaaaacaagggtaagtgagctggaaagcaaaggaggcaaaaagtgaaatatatttatttacagtgtacagttcatgtttatgaacatactaattttaaaatgtcttaaattactgatctcaaaacttttttctatgtcagtacagataaataaataaatatacatattaggcaaaagcaacatcaccaaccttatatttcccattcatggtcaaattttcaaaggaaagtaaaagctgagctttactgagtgagtgtttactgactaataaggcaagaaaaaacatgatgagtgtactttacatcttacttttgtgggctcttaatttttttttctagtttgttttcagtaaagacagtgggttttctttaaaataatttttttcttttaaatttgcacaaattatcttaggtcagtattttggttttaatcattaaaacatttttagagtaatgtaatttaacaaatattttaagtgattatgtttccagaaatggattctttggagagaactcggatgactatcagttttggccctgtaagatcgtggagatctgtaagatagatacttatataacttacataaaatatatataatatattacttatataacttatataactagctattattttatataactaactataatatgacaaatcctttgctagtagtactaacaacgttttataggagcacaattaattttacttaggataagtgttgttattattgtttttattgttgttctgttagttactcaaaacttcattctaattgtgccctgagtttgttaaaataccatactgtatttttgtgtaacatgtaaataggcattaatttttgagaaatagaaatgtttatccttaatgtatttttaatttgctaacattgattttttattttctttcctgaaatagcttatttcctaaaatgaaagaatttattctcagatgaataatttttatatcagctattcttatcaggtaaaagtttaattattttttatttataatatatgtaagcaattctcaatgctgctctttaagaaaaataaatatgattatattaataataagctttaagagttgaaaatttaagacaagtcattttgtatactgaagtgaattctttgttatttagtgctgataattgaataatgagtagctcatattaaaaatgatgcaaaaacctggcactaaaa

SEQ ID NO: 15289 - DNA, 55504 bp, Homo sapiens
gttgaattttttgttactgtggcttttggatttattggccttatgataatcctcatagaaagttttcccaaatcgttagtgtggcttttcagtcctttctgtcactgtacttttgtgattggtattgcacaggtaggtaatatattaatcttgcattcactaaatattttctttctgttttatgtagcttcttatactaccatgaatactacctttgatttaccaaaaaaattattttaaaattttagcatgaggaagaaatgatttctagagtatattttatatctagttttatttatgtttgtccaattttaagtttttagttaaatgttctgtttataaattttttactttttacttcagtgtatctcagtgatttatttcactgcagaaactcagtttgatagtaatgtgtttaaatgtcaagtaattcttattgcctatggcctggttatattgctatcatttgtacatttatctcagaagaatgcatgggagaaaattgtgtgtggagcagaacaaatttaccgtgagtgtagtggtggaataagtaggcctggtggattttgttggcccaggcttcatggaattgtcattcaaaataacattcagacttacaaatattatttttattagtccttacaggagtagttaggttctaaatggaagaagtcttataagaaatggctttgtagtggaacatgaatttggctaatgtacaaagaaaaaaatgtaattactaaatataagaaattactcatgttggttggatagaagttctgatttatgagatataattaaatattgagttaatcattttacttttttgagacctgagaatgattgttatacattttgagagttcattgagtccccgagtccgcgttctctaggaacgaagaattatagattcataggtttttgttgtgagtgggatggcctttcagtgtcattgaatttatcttcttcattttataaatgagaggactgaagcctagaatagtataattaaagcgtattcacttaatggcagggctaggacctaaatgaggcttcaacctccagtacatttctctttccatgctatcacaaatatctactatgaatactttaataattgtgttaattaatcaaaatacttgcttttctctattggaaagatgctaacctaattttattccctaatacttaatttgtttggctttcatatggatcataacccttttgtttgcatttgttattattaatattgcagtttgtttttatttcatttgttagtaattacattggaattaaatgcccctagagtgaatatatcccagttaaagaagcacaacattaaaaacatgattgaaaggaattggtttgataaacttacatttttgtaaagtctttattgttttccttataaatttatattattaatttggtcaagtgtttaatctattaaaaggcccagttggttactatcactctggatatgctaaataactcttaagtagtgttagcttttgcttgtttttgtcatttttatgtaataaagttagtgtttgtatttttcaggtcatgcatttagaagattttaatgaaggtgcttcattttcaaatttgactgcaggcccatatcctctaattattacaattatcatgctcacacttaatagtatattctatgtcctcttggctgtctatcttgatcaagtcattccaggtatgcagatggtttttgaattttactttaaagatttttaggcttttttgcccacatagggtcagcttaattttaagattttttttcctaaccagggtaccctaagtcatattcattgttaaagcttttaatttgactttaaataagtatattttgtaccttaggctatagccactagtgaacataaagagatcgtgtaaaaagagagcagttttgaaagccttaagtctctagttgatcttaccttggtccttctttatatcagtcttttttaattgaagtattttattttaccctctaaggtctaaaactatgaagtgatcttgtaactcctaccattttctttatctcctgtccacatctatagccaatatagcaaactcctgtagattcaatagtaatattaagtattgagcatatttccttttccacttgtattcctcattacctgtgtctgtattctacacctgtactgtcctgtatggtaactactagccatgtgtggcttttaaaatttaaattgattacaattaaatcaattaacaatttatttttttcagtagcacaggccacattccaagtgctcagtagccatatatggctgttagttactaaattgcatggtgcaatctagatgttctgtagaacattttgaccattataaaagttgtattgtgtaatactagtctagactagaggttcccaacccccaggacacagatcttactagctgcctgtgaggaactgggctgcacagtaggaggcatgtgagtgaagcttcatctgtattcacagctgctcctcattgcttgcattaccacctgagctccacctcctgtcagatcagtggcagcattcaattctcataggagtatgaaccctattgcgaaccgcgcatgtgaaggatctaggttgcatgcttcttatgagaatctaatgcctgatgatctgtcactgtctcccatcacccccagatgggaccgcctagttgcagaaaaacaagctcagggctcccactgattctaccttatagtgagttgtataattgtttcattatatattacaatgtaataataatagaaataaaattcacaataaatgtaatgcatttgaatcatcctgaaactatccttgctccctgtctgtggaaaaattttctatcacaaaaccagtccctggtgccaaaaaggctggggaccactagtctagaccattgcagtatctctcatctagttacatacctcaagtctgtctgagcacttcacccctttttttgaggttttattattttttaatagatttttggggaacaggtggtgtttggttacatgaataagtcctttagtgttaatttctgagatattggtgcacctgtcaccctagcaatgtacactgtacccagtgtgtattcttttatccctcacccccctcccaccttttccctgagcccccataatccattgtatcgttcttatgtctttgtgtcctcatagcttagctcccacttatgagtgagaacatacaatatttggttttctattcctgagttactttacttagaataatggtctccatttccatccaggttgctgcaaatggcattattttgttcctttttatggatgagtaggattcctttgtgtgtgtgtgtgtgtgtgtgtgtgtgtatgtgtgtgtgtgtgtatcacattttctttatccagttgttgggatgggcatttaggttggttccatatttttgtaattgtgaattaattatactgttatcaacatgtgtggggaagtatatttttcacataatgacttcttttcctctgggtagatgcccaggagtgggattgctggatcaatcggtagacttaccttagttctttaaggaatctccacactgctttccatagtggctttactagtttacattcccaccaacagtggaaaagtgttcccttttcaccacatccatgccaacatctattattttttgatgtttcgataatggccattctcgtaggagtaaggtggtatcacattgtggttttgatctgaatttccctgatcattagtgatgttgagcattttttcatgtttcttggccatttgtatatcttattagagttatctattcatgttcttagcgtactttttgatgggattgttcgttttgttcttgctgatttgagtgactcatagattctagatgttagtcctttgtcaacatatatatatagtgaagaccttctcccactctgtgggttatctgtcaactgctgattatttcttttgctatggagaagctttttggtttaattaagtcctatctatctttgtttttgttgcatttgcttttggcttcttggtcatgaagtctttgccttttttctgatgttatcgtctcaaatttttatggtttcaggtcttagatttaagtcttttatctatcttgagttgatttttgtatagggtgagagatgaggatccagtttcattcttctacgtgtggcttgccaattatcccagcaccatttgttaaatagggtgtcctttccctacatttatgtttttgtttgcttgctgttggagcagtaacagttcccagaggaatgccaagtactgataaaatcaattggaatcctctgtacttggcatcagatccctttgaaatgtggccaatctaaaagaagagtagatatttgaaaaaaatgaggagtgtaggtattttgagagggaaaagggagaaaatggaacatgttgtctgggcagttaccactgtatgccctttctttccttctttccttccttccttccttccttccttccttcctctctctctctttctttctctttcccctccctcccttccttccttccttccttccttccttccttccttccttccttccttccttcctacctaccttccttccttccgacagggttttgctgtgtcttttttgagacagggttttgctgtgtcttccaagctggagtgcagtggcacgatcacagctcactgcaggctcagcctcctgggctcaagtgatccccttgcctcagcctcccaggtagctgggactacaggcatgcaccaccgcatctgactaattttttgtattttttgcagagacaaggttttgccatattgcccaggctggtctcaaactcctgggctcaagcaatatgccagcctctgccttccaaagtgttgggattataggtgagagccaccatgcctggcctcattgtataccatttctaagtctcatatttctatcctgttgttttgttgctctccataattctgtagtcttttccatgaagcatatccacttttctagttactacctattttcaaagatcatttaagatggtgcccattcaagtcttcaacacattcagcctgtgttgtgttcttgccatttgctatctacttgtactcataaaggcattagttcctttagcatagaagatgtgctttattcacctttacctcccactcagcaattctgaaactatttatggactagaattatttatcaataaaactttgattcatacaatattgatttaatacaatacagctaatctttatttacttattacttttcaatgacaaatgaaaattgtatatatttattgtgtacaacatgatgtttggaaatatatatatgttgcggaatggtacctaaactttagatgcaggttgtcatatgtttgaaatgctgtctttatgatttaaaaactaattatggtaactcagttttttaatgtttatttttcaggggaatttggcttacggagatcatctttatattttctgaagccttcatattggtcaaagagcaaaagaaattatgaggagttatcagagggcaatgttaatggaaatattagttttagtgaaattattgagccagtttcttcagaatttgtaggaaaagaagccataaggtatggttcaatctttggcaatttaggtataagaactgctgatgaaacatttaaatcctattctttaaatatgtatgtaaatatggtatattagatttggtacatatgccatgattttaaaacattaataagggctacttttctctttttcttattttctttgcaaccatttagaataaagttggtgctaggtttgaaattttatgtttctttctttctgttttttgagacagaatctcgctctgtcgcccagcctggagcacagtggcacaatctcggctcactgtaacctccacctcccagattcaaacaattcttgtgcctcaacctctcaagtagttgagtctacaggcatgcgccaccatgcctggctaatttttgtatttttagtagagacagggtttcaccatgttggccagactggtctcgaattcgtagcctcaggtgatccacctgcctcggcctcccaaagtgctgggattacaggcgtaagccaccacacctgtcccctgaaattttatgtttggatggaaaattttaaaagtaataaaacctgatgtttatacaattaatgtttaaagcttttcccattatgtagactgaaacatgataaatattaactatataattttgttcatgctacattgttttatacagcatattaaattgtcatctgttaatttcatagatttttagggtttgaggcataattagaacatttcattactttaatttttaagaaccaaagaaattcattacgattccttgttaggtcagtcagtaccaaatttagaaataaaattaggtgaaagaaaagaaataaaataaaatgaaataaaaaagtgaagcataatattttttaaatttaagaaaaatgtaaaaattccagagaaagtcaaaatacttaagatgtaattcattggccagtggcctgctttcttaacggtaaattttaactgattaacaaatcatttccttaaaaaaatatgaaaaaaataaggtagaataagaaaatcacttcacatttgttaatggtttgaaatttgtgctgacatgaaatgacatctggtttatatcccccttcactgatgtaacaagtgtttgataatcagaaatgaaaaaaaatccataaattgcttaaatcagattcttcacttagttttagaagttgggttggcatgaaaaatgaatcaatgacgcttacaatggaaaggaatactatgcttttctcttgtaccttctttaaaataattttatagttgatccctgaaaaatacaagtttgaactacaccagttcacttatatgtggatttttttcagtaaatatattgaaaatttttttggagatttgtaacaatttgaaaaaactcgcagatgaactgttagcctagaaataccaaaaacaaatgttaggtatgtcatgaatgcataaaatatttatagatattagtctattttaacatttgctaccataaaatatacacagattatagtaagttatgctttatcaaagcttaatgtacacaatattgacagacctacattatgccaatgcccagttgagagaaatgtaaacaaatgtgaagatgcagtattaaatcatagctgcataatattaactacagtattactgtaccactgcaataattttgtagcaccttcttttgctgttatggtgagcttgtgtgttccaagcatatacttcgaatgccatgtgactcaattatctccttgtgagctgttcatctctccagtaaattgcatatcatgataaaaagtaatgtctcagggttcttgcttattttttattatgtgtagtgcaataccgtaagccttgaatagcatcatgggatccataggaattgccactagtgatgctggaagtgctctcaagaagcagagaaaggtcatgacattataagaaaaagttgaattgcttgtatgtaccatagattgaggtctgtgggtgcggttacctgtcatttcagatagactgtgcatcttgttcatcttataaatagatgatgtgaactgacggcattgataaatacagtataataatgtaaatatatattttttccttataatttcttaacattttctttagtgtacttcataaaaatacagtgtttaacatgtaaaacctacaaaatatatgctaaacaacggtttatgttatctgcaagacttcttatcaatagtaggctattaatagattagttttaggggattaaaaatgttatatgtgtattttcaactatgtgtggcagttggcactcctaacctgtgttttcaagtgtcaattgtattttcattatcaacattatttggttcattgttttagtaggaaagtactttattattattttattattcttataaaatgtgatagcattgataaaaatatgcatggtaaataaacacacatacttataaattgctttaaatacttaaaatataaaactttatatttcagaattagtggtattcagaagacatacagaaagaagggtgaaaatgtggaggctttgagaagtaagtagttttcctagtattcaggccatagtatttaaagtacaactagaaaaataatttgcatagcttgtgggaaatttaaacttctctaccatgattttctgtcttgcttttattttattttattttttttgagatggagtctcgctctgtcacccaggttatagtgcagtggcgttctcttggctcactgcaacctgcgccttctgggttcaagtgattcgcctgccttagcctcctgagtaggtgggattacaggtgtacgccaccatgcccagctaatttttgtatttttgtggagacggggtttcaccaagttggccaggctggtctcaaactcctgacctcaggtggttcgcccgcctcagcctcctaaagtgctggaattacaggcatgagccactgcgcccagcccctgtcttgcttttttgagatactttcgtttatgtgattaatattcaaaataaaactaacaacatgacatttgtaaaagtaaaatgtagtatctattaaaatgaaaaatactcaattatttgaataaggctatgtccttgtttcagtttattattttgcatgtatatgcaatacatgttagttactttttgaaaaattcatttggcctatcgtagggtttttcaacctcagcactactgacattttggtcctgataattctttgttgtgaagaactgttctttaatgtagaatgtttagcattgtgtcaatgtgttagtcagtccccagaaccaatagaatacacacacacacaaacacacacacacgcacacacacacacacacacacacacacacacacacacaccagtatgattgtagggtgggggattaggggaggtttgttttaagtaattacttcatgagatagtgggccctggtaaatgtagaaatctgtaaggcaggttggaaactcaggcaagtgttgaagtttcagtcttgagctcaaaatttgtagacaggctgacaggctgcacactcatgtaggagtctgttacattcttgaggcaggactcttccaaggaacctgttttttctcttaaggccttcaactgattggataaggtttaccattattatcaagactaatcaagtttaactcagatgattataaaagttaatgacatctacagcaacttctacatcagtatttgaccaaataacggcaccatagcctagccagggggacccataaaattaaccttcacaagcagcatccctggctttgatcaccaaagagagaaggagttctgcctcaagaatgaaacagattcttgcgtgagtttccagcctgtcagcctatgaattttggacccaagatggcaactttaactcttgcctgagttttcaacctgccctacagatttttgggacttactagaccccacaatcttctgaagcaatttcttaaaataaaccttccctaatcccccaaccccacactcatacttgctccattgtgtgtgtgtgtgtgtgtattctgttggttctggagactgactgacacgctgctaaacatccctggcacactgctaaacatcctctcccagttgtaacaaccaaaaatgtctccagtctttaccaaatgtcttctaggaggcaaattaatttattaagaagaaagtaggtatagtggtatactaatagggttttagtttgcatttgcctaataactaatgttattaatcacctttttatatgattattggcatttggaggttttcctttatgaaatgcctattcaagttcttttcacatttttgtttcaagacctttgttagatacaggtatttaaatatttgatctcagtctgaggcttgccttttaattctactagcagtgtcttttgacaaacacaagtcttaatttgaatgaagtccaatttatgaatctgttcttttatggttacagtgcttttcacgtctttttattcaacattggagattatatataacctccaatgtaagttattggtacaactagttaagtataattataattgtaataacaattacaactaattgtttctaatgcaaagaagcaagagaatgaaataaaaggcatccagattggaaaggatgcagtaaaattatttgcagttgacacaataatctatttttaaaatcttttagattgacaaaaaataatagtggaactaaacagtgagttttgcaagatgataggatacatgataaataatggaaaaatcaattgtatttctatatgttaccaacacataattggaaattaaaattaaaaatagcatttagcatcaaaaaatatgcttacaggtaaataagacaaaaatgtaaaagacatatcctgataagtccaaaacattgctgagagaaattaaagaagatttaaataaatagaaataccacgttcatggggcagaacacttaacgtttagttgttgagttccctttcttattttaacttagattattggcgttaggatctgagactttttccttcttgttttatatgttagccttcttagtctagtttttgttgttgtttgtttgtttttgagacagggtcttgctctgtcccccaggctggaggacagtggcacagtcttggcttatcatagccctgacttcccaagctcaggtgattctcccacctcagccttccgagtagctgggactacaggtgccaccatgcccagctaatttttatattttttgtagagacgggatttcgccatgttgcccaggctagtctcgaactcctgggcccaagtgatcctcccacctcagcctcccaaagtgttgggattacaggcacgagccactgtgcctggccagcctagttttttgataagccatttctgcttcatcatttcaggtccccatctcctgtcttccttcattcctttacatatccattcagtgatattgcttcattaaatctaacctttcaagccatttctatgctattggttaatttcttgtttttttgccagtttatttaaatgcctataaatatccttgggaacaaatttttgtttaattccattggttccattggtaattcccaaaaattgggacacagaaaattcccaaatattttgtatactcttaaatcttactgtatgaacaaataaagtttatttttatttactttcattactgtttatatcgttgactgtaacaaagaagctgttttacctgctatcaaatatgctggtaactttaaatatgtatttatagatatagtgccttgaagattgctcaaatattatgaattatcatgcatagctgaacagacataaaaattacatttgagtcttcttttttcctgaactagatttgtcatttgacatatatgagggtcagattactgccttacttggccacagtggaacaggaaagagtacattgatgaatattctttgtggactctgcccaccttctgatggtgagttttctgtcttaaagaaaaaaaaacttcattatatatattctttaaatgtgtattgaataatttttgtcaatgggaccaacttctgtatctgtaaaggtgttttctttttttcttgattatacacatgtggttgtttttagtagaagataaaaatgattctatcatgtttaataaagtaaaaaggatctaattttgtacatatttctatacatatacacacgtagatgtgtatgtatgtgtttttattcatcattttcaagggaggataaatgagtaacttattggaaattaaatcagaactatagactatttgaggttgagaaaataaacacaaatatctaaatatacagcaatagttcagcaggaaataattgtaaatgttcatactatcttctaaaatagaattttaaaggcatacctcaaaagtataattttgatatgtgattgtttggtaggtgagaattcattatagtagctccatattatgacagtaaccaaatagagtggcagtacaataaatattttactttacaaaagggctgaattgtattgaatctgcatttcaactctttaaatgttatttaacttttaaaattagtttgattttgttctttgtccttagttgtatcactctttgatggtagtcataatatcttacatttgtataagaatttatgatttttcctcatgattcttcataatgtatgattgttttaattttcactattaaaacaatgaatatattagtgttcactgtataaaaaaggaaagctggaatttaaagagattaagtaatttggccatgaccacacagctagttaggataaaatttatagttctttaatccctccactattgcacagtgtctagaaaattgttactggaatacaagtgtaaatagtgtatcaatagatatttatgtttagtgtcaagcttttactttcttgcttttcccactatgttatatgacctgtaagtgatggaaaatgagattgaaatataagtggatgcggatcaccaataatattgaagggtgtgttgtgccttgtaaatttatattaatttttaccttatatgtctgttataaccaaataactaagttatcaggatacttgaaaacatacacattataaaataattaatgtacatttaaatatatattttgcttttagggtttgcatctatatatggacacagagtctcagaaatagatgaaatgtttgaagcaagaaaaatgattggcatttgtccacagttagatatacactttgatgttttgacagtagaagaaaatttatcaattttggcttcaatcaaagggataccagccaacaatataatacaagaagtatgctattcatatagaaatctttacttttatttcctgtaatcaataaccttttgtaatgacttgtgcaataaaaatatgcttgaaaatctaaatataacacttgttctgagccagcaaacagaaagctattacaaagaattagacagaatttggagtaaatgttttagcacacataaaagtttgtttcatctggaggatgcttgcctgccttattcctgccttctcttgctctcatctcctctaccccctcccacttccacacatacattaagagccatcacagtgatctcttattccttccctaccacccaagaaggcacaaaattaaaacctttccctcaagaatcttgttacctgttgttttcataattatatatgagtatatgtcaaaggcagttccatgctaaaggatcatttttaaagttgatattaaaattatttaaaaacctatgttacttaaatatctaacacattaaaacttaaaatatttaaaaagtaatattgataattatataaatggtatgatttttaaaataacattgttcatgctttacttttacaggtgcagaaggttttactagatttagacatgcagactatcaaagataaccaagctaaaaaattaagtggtggtcaaaaaagaaagctgtcattaggaattgctgttcttgggaacccaaaggtaaataaatattacttttacagatgagctcattttaaattatgtcgaattaaaaagcaggttgtagaaagatataatacattatgtaaaggttaagtgtacataaaatgctgtatgttattatggatataatcatagtaatgagattttaaaagtgaagtcagaaagatgtataactttttttaattttagtagctgtcaaggtactaaaggtttttggttacatggatgaattatatagtggtaaattctgaggttttagtgcacccatctcctgagtactgtacatggtactcaatatgtagttttttttattcctcacccccttccaccctttcctttctgagttataacatctttatgataactggttacttttaggaaggagaatggaagaatagactttagttatgactgccatgttttctttctttctttctttctttctttctttcttctttttttttttaatttgtagagacgagaccttgctatgttgcccaggctggtcttgaactggcctcaagcgatcctcccgcctttgccttccaaagtgttgggattacaggcatgagccaccacgcctggcctccatgttttatttctttaaaaaatgatctgaagaaaatgtggccaaaaaataacattgctgaattggaatggtagctataatagtattactctcttgttctctatagtttaaaaaatatttgttatagttaataacaaaagttaagaaatagaacaaaatcaaaggagtgattcagtttatcactgtcctgctttgattttgtatgtatttgttttatgctgttctctgtcatagaaacagagaaacaactgatgtaccactttacacagggcatcaaaactgacaggtgcatgcatgcagctaggatgatctcctattgatccccaccatcctgccacattcccccttgctgttgcagctggggaatgattctggatcctggctttatgttcattagtcttcctctcagccaccaccaccatgttcttttttatattaaaaatagtcttgaaacaaattgcttcccttgaactactataaaaccatatattcttctccaaaaaagcaagtgttacatctacaaatttaattgttaaggataatagcaatatacttaatgttttgtttttagtttgtttgtctgactgttgttatacttttgtcttgtgtattacaggcagtcttttagaattaaacctgggaaaatattcacatgtcaaatttataattttaaaaatttatgtgaactcaattatgaatgaaaaaatctgatctaatatatttctgattgaaaataataatttgaaatggggcagttttttagtgtccacatgcctgtttaatatttagtttttctgaggattccctgcccttcttcacctcttttcacacagatactgctgctagatgaaccaacagctggaatggacccctgttctcgacatattgtatggaatcttttaaaatacagaaaagccaatcgggtgacagtgttcagtactcatttcatggatgaagctgacattcttgcaggtgagatttttgttttattttcgaaggctgagatcatgggccaaaaggaagatggatatagagatgctaattcctgaggtataaatagagaagcttttacctagtggtatgtttccttcacaaaaaaagttctaaaaaattttaaaatgatacatttttgtgttgagaatctccaagaccatcccaggtttagtgatgtcctagaagaactcatatgactcagcacatagtcatactcatgactatgatttattacagcaaaaggatacaaagctaagttagcaaagggaaaaggtatatgaggcaaagtctcgaggaaaccaggtagaagcttccaagagtcctactcccagtggagtagacagatgtgctttaatttcttcagcattgagttgtaacaacatgtgtgaaatatctacttgggaaagttagtatatactcagtgttcaagattcttattgggtgctgatcacataaacatcttctgcctagcacataccaaagttccagattctcagaaggaaagaagttgtttggcataaaccacattgtttgtacagtttaggcactgagccactcttacctgttttgagaatagtaggaaccctcccaaatccaagttctcaactaacagccaagggccaaccttgtaagcaggcctttctaaggatagaagcctctgacctgctatgttaactcttttctgcacaattttatacacatacatacatataaagaatccaagttgaagtcaacacatgacttttaatagctatgacagatatagaagtttgaaattcttgagcaacttctgtctgcttataatataatctaataaaattgggcaagtcattcatgtcttcagtagtacctttatttttaaaaacccaacaaactaacatttgttcttcttattacttttgttgatttttggagttgtttctacatttggttataaaggaaattgtgaaagtgcttgtattggtaagccttttaggaaaaatatatttggaataacatatggtaagtagactctagagtcagactccttgagtagagttcctggctttgttacttaatagctgtatgaaacatatataaggaatgtattttctttttaccttagtattcatatctgaaaaatagttgatgataatctagtaccatcctcataagactttttgtgatgattaatgatatcataatgtggatgactctcatatgagaaaccataaaatgtaaatgccaattattaatgctgttgatactttagaaattgaaatgtaaatatttatctgcagataggaaagctgtgatatcacaaggaatgctgaaatgtgttggttcttcaatgttcctcaaaagtaaatgggggatcggctaccgcctgaggtatcattcatttttattgacattattctatattatactcttgctatactgttattatgttggaggcttgctgttatatgctttgaccatcatttatggtactaaatttaatttaaagccttcataatttacttttggctgtttattgtataatcattaattgtgatttttggtattctctagcatgtacatagacaaatattgtgccacagaatctctttcttcactggttaaacaacatatacctggagctactttattacaacagaatgaccaacaacttgtgtatagcttgcctttcaaggacatggacaaattttcaggtattacttactttaagtctcttggtgtttgaactgggatcctatattgggaataggtttcattgatttcctttttgtttccttctccatgtagtattgccatgctcccaggtggccagagttaatattctgtttctgctttattttgtttttgaaagccagaaaaaacacagcaaaatttttttttttacaaacaccatgcaagaaactgtaactaatatattaaatacttaagaaaatgttaaaaaacgtaaaaataattgtgtttactttgttgtcaagaaaaaaaagaaattgcttgtaggcctcctgagagtaaggcatatatgtatatagtttatatacattctcaggttcttttatagtttcatgatttcataatgaattatatgataaatccttgaattcttttaattgaggcattattttttaattttttaatgaggaactcaaactcagtctccttcctctgtttaggaattgcttgatagacaaaaggatgttattgatgtaagtacattgtgcagaattttcatagcatttatctcataatcagaaaaatacttgttttttttttaaaaagaaatcacaaattaagtggactgaagtacacttgccaacttaatgcactctgcctatcattctatctacttatacccacctatctcctattctttagtaacatttatatgtgcttattttctaccagatgctggtctgtgccttttgcaattattagtttatttcattatcccaatatttcaagaaatacatgagataaatactattattgctttcattttacaaatgaagaaactgagacataaaaagatttaaggaacttgcccaaggtaacacaggtagaaagtggtggagctgagttttgaacccaggcaaatcagttccagaactcatggttttcaccaccatactttgttgttgactcttacatttctttgaaaaattgtcacggtatttcactggatttcacagtgtcttctgggatctcctgtaggatggaccgtaagacctcttaagggaattcataatgtcagcactttttctaataataccaaaatgttatttgccttattgaccctcagcttctcatgattatacagtgttttccagagactgcataatatgtgctatcacaacagattgaatacagaaacaaatatgagaacccatctgtcttctgttaagacagacattaaagagatttgcagaaatgtaaaacaatattctcttctcattatttttgttttaaaagatgcagtttttaaaaataaaattgtgttaacccgtaataggtttacttttttattttttaaaagatgaataagtatttaaatgattactgtatgttttctaatgtacatatttattttattattcaatatagtaacattctcagttttaatttcaaatactgtaaaatttttgttagtttataatatgatatagatataatatggtaatagatatgataatagatatattcccatatataaaatttctttgaggtccttaatttataagaatgttaagcctgttacttaggctggagttcagtgccacaatcacagctcactgcagcctcaaactcctgggctcaagtgatcctcccacctgagtctcctgagtagctaagactacaggcttgcatcagtatttatgcctagctaatttatttttattttttgtagagatgggtcatgatatgtttcacaggctgttcatgaacttatttttaaaggatattttacaataatttatgataatatgcttaaagatatactattctttcatttttttcttttaggtttgttttctgccctagacagtcattcaaatttgggtgtcatttcttatggtgtttccatgacgactttggaagacgtatttttaaagctagaagttgaagcagaaattgaccaagcaggtaaaaacagaactaacaaaacattttaggcaatgaatcagacagatggtgaataagacaaaaattatataaatgtaattttatattttttttagaataaagggtagaaataagtaaataagtaatgagatactgatagtgataggagtaatgcaggaaataatggggtggtcttagaaggcagcgaacttagattatatcatcaggaaggactttgttgagatgatacttgacctgaggcctgtataatgagaaaaatcaagtaggtgaagattttagggcagaaattttcagataaagaactgcaactgcaaaggtattaactgaggaatgagttggatgtctttgagggataaaaaaaggctaccatggccggagccatagtgaagctattacacagcaaagtcaggaggatactcaaagggatagatcatgttctgcctttgaacgtctggaaaacaatttcatttgttttcctattgtagtgtggaagctatcagagagttttaaagcaaataggtaccatgatctgatttgaatttttaaaaaaacacgttctggttgttgaatgataagagtattataaaggaagtgtggaagtaggaagaccagttaggaaactgctatagttaatactatcttgaactagggtgtcagtgaaaatagggaggccgggcgcagtggttcatgcctataatcccagcactttgggaggccaaggcagggagatcgcttgagcccaggagttccagaccagtcttggcaacatggcaaaaccttgtcacaaaaaacacaaaaattagccaggtatggtagtgtgtgcctatagtcccaactactctagaggctgcggtgggagaatcacctgaggccaggaggtcaaggctgcagtgagccatgattgcaccactgcactctagcctgggcatcagaaggagaccctgtttaaaaaaaaaaaaaaaaaaaaaaaaagggaaagaacagatatttgggttatactggtggtagtggtgatgagttgctgatagattgagtgttagaggctcaggagaagttggaatgaagaataattcctaagcttttgataactgggaatgagattgccatttcctgaaaataggggaagaataggtttgtggaaagaaggaatgcaggcatgagttttttccttttttttttttttttttgagtcttgctctgtcacccaggctggagtgcagtggcaccatcccggctcactgcaacctccgcctcccaagtccaagtgattctcctgctgcctcagcctcccaaacagctgggattacaggcgcccaccaccacgcccagctagttgttgtattttttagtagagacagggttttgccatgttggccaggctggtcttgaactgacctcaggtgatccgcccgccttggcctcccaaagtgctaggattacaggtgtaagccactgcgcccggccgaggcatgaattttgagtatattgtttgagatgcatctggagttaaatgaagatgttacggctgaagatacagatttggaagttactcacaggtagatggtgctatggaattggatgaaatctcttagttgggtaaggagtgtagataagaattgaggggcaagcctcctgggtgagcagtggagaaggagccaagagggctgaccgtgaatgagcaattattactctactttttcatgaaagagtggaaatggaaaaacctagaaaaatggtgtttaggaaagaggaagtggtcagttatttgtcaattgctgtgaagaataagatgaggacaaaaaaggtagttttggtaacagaggacggtgagggatttggtagactgtaagagtggtgatcttgacagatcaatttcatgatgcagtaaggagcaaggtggatctattcagtttacggtaagaacatgagttgaggaaactttcttatgatcgaaggttagcaaaatgtttgtagtggcaggtgaggagagcaaaggaaaccaggatgttagttcacagttgttaaaagagttgagatgctgcaaatacacattttgcatgaatgccgagtgggtgatgattaaaatcattgtgataccaaagtcaagaatcaagctgaatatatcatcatgaagtaaacttgcttatattatgctaaaataaatctggaacttaaaatattactagaatttaattattcatggtttggtagtcaaattttaaaagattggccttattgtgtgggaacaataatttgtcagcattgctaactgtaaagttgctcctgtagtcctacgtttatgataccagatgcccactttcaaatgcagtgaggagaagccatatatttttgagttcttaatttttcttttgttattatgtctggatcaaagaagatttatctgaaaattaatgtatgtgattttgtagtttctccttcttttgaaatttttaaatgatgaagtgggcattctgcttttagttcaccctcacaaattgtggaagaatccacaataaaacttttatattgaaagtgcgtggccttaatggaattaaataactaaaaaaagaagcaagtctcccaaatttgttttaatatcttgagtactaatatactgaaccactacataaaattaatattatataatctgatttctttttatattattatctaaattaaaaaatacatgtattggcccaaaagttataatgttcttcctaaagttatctcactagtacattctctttaatatttgcattaactgttaatatttttctgtgttgaaagttctgaatgtttttgagtttaaaataaacctcaattgtgtagtattttattcttgccattaaataaatatatgtttatggtttaattggtagaattttatttttttatttatttatttttatttttttttattattatactttaagttttagagtacatgtgcacattgtgcaggttagttacatacatatacatgtgccatgctggtgtgctgcacccactaactcatcatctagcattaggtatatctcccaatgctatccctccccgctcccccaaccccacaatagtgcccagtgtgatgttccccttcctgtgtccatgtgatctcattgttcagttcccacctatgagtgagaatatgcggtgtttggttttttgttcttgcaatagtttactgagaatgatgatttccaatttcatccatgtccctacaaaggacatgaactcatcattttttatggctgcatagtattccatggtgtatatgtgccacattttcttaatccagtctatcattgttggacatttgggttggttccaagtctttgctattgtgaatagtgccacaataaacatatgtgtgcatgtgtctttatagcagcatgatttatagtcctttgggtatatacccagtaatgggatggctgggtcaaatggtatttctagttctagatccctgaggaatcgccacactgacttccacaatggttgaactagtttacagtgccaccaacagtgtaaaagtgttcctgtttctccatatcctctccagcacctgttgtttcctgactttttaatgattgccattctaactggtgtgagatggtatctcattatggttttgatttgcatttccctaatggccagtgatggtgagcgttttttcatgtgtcttttggctgcataaatgtcttcttttgagaagtgtctgtttatgtcctttgcccactttttgatggggttgtttgtttttttcttgtaaatttgtttgagttcattgtagattctggatattagccctttgtcagatgagtaggttgcgaacattttctcccattttgtaggttgcctgttcactctgatggtagtttcttttgctgtgcagaagctctttagtttaattagatcccatttgtcaattttgtcttttgttgctattgcttttggtgttttagacaggaagtccttccccatgcctatgtcctgaatggtaatgcctaggttttcttctagggtttttatggttttaggtctaacgtttaagtctttaatccatcttgaattgatttttgtacaaggtgtaaggaagggatccagtttcagctttctacatatggctagctagttttcccagcaccatttattaaatagggaatcctttccccattgctcgtttttctcaggtttgtcaaagatcagatagttgtagatatgcggcattatttctgagggctctgttctgttccattgatctatatctctgttttggtaccagtaccatgctgttttggttactgtggccttgtagtatagtttgaagtcaggtagcgtgatgcctccagctttgttcttttggcttaggattgacttggcgatgcgggctcttttttggttccatatgaactttaaagtagttttttccaattctgtgaagaaaggcattggtagcttgatggggatggcattgaatctgtaaattaccttgggcagtatggccattttcacgatattggttcttcctacccatgagcatggaatgttcttccatttgtttgtatcctcttttatttccttgagcagcagtttgtagttctccttgaagaggtccttcacatccctcgtaagttggattcctaggtattttattctctttgaagcaattgtgaatgggagttcactcatgatttggctctctgtctgttgttggtgtataggaatgcttgtgatttttgcacattgattttgtatcctgagactttgctgaagttgcctatcagctgaaggagattttgggctgagacgatggggttttctagatatacaatcatgtcatctgcaaacagggacaatttgacttcctcttttcctaattgaataccctttatttccttctcctgcctaattgccctggccagaacttccaacactatgttgaataggagtggtgagagagggcatccctgtcttgtgccagttttcaaagggaatgcttccagtttttgcccattcagtatgatattggctgtgggtttgtcatagatagctcttattattttgagatatgtcccatcaatacctaatttattgagagtttttagcatgaagggttgttgaattttgtcaaaggccttttctgcatctgttgagataatcatgtggtttttgtctttggctctgtttatatgctagaattttaacataaagtacgtaaataaatttttattccaaatacatttggaatgtttaactgtaatttaaatgaatattaaatattaaaatgaaatctgaatgacataccttattcacactactgaatttgttataccttttaagtgttgtgctaataatctgtatgatcacactgtcattgatcatgtacaacctcagtaatcccaggaaattatattgaagtaggcattggctcttaaaccttccaaagactaaagatgaagttgaagggcagaatttggctgaaaactgagcctgaggctaaattttaattgagaagtaatgtaaagccaggagaggactctcaaacatggtgataagagagaagtctcgtgtatgatcaggatatgatgctaagttgtggtcagagaggaaaagttcacataaaagttggatattatacagatacagagataataagatcttaaatatggatatgtatccagtttgattttgaactagtggaattataccatgtgtctcctttgcatctgtcctctttcactcaaaatgacatttgtgaagttcagccatgttgttatgggtacagtagtttgttcattttcattggtttacactattccatagaatagtgttcttgttcttagtagaacaagaacattctcatgttcttgtacatgtgttttggtgaaacctgtattcatatctctgttgggtttatacctgttggggatctcttgggtcataagatatacatatgttcagctttaatagatactgccagaatataagagagttccatttgttccacataactgccagaccaatgcttctttaaatgttcctgcttcagaaagtttgtatcttttttaatgaacatactgaaatgtttgttttgttttggcaaatagattatagtgtatttactcagcagccactggaggaagaaatggattcaaaatcttttgatgaaatggaacagagcttacttattctttctgaaaccaaggctgctctagtgagcaccatgagcctttggaaacaacagatgtatacaatagcaaagtttcatttctttaccttgaaacgtgaaagtaaatcagtgagatcagtgtaagtataattatcacccttatacctgatggattgctttttaaggatacacattggttttaccatcttaatttttaaaatgttaacatatgtaaataatttatatagtttcgaaagattaccactgtaatttcacaatgttagagaaaaaaattacaataatttcatcgaataccctgtcttacactttttaaactagcatttattgtctcatctataaagtgaggaaataacaaatattccctaattgtataattttttaattactgtcattgtatctttttctttctttcacctgggagcacagattcaagtttccttgaatatattaatacactccccattgtatcttaaattttgttttgcgtttctattttttcgctattttttgcgtctattagttagtttttataaccactttttgtaagtagcaggaaaaatgagttttacctctatttatcctatgaggaaactgaaaaataaagaaggctacatagctagtagatctgggatcaaaatgacatctcaagttagctttagcccttctcagttaggttctcctagggtactaggaactgaataatttggaaataacattaaccactttcatataccacacacctatcttgttaagtccaaaatgtcagtagtaataaggcttaatcattaagattaagaatattgttatatgtttggaatatgctaaatttatatgctcttctttgaccaaattcagtgtcaaacaaatgtcaatcacgtatctgatttattccctggtcggcattactgaaagaaaaatgtttatttaaatcagcatgtttcaatttattttattatttttttatactttaagttctgggatatatgtgcagaacttgcaggtttgttacataggtatgcatgtgccatggtggtttgctacactcatcaacctatcactacgttaggtatttatcctaatgctatccctccccagtcccaaccctccaacaggccccggtgtgtgatgttcccctccttgtgtccatgtgttctcgttgttcagctcccacttatgagtgagaacatgtggtgtttggttttctgttcctgtgttagtttgctgagaatgatggtttccagcttcatccatgtaccttcaaaggacatgaactcatccttttttatggctgcatagtattccatggtgtatatgtgccacattttctaaacaccactctcataaaatacactcagaaaaataattaaaataccatctgggctcggtggctcaagcttgtaatcccagcactttgggaggccaaggcaggcggatcacaaggtcaggagatcaaggccatcctggccaacatggtgaaactccgtctctactaaaaatataaaaaaattagctgggtgtggtggtgggcgcctgtagtctcagctacttgagaggctgaggcaggagaattgcctgaactcgggaagcggaggttgcagtgagccaagatcgtgccactgcactccagcctggcaacagagtgagactccgtccctgcccccccgcccccccaaaaaaagaaaattaaaataccttagtcagctttgactgccatgacaaaataccatttactgggtgacttaaacagagtattattttctcacaattctgatggctgcagttctgagatcagggtgccagcatggtgatggctgtcttcctggcttgcagaaggccaccatctcactgtgtgctcatatgacctcttcatgtacactggcatgcaccctctggtgtctctttataaatgtactaatcccatcatggggaccccaccctcatgatgccatctgatgcagattacctttccgaagtcccatttccaaataccatcatatgggagttagggcttcaacatacaaatttggggaggcacaaacattcaatccataacaaaatgtgttccatggtcaaatacatttagaaaatattactcttatattccctatattaaagagttattcattagcataaaaaacatgagatgttctctggtaaagaaattccttcaactttgtttaacctcatgtttccaaatattatttaattgtgaatattttttaacctaaatcacttcttaacttattatggaacttgatcaatgccatatgcttttgaaatcttagatataacaatttaagaatttttttaaaaaaattacggggtatgtgaaatttataaattgctgaagtatgataatctaagctctccaactgcttgttaggacacttattacatgtgatatatagatattttatcagataagtagctgctcttcagataaaagggcattgtagtataccttgctttgcctcctgagagcagcagtggcaattaatatgataaaattgcgattaggatgagatttcaaagatatcagccattcagagtttaattgtatttttatttgcttctctatatctaaaatatttttcttgttacgtgaaaagtaaatggggctgggtgcagtggctcacacctgaaatcccagcactttggaaggctgcagcagctggatcacttgaggccaggagtttgagaccagtctggccaacatggcaaaaccctgtctctactaaaaatacaaaaattagccgggtacagtggcacatgccagtcgtcccacctacttgggaggctgaggcatgacaatcgtttgaacctgggaggcagaggttgcagtgagccgagatcacaccactgcactccagcctgggtgacagagcaagactccatctcaaaaaaaaaaaaaaaaaaaaaagtaaatggttaagatagagacaggacaggaagtaattccttcaggagtagagacaaatatttgagacataatgtcttgtgttttaacagttataactacgtgtttacatactcttagaaaaatttaagggcatcactgatctaaaatacacttttataacttttaattttgtcgtacagtattggctttctctccagtattgtcataagatcattttggggaatacgatttcttatttttttttttcagttttttttctttgtttttttcagtgattatcttttaactatctagagtttaaatctataccaatgtaggctggtcaaggtggctcacacctgcaatcccagcactttgggaggctgaggcaggcaagctccttgtttgagctcaggagtttgagaccagccttggcaacatggcgaaaccccatctctataaaaaataacaaaaattagttgtgtatggtggcgtgtgcctgtagtctcagctatttgggatggtgaggggagaagattgcttgagcctgggaggtggaggttacagtgagctgagatcatgccattacactccagcctgggtgacagaaccagaccctgtctcaaataaaaacaaaaaaagtccatatcaatgtgaagggagagttttaattgattttcatattaatgtacctttgtaccctgagctgtgttgttttttttttcttttcaggttgcttctgcttttaatttttttcacagttcagatttttatgtttttggttcatcactcttttaaaaatgctgtggttcccatcaaacttgttccagacttatattttctaaaacctggagacaaaccacataaatacaaaacaagtctgcttcttcaaaattctgctggtgagagtgtgtgaaggtctgtgaacgagtgttggcatggagcatggggttgaggggtggataaaggtctggattttaaaactatatttaaggtaaaggcatggtctgtctgcatgaaatctaaattatagttcaatacgtatcttattgatgctgaagaatatattacagtaaattttggtttacaaataaatgacagttttggccaggtgcgatggctcccacctgtaatcccagcactttgggaggccaaggcgggtggatcacctgaggtcaggggatcgagaccatcctggctaacacggtgaaaccccgtctctactaaaaatataaaaattagccaggcatggtggcacgcgcctgtagtctcaggtactcgggaggctgaggcaggagaatcgcttgaacccgggaggcggaggttgcagtgagccgagattgcaccactgcattccagtctgggcaacagagggagactctgcctcaaaataaataaataaataaataaatagttaaaaaaatttatactttgtataatagtagaatttccttttttaataataacgttattcttactagcatgttttatgctgataagtccatgatgagcaaaatatacttcaaaagttgaaaaaccctctttacaaagagttgtagtacataatatttatacaggtatgtgtctgcatagaagtgttttaattcttcaaggacagtctgaagaattagttaaaactaagaaaaataagacttaaatataaatatctctaattgaatatattagatttgtaatggatatttttggctttgctattagtattcttaccatgtagttgtcaaatatgaaaaaaatttaaacatacagacttgagcaaagctcaaaacaaaaaactgacatagtgttctgattttcaaaatattaaaagctaatacaaactttattcatatgtgatcagttgttcctataacatctcctattctgtagcagactctttggggtttaacctttctaacacttcacctacattctagtatcattcctttttgattcactaattcaaaaaagactttgcccagtattaaaataataagcatggctaggaatgattataaattagtattaaaataatcactgttaaaatctggtgcgtgttatattacataaccttcattctttctggtaaagatgtatttattgatggataaatgagtgagaacatggaaaattacctggagcatggaaaattaatggaaaattactcgaatggaaaatgttaggttttgcaattttttttctttcattaggaaatttcattatgaattctcgttttggttttaaaatacattttatattgctaatatataatccttacactgtgctaatcttgacattttttatatgtgtccagggaattgtacatgtatctcaaatatttcttttttttttaaaggaacttggattcaaatcatatctttttgctttgagttaattctcattgatctgcagaaattctagtattttcagtttgtctcttaattttttattattcttagagttgcttgcttatgcatgccatattttcctaagccttgtgtgtgttccaaaataaaaccacttttttttgaaccactggcctctgtgtgtatatatattgggtggtatcttacccaccttgcagagctttttgtatctcttgtgctgtggttccttcacttataatgtgtctctcttctcagggtacatagctggtcttgcaagttagagataagagatcagttaaggtactaggttgggagtaaagtagtgtcaccattctctatgacactgagatctagtgctgtgtctgatccaccctgccatactattcagttactagtaatgttttgctttgtttgatttaaatttctctctaaagtcacatttgtccttccctgaatcctgatttttgttatgatggaggagaaactgcatctattcggcagacatgttggtatagatttaaatcccgacaggatttaaaatcttactcttggctccaggtactttagagaatgtagagatgtgattatgtgtttgaatattttaaggtagttaaggcaattgacatgtctgcccagagcctacaaaaaattctctagggagtgatgttaccacacctatacctttctgaacttagcaggttatcttgttacctaaaattgtcagatagatttttattcttattatttaaccaaatttcatgtgttataggttaacttttcaatgttaataatagttgtagcagcagcagcagtggtggcagcagcagcagcagcagctaaaatatgcgcagttactatgtgtcaggttctaaactctgtgtatatattcagtcatttaattctcaggatgatcactctacctataaggcagatatacttattttacccactttacaaaagagggaacttaaggtccagaacatctaggtaacttgcttgaaggacgaatagtttaatgttacaactcaactttaaaaccaggctgactggcttcagagccaatgtacttacttgcgtattcgctaatgaaaataaaatatttctctaaaaatagaattatcttcccagtgttactaaaagcctcgtttagactcattttttattatttgcttattttctaacaccagactcagatatcagtgatcttattagctttttcacaagccagaacataatggtgacgatgattaatgacagtgactatgtatccgtggctccccatagtgcggctttaaatgtgatgcattcagaaaaggtaagatgaatgcagtgaatgaatatccatttgggagttatgcaagattaaaacgtttcttctaaaattaattatttgttgatttgaccttatgagttagaaattagattttacttttggaaataactagctgtctttatttatgatatatttcattacttcacagatgaccaatatataaagttacagaaatttagttttttaaaaaattatatgcttgtttaaaatattaaaatatctgtacattccaaaccagattgtctttatctgtcattgagtattatttctgtgagttgttgaagcagtttttctgtatgagaattagctttgttggtgagaaaagcttggtacatatcaataatatatccgcttatatacagtatgtaataagtgtcttttttttaattgtaggactatgtttttgcagctgttttcaacagtactatggtttattctttacctatattagtgaatatcattagtaactactatctttatcatttaaatgtgactgaaaccatccagatctggagtaccccattctttcaagtaagccaatgtatatacagataaatttccatatgcatgtcatatatataataaccattaaaaactaagcaaaaataacaaaatatgtagaaatttatcttgtgagatctcttagacttcttaaaactcaagtgagaaacggtttacattaaggtttaggattccccagtagaagtatgtttcagggtaaaggagattctgttttggtattaatatttgtataaggaataagtgtgttctatattgatcatagaataaaatataagataatttttaaatgaatattttttacctaaaatccaggtattgggtattgaaaaaaacttgagaagtcacccaggcaaccatttttcctctagatagaactgttggattgtacatatcagaatcaagattacagaaaagtatccaacatattttctcttaatccttttgattttcatatgctaaaaaataaatggacaaatatctgtaacaatattttctatcttcttcttttcatacttttaaaaacagcttcattgaaatataatgcccaatcaacctgaccattattcaaagtatacacttcggtgtcttttattatgcttatagagttgtgcagtcatcactacagtcagttttaaatatgccatcacccccctccaaaaaaaataacccttatactcattagtaatcactcatttcctctcatacccactcccaaccctaggcaaccactaatgtactttctgtttctatggatttccttattttagacattttatataaatggaatcatacagtatgtagtcttttttgtctgctttcttgtacttagcatactgctttgaagattcatctgttttgtaacacgtatcagtgcttcatttatttttactaccaaatcatatttcattgtgtggaatgtatggaatgtttatgtgaaatactgcattctacttatctgttcatcagttgatggcatttgggttatttccaccttttggctattatgagtaatgcttatgaatatttgagtagaagattttgtatgagcatatgtttttatttctcttggatatataattaggagtggaattgctagatcatctagtaactctatgtttaacacttgaagaactgccaaactgctttccaaaatggttgcatcattttccatttccagcagcagtgtctgtggagaggtatctcatattatgaaatatttcaaacgtacagaaaacgaaccacctactatccaaatatttcaaatgttaatattgcataatatttgtttttagtaaaacttttaagacacaggtgaaaactcatgttacccctctccaatcttgtttccttctctcctccgtaggagtaaccgcaattcacaatttcacaatttgtaattcccatacgtgtttttttgatgttactacatatgtctgtatccataactattacacaagattttacaacttacaattttcaacaacactgacatataatcatactatatttcgaaagaaatacatgggagtttttgaagctaactattcatatatagtcgtattaatatttcaaatttgtttcttcattagattctgtatgattggatccaactgtagtctcattcatttccacttcttgcactactagtctacatatttgtgggttctttctgagcctccactgtcatattacgagagtttcagacaaattctgcaatgtcatatgacctgaactttggaattgacttaattgctaaataggaaaactcagaaggctaggtttcagcaagacagtgatgtactctgtctctatgtcatcccatggaggggtgtgccagtgcgagggtatctgctaggcactgcggattctattccagtgcagagtaccttctctgtcccacgggtctgtattcttatagaacaaggggaggaaactgaccttggtgagggtggctgataatatagtatccttggacttgggtaatctgcatttgaagtgctagctgtttattgattgtctgggaaagttagctgactgcacctggatccctggggaagctaacgacattggggcctgtgggagttaattcctcttctgcttgggagaagaagttctagttccataggaagctgagcttggatatagcttttcccaattaaaaagacaagagcaacaaatatcattcttagatatttattattatttcataggaccactatggtggacatactaactgcttttcaaatacatcattcatttttatgaaattgtgaagcgtaatttatatgcctgattattctgtgttgtagacaggaaaatgaaagtaaaatgatttgcttaggatcagatagttattaataagtggcagagttggtaatattgtccacaaccacctgttaatacatctgccactcattctttcatgtagactatgcctgggttagatattctaatacattctttctgaggttttgatttttttttgatataagatatatcctaagatatatcttaagatataaaatgattctcagttccatttgttactctgtggttgtctttcaggaaattactgatatagtttttaaaattgagctgtattttcaagcagctttgcttggaatcattgttactgcaatgccaccttactttgccatggaaaatgcagagaatcataaggtaatgactcagttaaaaatatataatttgctaataagaagtgtcatataaaaataacctatttgcttgattgcaaggcttagtataattgttatttcagaaataagtaaatggaatataaatacatttattatagtttcttattgtaataagtgataattaatatttattatttgagacttgctacatgctttaaaaattatattctctaattctcacaacattgtgaggtaagttttttgttactgatttcttatagatcaggaaatcaaagatgggattgttcatatgacttgctcaggttgactcaacttgtttaaattgtggatttgggaagtgactgtgatctttatgttcttaactggcaaactaacatgcccgtcccttttatcctttaacagaggtattaagtagtcaaggtgctaaattcttattaatggaaaaaaaatagatgaaagtgattgtcatcattagggccttggagaaattgctaagtatacagaggttctttggtattctttcactttctttttacgcctttcccttttgttttccttcaggcatatagcgatcttgtacagtctttggttgttcaaagcctcccactttttcactctgctgagattatatcttactgctctaataaaaattctgatcttcttcatggatgatcttaattcagtaaaaacaaatttgtctaaattaatttacagactgtgatgaataatgagctcattattttaataaattctaaaaaaataaattgtaggccaggcgtggtggaccacgcctgtaatcccagcactttgggaggccgaggtgggcggatcacctgaggttgggagttcgagactagcctgaccaacatggagaaaccccgtctctactaaaaatagaaaaaaaattagggcgtggtggtgcatgcctgtaatcccagctactcaggagggtgaggcaggagaatcacttgaacccgagaggcggagattgcagtgagccgagatcatgccattgcactccagcctgggcaacaagagcaaaaactccatctcaaaaataaataaataaataaataaataaaataaataaatacattctaataaaaattttgttatttgtttactataaaagtaacacatatctctatttttaaaataatattcaatttttgttaaatatactcattgtagtaatgtataaattatagaaaagtataaggaatatagaaatccataacccactgcacaataataaaatttactggacatttgcattttctttcttgtttcaactgaaacattttttttccaatataaattttttatttttatttatttattttttaatttttttatttatatatatatatatttttattatactttaagttttagggtacatgtgcacattgtgcaggttagttacatatgtatacatgtgccatgctggtgcactgcacccactaacttatttttaattaaagtttctattttgagatagttgtatattcatgtttgtttgttagaaatgacagagagatcctgtgtactctttacattttgtcccaataataacatctcgtaaaattatagtacaatgtaacagggtattggcattgacacagtcaagatacagaacatttctgtcaccaaaaagattcccattttttgctctttcctagcctctctgacctgtggcaaccactactctgttctctatttctgtaattttgatagttcaaaaatgtaaaatggcatcacaataagttttcttttgggattggcttttttcaaatagcattttttttgaagttcatcctatttgtatttatcaataatccattccttttcattgctgagtaatattccatggtatggatacatcacactttctctaaccatttgcctgttgaagaacatttggattgttttccgtttttggcttttgtaaagttgctgtggacatttgcatacaggttttgtgtaaacatcattttcatttctctgagataaatgcccaagagtgcaattgctgaattatacatgttaattttataagaaattgccaaattattttccaagatgagtgttccattttatgttatccctaccagcagtgtgtgaatgacaaaagtttgaattatccaaaataattgcatttgccttagcttatgtttttattcttgtattagaatttacatgtgtctcatgttctcataattcattgaacagaaaacttgccaattttgttcatttctcctcttcttaactaatctttatatttcatgcttcctttatctctgtggacagctctttcatataataccttcagttattaggagtagatatttttatagatgacaaaaatcaactaaataaaattgttaggtatttggatttatgaaatattttagaaatttcaaattaaatgagaacatgagataggaaaactatgatcatttgagtttaccattaacaaacttgtgacgtaaataacaccttagatttatatgctataccagtgtacacaaaaggctttgaacatttcaaaagctttcacttaagctgaaagccttatgtaaatccaaaggatacttggcaatttattagtgtttttatttatgaaaggttcatttttaaaactgagaattctttttctgtgtaaacatgtcttcccatctgtttccacagtatttcaaaagtagtaatgttttggctatttattatttgtatagctgtaaccccaaccgccatgacaccttttgctttattttaatctcagtttcttggcagcactactgtattctgattcttaaaaattttgttgaaattgttacatctcagaaataatgagccaaattaaaggctaaatggaatttgtatttagtgtgagggggacttttattacctataagcctggaatgtaacctttttggttttgctgatgtaaaattaagagatctacaataatttactaatttatttgtgtgtttctaaagtgtctaaaattataataaattgtttttcattttttttagatcaaagcttatactcaacttaaactttcaggtcttttgccatctgcatattggattggacaagctgttgttgatatccccttattttttatcattcttattttgatgctaggaagcttattggcatttcattatggattatatttttatactgtaaagttccttgctgtggtaagttaacgttagttgtactcatgctatttatagatagaatgttatttaaaatctgttataaacatgacagttgacttattgcataatttggttattaatttgttaaagaaaatagagcaagtgtgtctggtatttaatacatgtaatcattttatatgataagtgacttttaaaaacaataacttaccaccattttaaaataatttcttgaaactaaagtgatctttcatgtagaccacctacttgggtgtaatcaggaacgttttaatatattccttccttaaaatgccttccttcgtttttcttatgcctgaaaataatttcacaaaggataagctcttttattccatagtttaaaatatagcttaacatttctctatctcaataatgggcaggctgcgagccagatgaagaacacaactccatttacaatagccacaaaaaattaaaatacctaggaatacatctaacagaggagatgaaagatctctacagggagaactacaaaacattggtgaaggaattcagagatgatacaagcaaatggaaaaaaatttcatgctcatggattagaagactcaatatattaaagtggccatactgcccaaagcaatctacagattcaacactattcctatcaaactaccaacattattcatcacagaattttaaaaagctattctaaaattcatatggaaccccaaaagtacccagatggctaaaggaatcctacataagctgggcgcgggggctcatgcctataatcccagcactctgggagaccgagacgggtggatcacgaggtcaagagatcaagaccatcctggtcaacatagtgaaacaccatctctactagaaatacaaaaaaatagctggacgtggtggcatgcgcctgtagtcccagctactcaggaggctgaggcaggagaatcgcttgaaccggggaggtagaggttgtgttgagccaagatcgtgctactgcactcaagcctgggcaacagagagagactttttatcaaaaaaaaaaaaaaaaaggaatccatgtaaaaagaacaaagccagaggcatttcattacctgacttcaaactatactataaaggctccagtgaccaaaacagcatggtattggtacaaaaacagacatgtagaccgatgaaacagaatggaggacccagaaataaagccacacatctatagccatctgatcttcaacaaaattgataaaaataagcaataggaaaggactctgtgttcaataaatggtgctgggatagctggctagccatattcagaagaatgaaattggacctccacctttcaccgtatgtaaaaagtaactcaagatggattaaagatttaagggtaagacatcaactataagaattctacaagaaaacataggaaataccattctggaccttgggaaagaatttatgggtaaataagtcttcaaaagcaattgcaacagaaataaaaattgacaagtggcacctaattaaactaaagagcttctgcacagcaaaagaaactatcaacagagtaaatggataacatacagaatgggagaaaatacaaactatgcatccaacaaaggccaagtatccagaatctataaggcacttaaacaattcagcaatcaaaaaacaaaactccattaaaaagtgggcaaaagatatgaacagacacttctcaaaagaagacatgcaaatggacaacaaatgtatgaaaaaatgctctacatcactaatcatcagagaaatgtaaatcaaaaccacagtaagataccatctcatgtcagttagaatggctatgattaaaaagtcaaaaccaacagatgctggcgaggctgcagagaaaatgaaatgcttatatactcttatatactcttggtgggaatgtaaacttcagcagccatggaaagcagtttggagagttctcaaaaaacttaaaacagaactaccttataactcagaaaccccattactgggtatatatccaaaagaaaataaatcattctaccaaaaagacacatgagtatgttcattgcagcactattcacaatagcaaagacatggaatcaacctaggagcccattgaccagtgattgaataaagaaagtgtggtacatatacaccacggaatactgagcagccataaaaaagaatgaaattatgtctgttgcagcagcacaggtgcagttggaggccattattctaagtgaattaacaaaggaacagaaaaccaactattgcatgttcccacttataaatgggagctaaattgggtaaacatggacataaaaatggcaacagtagacactgggcactactagacgggggcaggaggaaggggagcaagggttgaaaaactaactgttaggtactgtgtccagtacctaggtgacagaatgaattataccccaaacctcagcatcatgcagtatacccatgtaacacacctgcacatgtatcccctgattctaaagtaaaactagaaattacttaaaataaaatatagcttaaaatatcaaagaagagactgatttgcattcatgttcacatgtaaatgactgacagcaggccctttcattgattactttattaggaaaaagggaaaacagagttacatgaggttgatgctgaaagtaaatttaccgattttgtcagagatcataatgaccttatatattagtttctgccatataaaataataatgtttttcttacacattaaaaaataaagtgctgtatattaaaatagtagctaatatttgagagagagaacgttgtagctagctatacttgctttttataataatgagagatagtattttacttggtacaaaaaactacaagtagtgttcagtttaaatgatttatttaggattatattaataatttcatattttaatatggctagtatttcatgtcatgtgtattgcaagctattcatatttttatagaaacatatttctgatttacaggttttttgccttattggttatgttccatcagttattctgttcacttatattgcttctttcacctttaagaaaattttaaataccaaagaattttggtcatttatctattctgtggtaagtcacattttacattatttcaactttccatagcagtttaattaacatgaattctttcctgattatactaaaaatgttacatgtcttttgtaagtgaataatttagataggtaattggcagcttctttttgtgtgtacatttgtcttctgaatcatcctttccacgtaggaacaatatggaagagatttagcaactagtgtatcaaggatactagctacaaacaagtggtattcttgttgcttgctggctaaatatcatctcttgttccatgttttattagaggattgaaaaaatagtttaatgcgtagacaccaatttgtaagaagtttctaaacactttgtcacttttatttatttatttttttctttaggcagcgttggcttgtattgcaatcactgaaataactttctttatgggatacacaattgcaactattcttcattatgccttttgtatcatcattccaatctatccacttctaggttgcctgatttctttcataaaggtaattctgctaaatattttaatatgttaaaaaacataaaataaatatggtctaatttggggatgttagttcttgtatagaaaacagtaaaatgcattgggctaatggctactacttgatttagatattattaatgcagcataaattattgtgagctcttgtcaaactgtaaattctcaaaggaaaagggctatgttcattacaggttctctcatgctcaaaatgatgtatataattagaagtgtgacatggtttcagtcagtatttgtttttaggagtttatcagtgattaaataacgtatttcactataaagggatgagaaagaataaagtgtaagagattttctccaagaaaaaatagagacaaaaaccagattgattttattaaggctggataattgaaagaaatttccatgtgattagaaaaaatattgttatgaattcttggtttggaattgctaattaattctacttactaatcctactacccctgcttccctttttaggtctcagttcaatgtgtttaatttatactgatcctcagaaatattttgggacagggaagattttaagtaaaaaacataacttactaatatgaacagctaacttattatagaaagtacacgtttgctaaacaaaatacattttttcattttaatccaaatatttctacatattgcagcgtatatattttcaaatctttttgtcttagatttcttggaagaatgtacgaaaaaatgtggacacctataatccatgggataggctttcagtagctgttatatcggtaagaaataaagtgtttttgtgaattagcatgtaccttaagaatggtttggtcctatggttttaactatgtttagttttttatcctgttgcatgaaaaagaaggtgcataaaaagttaagcatgttagttaacgctagctaatctgtatttcagtggggagtacctttcatttactgaatatgttcactttaatatacttagccttttacatgttattaattctgtttaattacagttctgtcttagaagcaaaaacaaagtttttgtgttcgattatattttatgaagctgacaataaatgaatgatacagaggcagaaaatatgtgaataatttgctaaaaataattctgctttggtttgtattaaaatttatttttaattatctttatcatgtaaaatataaaaaagttgtgattacttcttttggtaatggcaaggaacttgatgtatgtagtcttagttctgttggcaaaggaaaaaacaacaacaacaacaacaaatcttttagtcatgagctgctacatgttcttcttttagccttacctgcagtgtgtactgtggattttcctcttacaatactatgagaaaaaatatggaggcagatcaataagaaaagatccctttttcaggtcagttgattttttaaaaattttaaatgtttttagtatatttacagaactgtgtaaccattaccataacataattttggaacatttccagcactccaaaaagaaactttgtacccattaacagccactttcttatccctattcccatagctcccagtcttaggtaaccactaatctactttctgtttctgtcagatttgcctgttctgaacactttatataactggacaatggaaatatgctttggaaaacttgagtcaaaagaccaacaattctcttaaataccttgtatttaacttttatatctgtttgctttttaccatagttggttggcatgttattttaatgttggaaaatcatcagatttgccagataacatctttgaaaaattgctaggatttgggcactataattagtatctagcatatggttttacacttagtataatgtttggagggcttatcatgtagtcgtgtgtagcactttttatatatcttaatgagttgcttttacttttcaactattatgaacaatgctgctatgaattcagctattatgaacaatgttgctagtttgtatacaactgtttgtatggacatatattttcatttctcttgggtggatacctagaaatgggattgctgggtcatttgaggaattgccagactgtttctaaagtggtaataccattttacactcccgctaggaatgttttagggttctattttctccacatccttgccaatgcttgttattgtttgtcttttttacatattcttccaaatatattagctaatttgtttttactttttcttctatccagccttgcttacatgattcatcactttattatcatttcagcatcctcaacttttgtcttttcgaactgtccactaaaaattataattattggtgaatcgaattatatgctggaaaaaataacataaaagttccatttgataatactacatatttattccatataaattcagctggttttttaaaaaaaatattttagatttgggggtaaatgtgcatgtttgttagctgggtatattgcatactggtggggattgggcttctattgtaacattacccaaatggtgaacgttgtacctaataggtagtttttcaacccttatccccacccccttttggagtccacagtcctagtgtttccatgtttatgttcatgtgtatccactgataagtgagaacatgttgtatttgattgtctgtttataagtgagaacttataagtgagaacatgtggtatttgattgtctgttccaaattagttcacttaggataatggtctccagttccatccatgttgctgtaaagaacataatttcattctatttatggctgtggagtattccatggtgtatatgtaccatattttcttcacccagtcaactgttgatggactcttaggttggttctatgactttgctattgtgaatagtaccatgatgaacatatgagttcaggtgtcttttttatgtaatgattttttttttcctttggatatatatccagtagtaggattgctgggttgaatggtagttatattttaatactgtttggtaacgaataacattttcctagttagcaccttcttatctctttcttttcaatagttattcaaagctttctctttattccttgtattcctcaaatcaccttatcttacttcctacttctcagtaaataatcttgtcatttatctcagaaaatagaagcacttaattataagttataaatttctacaaacttactcacatcttccatcatttttgccttttcccagtcctagaggaagcagcagtccatcctattacccaaatcttcatttattctatatacttggaatattgctcaattttctttttctctttttctctttcctttctggatctcaaaagtgtattttttctctttttctctttcctttctagatctcaatagtgtatttttttctctttttctctttcctttctggatctcagtggtatatttttggggttggggagggtcacctttctttcatatatgaaagaacccatggatctcatttgaacatgaatccatccctaattcctattctatatctctctttcctttcatagccaaaattcttctatctccagttactcaccttccatccactcctataactccctgcaatctgggttttcccttacctttccattgatactattttcaataagataactaatgattttgtcttttcattgtctaataggctcaacttatttaactaatctgcaggctttaatatgattgacattgttctccttacacatttttctttttttttttttttttgagatggaatctcactctgtcacccaggctggagtgcagtggcatgatctcagctcactggttgaaacgattcttctgcctcagcctcccaagtagctgggattacaggcatgtgccaccacacctggttaatttttgtattttattttttagtagagacagggtttctccatggtggctaggctggtgttgaactgctgacctcaagtgatctgcatgcctcggcttcttaaagtgctaagattacaggcaggagccactgcgcctggccacatttttcttgttcctttgttttccattatgtcttctgtttgcctctgtacttcaaaattgcctttgcaagcacttcatcctctgtctatccctaaaaatggtgttactgtgggttctgatgtcaaccctctacatctactctttctgggcaatttcatttatactcaggttgtaaattttttgagggcaaggttcatgttttttcatctttctttctgtgtaataatacctgacacctactagtcataaataatattgttgaataaatgaatgaatttagataatatcgtccaaatgttatcagtcattgaaaaataatgcttgtggctgggcatggtggcttgaacctgtaatcccagtactttgggaggctgaggcaggtggatcttttgaggccaggagtttgagaccagcctgggcaacatggtgaaaccctgtctctactaaaaatacaaaaatgagccgggcatggtggcgcgtgcctgtaatcccagctactcaggaggctgaggcaggagaatcgcttgaacccaggaggcagaggttatagtgacctgagatcgtaccactgcactccagcctgggcaacagagtgtgagaccctgtcttaaaaaaaaaaaaaaagaaagaaagaaagaaaaaaaaagaaatatcgcttataattccacctttcagagataatcctagatcttatgttagtgtattttttcagtcttttctctacctagtatctgaatttcttactattttaattatttgaaaacctactgtcttttatatttattatatatatgtagaaacctttcaacgaagtctaaaaataggaagcttccagaaccaccagacaatgaggatgaagatgaagatgtcaaagctgaaagactaaaggtcaaagagctgatgggttgccagtgttgtgaggaggtaatttattctttatggctaagtcatagtaaatatgaaatgatcaattcccggtatatagaaattaatctgaaaaatatttttctttgcatatgaagcaatctgaaaaaaatctttcttggaaaaaaatacttcgtttacttacttttgaataagccagaatttcagtcataaatggatatttatttgtacagtatccccttattagccaatataatttttgtaatatggatatgaggtatgtgcagcctgtcatttcatgataagttttataactttctttttaaatacaatttttcttattagaaaccatccattatggtcagcaatttgcataaagaatatgatgacaagaaagattttcttctttcaagaaaagtaaagaaagtggcaactaaatacatctctttctgtgtgaaaaaaggctggtatttaatttttccttacataacttttctagaagagtaatttctacttttagtatgatttgattatgatttttttttctttcaattcctttaggagagatcttaggactattgggtccaaatggtgctggcaaaagcacaattattaatattctggttggtgatattgaaccaacttcaggccaggtatgatatataagagtataggatatgttgaatgtgatttatattgttaattaacataaacttttagtgacaaattcggattttatattcaatttttatgtatatttttagaattttttgtacagcctgatcaaattatgatcttttgggttatctgtaaaaataatgtgcatggtgaaattttcatagacacatgtagacacacgcatatacagtatttctgcttttgtaatgcttacatgcgtgagttatttgtctaccaacttaatggaagacagttttattagcttcaggagatatgggagcttgttttgacctgccatcagctagtcttttattataagcatgtcactgaccactttgtggatacttcacaaaactaccctgatcccatttcctgcttctctccccttgcttactttatgccagccacactaactcattgctttcctggaaaatgccaggcatactcttttctttgggtttttgcccaagatgttttctttgtttggctataccttataccctagaaatacatatactaaattcacttacctctttggctcaaatgtcaccttccagtgaagctccctgatcattagaattacatcttgctttttcatccaactctgtattaccctttctgaccaagtctctgaactctgacttagctttatatgtccttccatcatcaaacatcaaaaaggagtaaaacatctgggcgggtgcagtggctcattcctgtaatcccagcactttgggaggctgaggcaggaggatcacttgagctcaggaattcaagactagcctgggcaacgtagtgagacatcttccctcctaaaattcaaaaaagaaaaaagcaatagccaggcatggtggcacatgtttgtagtctcagttacttagtgataataataataatgacaataaaggagtacaaatctgacttgatattagtctggctgtaggaaggggttttaattaatgtacttgccacttccttcacagtgtaaattaagcaaaataataaaaattggtttgtgtttctataggtatttttaggagattattcttcagagacaagtgaagatgatgattcactgaagtgtatgggttactgtcctcagataaaccctttgtggccagatactacattgcaggaacattttgaaatttatggagctgtcaaaggaatgagtgcaagtgacatgaaagaagtcataagtcggtaaaataattgtctttagattccttttgttacttagaggaaaggtttgcatttcatatttttaaaatttcataacaagcatttctgtggacaatgatttttatagaaaatgtttattactttttcatatattctttatgatatatgaaaatatactgatagctgtaaattatgatagttataaaaaggtcattttttaatttctagttacaggataaatatacctatagatatcatgaaacttattttaattcaaagtgaaccattttatcaagatattaatttatttaaaatgatgtaaattggagacttttgcccttacctacttataataagcttcgactaagtaactattctagagaaaacaacatcagggatcacacccagttggtatttgtgtttatatatatcatggtattctcattttgtattgttcattttgcagaataacacatgcacttgatttaaaagaacatcttcagaagactgtaaagaaactacctgcaggaatcaaacgaaaggtactttcattaaacaccaaataatgcctgtatttttattgatagtttagtacctgatattgtcttgatagattccttatagtgaacctttgttaatttcccacccatctttttctttccatgtagttgtgttttgctctaagtatgctagggaatcctcagattactttgctagatgaaccatctacaggtatggatcccaaagccaaacagcacatgtggtgagtatggtacttgtgacacagtacatgatactttagaatagaacagtttcttttattataatagtttaatgttagttatatgtacatcttgattttaaatcctattcaaacgatacactagtaattaaaaattaaatagatttagagatttccttaagcttttaaaactttgcatatttttcatgaagtgttcataatattttacatattccgaaacagaaataagcatgagtcattattaagataaagagttctagtgttctgaatagtttttaagtttttttctagtcatttagcatacaaatgatcttttccataataatagtgtcttaaatttatgttgagactctttctaggacagtcatgcattgcctaatgacagagatacattctgagaaaggtgatgttgtcgttgtgcaaacataatagagtgtacttatataaatctctgggtggttatagcctactacacacctagactatatggtatagcctattactcctaggctataaatctgtagagcatgtcactgcactgaatactgtaggcagttgtaacacaatggtatttgtgtatctagatgtatctaaacacagaaaagatacattataaaagtattataatcttatggaatcactgttggaaatgtgtttcatcattgactgaaatgtcattatgcagtgcctgtaaagtactaattagttgaacaactctttttttttttttttttttgagtcagagtcttgttctgttgaccaagctggagtgcagtggtgccgtcttggcttactgcaacctctgcttcccaggctgaagcgattctcctgcctcagccttccaagtacctgggactacaggcaagagccaccaagcccggctaattttttgtatttttggtagagacagggtttcaccatgttggccaggctggtcccgaactccagacctcaggtgatccgcccccttcggcctcccaaactgctgggattacaggtgtgaggcacagtgcctggccttgaacaactctttaagcctcaacttccatgtctataaaatgtaaggtttggtttggatgcatgttacggttttcttatgattcaaagcctgttttggttataacatgaaaaggcatcaattttaaaatttatttgttgtcatacttttagcccatattaacatttgaaatcatagattttttttttccatttgacaagctttcaaaatgaagggaaaataaattagaatataaaagtcatggcctggcgcagtggctcacgcctgtaatcccagcactttgggaggctgaggcagcagaccacgaggtcaggagatcgagaccatcctggctaacacggtgaaaccccgtctctattaaaaatacaaaaaaaaattagccgggtgtggtggcaggcacctgtagtcccagctactcaggaggctgaggtaggagaatggtgtgaacctgggaggtggagcttgcagtgagccgagatcgggccacttctctccagcctgggggacagagcgagactccgtctcaaaaaaaaaaaaatcatagttgggcaggatgtaatagccatagcaattgatatttggtaagttttaattaacttaattaaccaaccggttggatttttaaaaacccatttttttttaacaaacagatgtgttcctctctttttgttttatttatgttttataggcgagcaattcgaactgcatttaaaaacagaaagcgggctgctattctgaccactcactatatggaggaggcagaggctgtctgtgatcgagtagctatcatggtgtctgggcagttaaggttgatgtctaaatagcgtgccattcaggggaagaggttgggggttggattttgaaagtcatcatttcaaaaacatggcaatagttagtaatttaaatgttaaatattttagtttttgagttagcttttgatagattgacttggaagtatgttgagttttttaaaaatatggctgtctactttgaatttgaattcacttaatatttcaataacttggaatattatttttaggcatagtacttgttatttcaaaaaattgttatatattggattaattatgtaacacaaatatgaaataaacatatgagtttctacttacataaataaataattgagtaaagaaatgtgtcagagaagaggtacatcttccttacagaacaattccaaataataatatatgtagataatacccacttcaagggaggaggcttaatctcctatcccccaagtttggacgggacttagccagtttcttgtaaaaaatgaacgacagaaggagaaaaatagtaactttacagttgagaaagctggcaaatactaccttaactaaacgatgttgtgcagatatcatgtattcactgatatgatatgatggaaaaagtactacagctgtgtaatattctctccaaaacccataacccaagtgtagtcatgagaaaaatatcagactaacccaaattgagggaccttctaacacacacctgaccagtacttctcaaaactgtcaaaatcatgaaaaagacagaaagagtaagaaactgtcacccacagttagagactaaggtgacgtgacagccaagaacactacggtatcctggatagaacctggaataaacaaaggacactaatagaaaattggtgaaatctaaataaagtatggagttcagtgacaaggaatgtaccaatgtcggtgtctcagttgtgaggaatttaccatggtaatataagatgataagattagggaaactgaaaccggataaagagtgtatggggatgctgtattttctttgtaatttttctctaaatataaaggtatatttttttaaaatgtagttatatgtgtgagagattattctttgaagctgtcattttatatctgagctttcttttaaaaaattacttcagatgtatcggaacagtacaacatctaaagagtaaatttggaaaaggctactttttggaaattaaattgaaggactggatagaaaacctagaagtagaccgccttcaaagagaaattcagtatattttcccaaatgcaagccgtcaggaaaggtaaaattttaaagaatgtggttatatttctttatagagcaaaggttataaaaagttattatattaaggattaagtgaaaaatcatcttttcattcatagaccatatatatatatatctctgtgtgtgaatatatatgtatattttttcatatatatgaaatatatgtatctgtagatagataatttatatatctctctctgtattatcaccaatactggactaatgaagtctgatggctggtgttttatatctgccttagtattagatttttcaatattcagtagtatttaaatttttttaacattcttagtagtaatgagagttgttttgcatgaaaatgttattattttaaacaattttcatccaactaaataccaaaataagttattgaatttaattttgaattttaaacatgttgaactttagctttagaacataatagtagtaatttttaatttttttccatattttatctttttttccagtttttcttctattttggcttataaaattcctaaggaagatgttcagtccctttcacaatctttttttaagctggaagaaggtaagtagtatcttctattttggcttataaaattcctaaggaagatgttcagtccctttcacaatctttttttaagctggaagaaggtaagtagttgaaaagcacttatgttgtagctctcaaattatgaaagaattttatttaaaaagtttaaaactggggactcggtttattttagaaactatggcagataagaagataaccttttattcatttaatctaagacacaggtaaacactaatgtcatagggattttgtagataaactctattgtaatgtaaaccttttacaatttttagagagcattgacacagtttatcacattgcatctatgagaagggtcagcttaattatcgagtctttgcagttagtccagcagcaagagctctgagtttcttgaatccttacttcatactggtccatagaagtagcaacactatcaagactccagtggcaaagagaattctgagtgtagcgaggggtgggcagtccccaaaattttaaggaagcttatagaatcttggcatttaaaaaataagtggtatgtaggataaatatatatatgctggtgacagttgagggagatcacctcctggaagaatcaggtattcatatgcagattattttatggcatttataaactgtgaaacaacctatatttatgtataaggtttattattaataattttcaaaataactacaggatttttatgattgttctttatgtgattactgaatacaaaaagatttcctgatactgtatatattcttgttgcagctatggattaatgggtttacttttgccaagaacactaattaattattttttggtctgtaatatatggcctgcatgatgttcattgtttattcatgtttattggccggcatggtggttcacacctataatctcagcactttgggaggctgaggcgggaggatcccttaagcccatggttcaagaccagcctgagcaacatagtgagactctgtttttacaaaatattttttaaaattacccgggtatagtggcatgtgcctgtagtcccagctaactcaggaggctgaggtgggaagattgtttgagcctgggaggtcgaggctgcagtgaaccatgattgtatacttgctgtgttgcccaggccactgtataccagcctgggcaacagagcaagaccttgtcttaaaaacaaaacaaaacaaaacaaaaggtttatggagataggaccaatatccagaatctagttcaagaagccagaataggctacagtggagttggagaatgggagataagagagcagggatcaaaagaagacatgaaaagaatcaccaggaaaaagataatggaggagaacttagaaaaagtgaaataagacaagtaacattcaacatacagtacttagggctatagaggaattataggtgtggggaagagaaaggaagtaagcgggaaaaataacatgttttggcagcttcaaatttaagtgggttgattacagagatattttaaaacattgttagccactttggtaggtattgccatttttttcagatattgataagtaaaatactatttttatattttaatagctaaacatgcttttgccattgaagaatatagcttttctcaagcaacattggaacaggtactataaagttaaatttttaaaaattattttatagaagaaagtatctgatatcgattgttttggtttatattagagagggagagatatcgtaaaccagtgacaaattggtacagaatgatcttaaacttggtataattttaatcaaccttaggttcttcacttactaattttttaaattttattttttaaattgatattattttaaattgacaaatcacactgtttattgggtacagtgatgttttgatacatgtgtgcaatatggaatgcttaaatcaagctaactttcatttgctgattttgaatatctgtttttttcattttgtaaagaaagtgagtcatgatggtggtgtttcacattagtgtatttgaaattacattgtttaagtagttatgaattattttttaaaaaacatatctattaatctaaaatagtattcatctttgcatgtaacttttgaaaataatctgtttgaataatgttaatgttaataaatctcttgatacttgttgatataactagatatagccttgtaccatttctgatttagttaaaagttctttgaggtacttgagatacagcatactgtattcatttatttcttttcacctaggtttttgtagaactcactaaagaacaagaggaggaagataatagttgtggaactttaaacagcacactttggtgggaacgaacacaagaagatagagtagtattttgaatttgtattgttcggtctgcttactgggacttctttctttttcacttaattttaactttggtttaaaaagttttttattggaatggtaactggagaaccaagaacgcacttgaaatttttctaagctccttaattgaaatgctgtggttgtgtgttttgcttttctttaaataaaacgtatgtataattaa

SEQ ID NO: 15290 - DNA, 68475 bp, Homo sapiens
aaaatgttgatattttctcttagcaggctgtcaaccaggttaggttcaggtcataagtttctacccacattctttgaactgtagttgtcattttagtttatttttcaaaaacttttgcagtacctttttggtctgtcttgtgtgtgccttgcagtgaacagtctggatttggacagtggtctgtctgttagttcagtttctcaagcctttgtcacactaataggattggatttatgtatgtccagcttgggaattattacaggaattaaaaacaactttttagagtgctttcctgagctctctttctatttgttcccccttctactttttgcttccctgtggctgctgtttctatcctccagccagagagctagtgtttattttctccattgtgttacacacttgtgcagctgcaaccaccatatccagggcccaatggtaggaggtagagaagaaaagcaaaagggattggcctcatcctcttacaacgatagttccattgaatagagagaaaggttttcctgcctcagagtgttggctgcactaggcttttgttactgtagtctggccctgttaccatgggattgcttgcatgtggggatacaggagaattcagaaaagaaaaaaagatttgctatttctacattctccctgagcattaagacttcccttgcccattcctcaattcaaagctaaggcttcttctggagctgcctctgtgggcggttcgggagataccaaaggagaaaaagtaccactgttgatatggtggtatttcaaattctggtctaccctatttcacatgccttgtttacttttcagagctgacagattgctgctccatgcattctgtccagtttcctaagagagacagcttggagtatgcttaatccatcttacctgggactgaaacagctgcttattttgccgttaaaaattacatgcagtttactgcgtggctccgggtttgtttgtttgtttttcctctttaataggtttattcagaaaacatgtccactgcaattagggaggtaggagtttggagacagaccagaacacttctactgaagaattacttaattaaatgcagaaccaaaaagagtagtgttcaggtaagttaaataactctttcttatgcttttttgcagtttattttgcttgatatattctatcttgaagtgatgatttattttgctaaatatatttttattataattttatttttctttgcttgtaaagtaaaagcttgccatgttagccacagaaaaataactgaattacttaatgctttctaaatgttaaaaattttaataataatttctacatttagttaatttctaacatctgtgcttcattttcagcttttaggcatgtgtttcctaagtttcatgaactaacattccacaataactttgattccagagttttatatcccacaacctcgtattttatggactctagattgagttgcccatgagtattaatattatgacacagatttgtacccacagcatacattacttttgataagggtaaaagaaaggaagaacttgggtaaccagctagtaataatttcaaaggatgaaaacatattattcatcttccctgaaactggtaaaacaattaaacagcaagatgatataatagctcatttctactaaaactgaccgtagaatttaattcagtatggttttggtagtatacatttaggtataattaaagtatgatttctaattcagaattgaataaaggcatttttatggtgaatccatatagggatgttcggtaaattgctttagataaaattatatgagtaaatttattatgttttatgtcaataatctaagatgtttaaatattatcttttatgtcaccttaatttattttgtgacttgaattttaaaatatttcagtaaaactaaatacaaaggaaaaaataatatgcatgttgggttggatgaggtgttcaacacaaaattcttttgggatagaattgcttttattttattcataagaaaggacaaccaaatttcctgttttttcttagtattatattatttgccaagaaatcttgatgatttttgctgccattgttatactttgtaattactttgtttcttttattgtaggaaattctttttccactattttttttattttggttaatattaattagcatgatgcatccaaataagaaatatgaagaagtgcctaatatagaactcaatcctatggacaagtttactctttctaatctaattcttggatatactccagtgactaatattacaagcagcatcatgcagaaagtgtctactgatcatctacctgatggtattgtgagcttatatatatattctgtttataatattaagccttttcaatatttatcagcttgctttattgaatgaatagcagtcttaacacttagagatgtgttcctccaccaaagtcagttttataaaaatactaaaattatttaattctgttgccttatttttcttgtgaaacattaatttatattcttggtggtaggaagcatattttatgtacttttatatttaattcttagaccatttataaaatagtttaagtatacttgtataagatacaagctttgatgggctatttcattttgattctgactttcatataattatgaagctagcaatgtttagctgaatgtggtagcatgtgcctgtagtcccagctactcaagaagttgaggtggggggatcccgtgagcccaaaagtttggggctgcagtgaactatgatcatgccacttcattccagcactccttactctgggcaacagaatgggacccccatctataacaataaaaaatttaaaaaggaagctagaaatatgtgataaagactgtaaagcagtcaccttttcagcttaccatgcttgtttatagaagtgtatggtgtaaactgaagaagtacctaactttggagactacaactatgactatggctaagtccctaactctgttttatttatttatatatatattttttgtagagatgggatcttgctatgttgcccaggttggtctaaactcctgggatcaaatgatcttcctcccttggcctccacctaaagtgccacctaagtcttttttctcaatgtgcacttctcacaaagaaatgaactagaaaacagtgtaagcagtgaagtgccactgaacttaaagtggctgtgagagaacctaaagcaaaagctggagaaagtgacagaaattcttatgctattaatgattaaacaaggaagtgctaaattgtagaaaatgacagattagcatgttattttttgccatatgggatagttgtaattagcttatatgtcatcgcattattggattttatgtcattgaatggaaagtgttaattatacagtcagaagccaggtaacttttattccattggtttctttctctggctatttctatttaatattttgattaaatacacttcttgttatatggtagtgtatcatattaggtacaagtagtatagattaccatgagaatttagtgtacaagctcaaaaagctgattaaaaatgttgaaatgaaattcattggtaattctgagtaggaggaaagaatataaaccaaagaaatatgaggccaggcatggtgactcacgcctgtaatcccagcactttgggaggccgaggtgagcagatcacctgaggtcaggggtttgagaccagactggccaacatggtgaaaccctgtctctactaaaaatacaaaaaaattatccagccatggtggtgggtgcctgtagtcccagctacttgggaggttgaggcaggagaattgcttgaacccgggaggcggaggttgcagtgagctgagattgtaccactgcactcaagcctggcgacagagcaacactcaatatctcaaaaacaaaaaacaaaacaaaaaaagaacaaacaaacaaaaaacaactaagtcagtgtgtattagatgccaaaatagtgtatacatatacacaaatttttttagacttctgtatttttaacaacagaactatctgaaaatgggttatgcatacatacataacatgactggtaggatgttgaactaacaccctctttattcatgtaaatcctggagttccctgtccctcttaaaaggcctggaaaatctattaattaacatttaagtaatactttagaatctatgaagcattttttttttgtctttttcttcttttgtttgagatgggatctcactgtcaagctggtttgcagtgctgtgatctcagctcactgcagcctctgcctcctgggctcaagtgatactcccgcttcagcctcctgagtagctgggactacaggtgcacaccaccacacctggctaatttttgtattttttgtagagacagggtttcgccatgctacctaggctggtctcaagcaatctactcctggactcaagcaatctacctgcctccaccttccaaagtgctggcattataggtgtgaggcaccacatccagcctacaaagcgttttgatgtttgttacttcacttgttcttcacaacaacccagtgtcatcagctaggcattgtagatgaggacactaaagtctgaagagttcaaatcgcctgtctgtgctcacacagttaatacatgaagacgttaagtactaattctatattctttccatttcaccacatgtttgaagcttctgtagtgaaaattagttgcttgtaaacaaaactacaagaaaatatttaaaaattagtcttatctgatgagaaagaatgattacagtattttttccacttatcttctaagaaaggaacaagcaatattggatttgaatgacaatttttatttaaggaggagttgtgtcatagttactaaaatgcctatttagtttctgagaaggattgtggaattttctttataagaaatatttaaaaataaaaaattcatatatttactaaaaagttatttttgtgcaggtgcactggctcatgcctgtaatcccaactagtccggaggctcaggtgggaggatcacttgaggccaggagttcaagaccagcttgggtaatgtagtgacacctcatttctaccaaaattaaaaacaaaaaattagccaggcatggtgatgagtgactatcgaccaagctctactccagaagctgaggtgggaggatctcttgacccctgaagtttgagtgcaagatccagtgcactgcaggctgggtaacagaacaaagccctgtctctaaaaaaatataaaataaaataacgaagttattttttagtttaacttcgagatagataaatgaactgcattactaataatttttataattttattgctgcctgaaattagtataattaattgaggttttgagaaacagcaatttcttgaagaaatatgagttctgcatattgttttatactatatttcatatatttataacataagtataacactgacacatttctgtaatcaaatgacagctgagtagtgtctgcaacattgtaccattttattattattattttgttggaagaattgtcttctttttgtttgtttgttttttttgagacatggtctcactctgttgcctaagctggagtgcagttgctcagttatggctcactgcagcctcgacctcctagctcaaatgatcctcccacctccgcctcccaagtagctggaagtgcaggcacacatcactacacctggctaatttttttattttttggagacagaacctcaccatgttgcccaggttggacttgaacttctgagctcaagcaatcctcccatcttggtcttccaaaatgttgggattacaggtgtgagccactgtgcttggactgttttcattttttaagaagtaaatatagcaaaagtgtttataaaatattccattcatcaaaataattgtaaacttgatctactgtattgtggtattttaatttgtgagctaactatattgttatgatatcttacagtcataattactgaagaatatacaaatgaaaaagaaatgttaacatccagtctctctaagccgagcaactttgtaggtgtggttttcaaagactccatgtcctatgaacttcgtttttttcctgatatgattccagtatcttctatttatatggattcaagaggtaaatagccctacataatcattgaagatcaattaaatgcatatctttgctgcttgcagttcatagtcaaaattttatatagttcaatattggcattttcaactattcttacttgttccaataggaaaactgagaagtatagcataaaaatatttatttataaatacctatctacttctacacataaaacatttttatatatacccattttgatttaatacatttatatatattaaatacagtagcataaagcaaaattgcattttgggttatatgactttctaaatctctttttttcatgtaattgtttttacttgtggtatgtacaaatctttaaaatcttgaggtcttctactagtgaacttgattagttttatatttgaaacatgggaaacaacctttggttgtttaaatctatgaagaaatattatcaaccacaaacatttattgagcaatgttaaagtcactatgctaaatactgaatttgtgactttatttcaaaaagcccttctgaaaattcttttttcctgtttgcttaactttgacttttccttgcttctggaagtgctttagagctaagtcatgtagaatgatttactttaaaacaaaaaagtaacttgttttaaataactacaattaatttctttctttacatttttattcatttactatttagtattctaacacatataacttttatttcaaaatttcaagtaaatgatcagaaatcttgtaagtattgtttacctttgaaagtcagtagcttatttctttggtcctgtaaagattgattgattatattgttttggtaggtatctctccatataatatctttaaaacgatgcacttgcatgttgtacagaatcttagatctcatattcttccccccatagctggctgttcaaaatcatgtgaggctgctcagtactggtcctcaggtttcacagttttacaagcatccatagatgctgccattatacaggtaaatatgataaaggaagaaatacaaaaactatgccattttaaaataaatatttccttattctttacaatagtatttggtttgactactgtcaaatgtacaaaatatgtaacctactacaactcctttgagaaaaaagataaaaaagtcatattttctgatttggtactttttgttgtgtttcatattttagcagaaaaactggccatgaaatttatttttaaaaatcttacttttgtgtctgggctagataacagtagatgaagttaccttagaattcaaactattcaaattaaccatatttcattcttccatgttctgtatggatctgtggcttttttttccatttgccctttctaattgaatttactatgctacaaaatttactatgctacaaaatattgtaatttcaaaatgtatatcaaccatcttgtctgctaaacaatacgtttaaagtatgtatgaataatgatggagctggaatcaaaatctgaacaggagtcttgtctctgttgttacactgctatgtagtaaaatgactattataatagtactttacttgacagcattgtcgtaagaaccaaatgagatgatttatgtataattgtcttgtaaacttttgtagtacagtataaacatattagggacgtgtaatattgcacaaattcaataatacagaaatttaaggtaaagatagtgaaatacggatctattacattgatgatgttgtatcacctatttgtattttggccaaagtttttagccatccacagcacagaccacactggatgaataggcaggatagatttcaatttaggcattaattggaatgttagaagtattatgtggcataaatagttttattatttggtctatatgtgctaaatatatagactttaaagcagtagaagggcatggtatttagaagaacattttttaaacaatcataggaatgatggcactaataatcactcctaaattcctaaattttgaagatgtatatttttactaagatacatataattgtctgcttaagatgataattgtgcaattttattttatttgacaaattatttaatcaaaatttatacacttactgactttaaactttaaactttatggtatacttttagaataaattgaatgcaatattctactcagaattatgatattggggtcactcactttatttcaggtatggagctttttgaggattgtatttgtactaggttactgaccaaatttagggatatagctgtcccgttttactaggggctgctatcataactaaattaatttgatgtatttacattttctaattatagttgaagaccaatgtttctctttggaaggagctggagtcaactaaagctgttattatgggagaaactgctgttgtagaaatagatacctttccccgaggagtaattttaatatacctagttatagcattttcaccttttggatactttttggcaattcatatcgtagcagaaaaagaaaaaaaaataaaagaatttttaaagataatgggacttcatgatactgccttttggtatgttattaaaaatttattacttaatataattaaaaattgtattaaatatacagattttcaaaattgtaattttgatatttacctaacttgatgatgtgcttatcctgttttcttacaatgattgccttagtcttggaatttgagattagtcaagaagtttcaacaactaattggcttcatttaacataagggatgaagaatgtcaaagcttgtgttgacaatacgtgtttaaattttatttcacattttatttgaatcatgggcacactccgtgtatatttcagtgtatttcaatatactccacgtatatttctgtgtatttcagagttcaggaaatgtgaaatcttggaacattagaaattaattgcttgttacagttcttccataatatagcatatatataatattaaaaatttagttatagtgattaaagtctgtatatgtggtatatggactttttttccctcgaaagttttagttatttgggtgaattaagatgaatatggaaataattttagagaaagaaatgagaaaaccatgttttcactagtgacctttaatgtatcagcatttttgtacagtgataattttacaaaggcatgcatttttataaatctaagtgtagtttccttactcttttcactatgtaatgaagttcattctggggggaaggttaatactgtgcatgtgagctgttatagtctgttttacaaaattttattccaattagcccaatgtaacaattaatcattaacactttacataatggaattattgtatataacatatttcctttgcttgtttttctttcatttgttattttagaaattattggttttggattattttttgagacagggtcttgctctgtcacctaggctggagtatagtggcatgatcatgggtcactgtggcctcaaactcccaggctcaagagattctcccatctcagtctctcaagtagttgggactacaggtgcatgctgtcatgcccaactaattttcaatttttttgtagggacgggggtctcgccatgttgtgcaggctggtctcaaagtcttggcctcaagtgatcctctcatcttggcctcccaaagtgctgggattacaggcatgagccactgtgcctggccaaaggattggtttttaaaatttattgggttattaaagtattttatggagaaccggtagctggaagaatttaggcaaatcattctctcagggtctcagttttgcctcagtaaaatgatggattcaattttgataatttcgctacctttttagccttaactcagtgatttcatgacatcattaaatcctgagctaacttggaaaaatatgtaaaataaaacttaatactgcagcaattccattgagctctgatttgtaaagaagtcttgagcaaaaatagtgaattcattactgatcttgttgatttcacattgtgtaattgtagtaattatgtcattgattagtgaggtaaggtagcctttattgtttatagttacagaagccatcagaggtttaattgtagcacatgccataaagaaaattgttatcttgactcattaaactcctacattttaagaaaatcagagacattgtgtgctattgaacttttgagaatattagatttaaattaattatgaattactattcattttgaaagcttttttaactctggaagatagtattttttatcagattacacttttacctatcacttaaccaatactatttttaattacttacaagactattaatttttagtacataagcatacacagaaatgaacagtgacttaattttaagaataaaatggctaaaatctaaaaattttgtttaaaatgattttttaactggttaagcctatgcatttgaccataactatatctgtattctcattttaggctttcctgggttcttctatatacaagtttaatttttcttatgtcccttcttatggcagtcattgcgacagcttctttgttatttcctcaaagtagcagcattgtgatatttctgctttttttcctttatggattatcatctgtaagtattttaacttgtgataggaataaagaactgtcaaaatgtttgataacatagcaaagtctttttcttcagtttacttatagtcaatttgccatgaaagacagattttactaattgataagtgacttaataaataaatgatgtggcatcactgtattcctgtatttttagtaatgttacaaaatagttttagatttagatttagcttttgtcatatgatgtatttcacatacaactcctctatctgttgtctttatataatgatgtatataattaagactgtcaagtattggactatttttgtttgtcttcatggaatccttactctttcaagttaatttatgctccaggatgatgatttttaaagatacatctttgcaaatgtaactctttagcagtcttgatattcatttgatatattggctgaatgagaggttttaatgaccagcctttgttttaagtggttccatcttccattctgattggtttatgtgcccaccctgtatcagttgttaaatgttttggctatcatttctgctctttaaaataataaattgcaaataactaacatacttccatatgtaattgcctggtttttttttaaatgtttaattttacttttttgagacagggtcttgctctgtggcccaggctggagtgcagtggcacactcatggctcactgcagccttgacctcccaggctcaatccttcaacctcagcctcctgagtagctgggactacaggtgtgtgccatcacaccttgctaatttttgtgtgtgtgtatgtatatatgtatatatatatatacatatatatatgtatgtatatatatatatacatatatatatatgtatgtatatatatatatatatatatatttttttttttttttttttttttttttagagtcgaggtcttcctaagtgtccaagtttggtcttgaactcctgggctcaagtgatccacttgccttggcctcccaaagtgctgggattacatgagcgagccactgcagcaggccttctggttttttttttctttttaaactgttttttttatcttatgaataaattaagtttaaaatatgggtcttgtacttaaaatttttgttgatttattattttttcacatattttatgcatcttactgcagaaacacatggctatttatggtttctgtaatgtagaggtggtcatgtttacctatgatacagataaaaatacagtatttaatatttgttagtttaagaccagatgtggtggctcacacccgtaatcccagcactttgggaggcaaggcaagaagattgcttgaggcaaggagtttgagaccagcctgggcaacatggtgaaaccctgtctctacaaaaaaaatactaaaatgctggacgtggtgccccacgcctgtaatcccagctacacgggaggctgaggtgggaggatcacctgaacccaggaggtggaggttgcagtgagccaagatggcaccactgcacttcagctagggtgacagaacaagaccctgtctcaaaaacaaaatcaaaacaaaaacacaaaaatatttgttagtttaaatttttaaaaggtatatcactatttgtttgaaaataaaataccatagcatttagaaattatagttgtatttttatgaatgcatttttcatgaaaatagcttgttctttcagaagcaaactttaattttgttttcatactggtatatatgaacattgcactaaccttaatatttgtattttataggtattttttgctttaatgctgacacctctttttaaaaaatcaaaacatgtgggaatagttgaattttttgttactgtggcttttggatttattggccttatgataatcctcatagaaagttttcccaaatcgttagtgtggcttttcagtcctttctgtcactgtacttttgtgattggtattgcacaggtaggtaatatattaatcttgcattcactaaatattttctttctgttttatgtagcttcttatactaccatgaatactacctttgatttaccaaaaaaattattttaaaattttagcatgaggaagaaatgatttctagagtatattttatatctagttttatttatgtttgtccaattttaagtttttagttaaatgttctgtttataaattttttactttttacttcagtgtatctcagtgatttatttcactgcagaaactcagtttgatagtaatgtgtttaaatgtcaagtaattcttattgcctatggcctggttatattgctatcatttgtacatttatctcagaagaatgcatgggagaaaattgtgtgtggagcagaacaaatttaccgtgagtgtagtggtggaataagtaggcctggtggattttgttggcccaggcttcatggaattgtcattcaaaataacattcagacttacaaatattatttttattagtccttacaggagtagttaggttctaaatggaagaagtcttataagaaatggctttgtagtggaacatgaatttggctaatgtacaaagaaaaaaatgtaattactaaatataagaaattactcatgttggttggatagaagttctgatttatgagatataattaaatattgagttaatcattttacttttttgagacctgagaatgattgttatacattttgagagttcattgagtccccgagtccgcgttctctaggaacgaagaattatagattcataggtttttgttgtgagtgggatggcctttcagtgtcattgaatttatcttcttcattttataaatgagaggactgaagcctagaatagtataattaaagcgtattcacttaatggcagggctaggacctaaatgaggcttcaacctccagtacatttctctttccatgctatcacaaatatctactatgaatactttaataattgtgttaattaatcaaaatacttgcttttctctattggaaagatgctaacctaattttattccctaatacttaatttgtttggctttcatatggatcataacccttttgtttgcatttgttattattaatattgcagtttgtttttatttcatttgttagtaattacattggaattaaatgcccctagagtgaatatatcccagttaaagaagcacaacattaaaaacatgattgaaaggaattggtttgataaacttacatttttgtaaagtctttattgttttccttataaatttatattattaatttggtcaagtgtttaatctattaaaaggcccagttggttactatcactctggatatgctaaataactcttaagtagtgttagcttttgcttgtttttgtcatttttatgtaataaagttagtgtttgtatttttcaggtcatgcatttagaagattttaatgaaggtgcttcattttcaaatttgactgcaggcccatatcctctaattattacaattatcatgctcacacttaatagtatattctatgtcctcttggctgtctatcttgatcaagtcattccaggtatgcagatggtttttgaattttactttaaagatttttaggcttttttgcccacatagggtcagcttaattttaagattttttttcctaaccagggtaccctaagtcatattcattgttaaagcttttaatttgactttaaataagtatattttgtaccttaggctatagccactagtgaacataaagagatcgtgtaaaaagagagcagttttgaaagccttaagtctctagttgatcttaccttggtccttctttatatcagtcttttttaattgaagtattttattttaccctctaaggtctaaaactatgaagtgatcttgtaactcctaccattttctttatctcctgtccacatctatagccaatatagcaaactcctgtagattcaatagtaatattaagtattgagcatatttccttttccacttgtattcctcattacctgtgtctgtattctacacctgtactgtcctgtatggtaactactagccatgtgtggcttttaaaatttaaattgattacaattaaatcaattaacaatttatttttttcagtagcacaggccacattccaagtgctcagtagccatatatggctgttagttactaaattgcatggtgcaatctagatgttctgtagaacattttgaccattataaaagttgtattgtgtaatactagtctagactagaggttcccaacccccaggacacagatcttactagctgcctgtgaggaactgggctgcacagtaggaggcatgtgagtgaagcttcatctgtattcacagctgctcctcattgcttgcattaccacctgagctccacctcctgtcagatcagtggcagcattcaattctcataggagtatgaaccctattgcgaaccgcgcatgtgaaggatctaggttgcatgcttcttatgagaatctaatgcctgatgatctgtcactgtctcccatcacccccagatgggaccgcctagttgcagaaaaacaagctcagggctcccactgattctaccttatagtgagttgtataattgtttcattatatattacaatgtaataataatagaaataaaattcacaataaatgtaatgcatttgaatcatcctgaaactatccttgctccctgtctgtggaaaaattttctatcacaaaaccagtccctggtgccaaaaaggctggggaccactagtctagaccattgcagtatctctcatctagttacatacctcaagtctgtctgagcacttcacccctttttttgaggttttattattttttaatagatttttggggaacaggtggtgtttggttacatgaataagtcctttagtgttaatttctgagatattggtgcacctgtcaccctagcaatgtacactgtacccagtgtgtattcttttatccctcacccccctcccaccttttccctgagcccccataatccattgtatcgttcttatgtctttgtgtcctcatagcttagctcccacttatgagtgagaacatacaatatttggttttctattcctgagttactttacttagaataatggtctccatttccatccaggttgctgcaaatggcattattttgttcctttttatggatgagtaggattcctttgtgtgtgtgtgtgtgtgtgtgtgtgtgtatgtgtgtgtgtgtgtatcacattttctttatccagttgttgggatgggcatttaggttggttccatatttttgtaattgtgaattaattatactgttatcaacatgtgtggggaagtatatttttcacataatgacttcttttcctctgggtagatgcccaggagtgggattgctggatcaatcggtagacttaccttagttctttaaggaatctccacactgctttccatagtggctttactagtttacattcccaccaacagtggaaaagtgttcccttttcaccacatccatgccaacatctattattttttgatgtttcgataatggccattctcgtaggagtaaggtggtatcacattgtggttttgatctgaatttccctgatcattagtgatgttgagcattttttcatgtttcttggccatttgtatatcttattagagttatctattcatgttcttagcgtactttttgatgggattgttcgttttgttcttgctgatttgagtgactcatagattctagatgttagtcctttgtcaacatatatatatagtgaagaccttctcccactctgtgggttatctgtcaactgctgattatttcttttgctatggagaagctttttggtttaattaagtcctatctatctttgtttttgttgcatttgcttttggcttcttggtcatgaagtctttgccttttttctgatgttatcgtctcaaatttttatggtttcaggtcttagatttaagtcttttatctatcttgagttgatttttgtatagggtgagagatgaggatccagtttcattcttctacgtgtggcttgccaattatcccagcaccatttgttaaatagggtgtcctttccctacatttatgtttttgtttgcttgctgttggagcagtaacagttcccagaggaatgccaagtactgataaaatcaattggaatcctctgtacttggcatcagatccctttgaaatgtggccaatctaaaagaagagtagatatttgaaaaaaatgaggagtgtaggtattttgagagggaaaagggagaaaatggaacatgttgtctgggcagttaccactgtatgccctttctttccttctttccttccttccttccttccttccttccttcctctctctctctttctttctctttcccctccctcccttccttccttccttccttccttccttccttccttccttccttccttccttcctacctaccttccttccttccgacagggttttgctgtgtcttttttgagacagggttttgctgtgtcttccaagctggagtgcagtggcacgatcacagctcactgcaggctcagcctcctgggctcaagtgatccccttgcctcagcctcccaggtagctgggactacaggcatgcaccaccgcatctgactaattttttgtattttttgcagagacaaggttttgccatattgcccaggctggtctcaaactcctgggctcaagcaatatgccagcctctgccttccaaagtgttgggattataggtgagagccaccatgcctggcctcattgtataccatttctaagtctcatatttctatcctgttgttttgttgctctccataattctgtagtcttttccatgaagcatatccacttttctagttactacctattttcaaagatcatttaagatggtgcccattcaagtcttcaacacattcagcctgtgttgtgttcttgccatttgctatctacttgtactcataaaggcattagttcctttagcatagaagatgtgctttattcacctttacctcccactcagcaattctgaaactatttatggactagaattatttatcaataaaactttgattcatacaatattgatttaatacaatacagctaatctttatttacttattacttttcaatgacaaatgaaaattgtatatatttattgtgtacaacatgatgtttggaaatatatatatgttgcggaatggtacctaaactttagatgcaggttgtcatatgtttgaaatgctgtctttatgatttaaaaactaattatggtaactcagttttttaatgtttatttttcaggggaatttggcttacggagatcatctttatattttctgaagccttcatattggtcaaagagcaaaagaaattatgaggagttatcagagggcaatgttaatggaaatattagttttagtgaaattattgagccagtttcttcagaatttgtaggaaaagaagccataaggtatggttcaatctttggcaatttaggtataagaactgctgatgaaacatttaaatcctattctttaaatatgtatgtaaatatggtatattagatttggtacatatgccatgattttaaaacattaataagggctacttttctctttttcttattttctttgcaaccatttagaataaagttggtgctaggtttgaaattttatgtttctttctttctgttttttgagacagaatctcgctctgtcgcccagcctggagcacagtggcacaatctcggctcactgtaacctccacctcccagattcaaacaattcttgtgcctcaacctctcaagtagttgagtctacaggcatgcgccaccatgcctggctaatttttgtatttttagtagagacagggtttcaccatgttggccagactggtctcgaattcgtagcctcaggtgatccacctgcctcggcctcccaaagtgctgggattacaggcgtaagccaccacacctgtcccctgaaattttatgtttggatggaaaattttaaaagtaataaaacctgatgtttatacaattaatgtttaaagcttttcccattatgtagactgaaacatgataaatattaactatataattttgttcatgctacattgttttatacagcatattaaattgtcatctgttaatttcatagatttttagggtttgaggcataattagaacatttcattactttaatttttaagaaccaaagaaattcattacgattccttgttaggtcagtcagtaccaaatttagaaataaaattaggtgaaagaaaagaaataaaataaaatgaaataaaaaagtgaagcataatattttttaaatttaagaaaaatgtaaaaattccagagaaagtcaaaatacttaagatgtaattcattggccagtggcctgctttcttaacggtaaattttaactgattaacaaatcatttccttaaaaaaatatgaaaaaaataaggtagaataagaaaatcacttcacatttgttaatggtttgaaatttgtgctgacatgaaatgacatctggtttatatcccccttcactgatgtaacaagtgtttgataatcagaaatgaaaaaaaatccataaattgcttaaatcagattcttcacttagttttagaagttgggttggcatgaaaaatgaatcaatgacgcttacaatggaaaggaatactatgcttttctcttgtaccttctttaaaataattttatagttgatccctgaaaaatacaagtttgaactacaccagttcacttatatgtggatttttttcagtaaatatattgaaaatttttttggagatttgtaacaatttgaaaaaactcgcagatgaactgttagcctagaaataccaaaaacaaatgttaggtatgtcatgaatgcataaaatatttatagatattagtctattttaacatttgctaccataaaatatacacagattatagtaagttatgctttatcaaagcttaatgtacacaatattgacagacctacattatgccaatgcccagttgagagaaatgtaaacaaatgtgaagatgcagtattaaatcatagctgcataatattaactacagtattactgtaccactgcaataattttgtagcaccttcttttgctgttatggtgagcttgtgtgttccaagcatatacttcgaatgccatgtgactcaattatctccttgtgagctgttcatctctccagtaaattgcatatcatgataaaaagtaatgtctcagggttcttgcttattttttattatgtgtagtgcaataccgtaagccttgaatagcatcatgggatccataggaattgccactagtgatgctggaagtgctctcaagaagcagagaaaggtcatgacattataagaaaaagttgaattgcttgtatgtaccatagattgaggtctgtgggtgcggttacctgtcatttcagatagactgtgcatcttgttcatcttataaatagatgatgtgaactgacggcattgataaatacagtataataatgtaaatatatattttttccttataatttcttaacattttctttagtgtacttcataaaaatacagtgtttaacatgtaaaacctacaaaatatatgctaaacaacggtttatgttatctgcaagacttcttatcaatagtaggctattaatagattagttttaggggattaaaaatgttatatgtgtattttcaactatgtgtggcagttggcactcctaacctgtgttttcaagtgtcaattgtattttcattatcaacattatttggttcattgttttagtaggaaagtactttattattattttattattcttataaaatgtgatagcattgataaaaatatgcatggtaaataaacacacatacttataaattgctttaaatacttaaaatataaaactttatatttcagaattagtggtattcagaagacatacagaaagaagggtgaaaatgtggaggctttgagaagtaagtagttttcctagtattcaggccatagtatttaaagtacaactagaaaaataatttgcatagcttgtgggaaatttaaacttctctaccatgattttctgtcttgcttttattttattttattttttttgagatggagtctcgctctgtcacccaggttatagtgcagtggcgttctcttggctcactgcaacctgcgccttctgggttcaagtgattcgcctgccttagcctcctgagtaggtgggattacaggtgtacgccaccatgcccagctaatttttgtatttttgtggagacggggtttcaccaagttggccaggctggtctcaaactcctgacctcaggtggttcgcccgcctcagcctcctaaagtgctggaattacaggcatgagccactgcgcccagcccctgtcttgcttttttgagatactttcgtttatgtgattaatattcaaaataaaactaacaacatgacatttgtaaaagtaaaatgtagtatctattaaaatgaaaaatactcaattatttgaataaggctatgtccttgtttcagtttattattttgcatgtatatgcaatacatgttagttactttttgaaaaattcatttggcctatcgtagggtttttcaacctcagcactactgacattttggtcctgataattctttgttgtgaagaactgttctttaatgtagaatgtttagcattgtgtcaatgtgttagtcagtccccagaaccaatagaatacacacacacacaaacacacacacacgcacacacacacacacacacacacacacacacacacacaccagtatgattgtagggtgggggattaggggaggtttgttttaagtaattacttcatgagatagtgggccctggtaaatgtagaaatctgtaaggcaggttggaaactcaggcaagtgttgaagtttcagtcttgagctcaaaatttgtagacaggctgacaggctgcacactcatgtaggagtctgttacattcttgaggcaggactcttccaaggaacctgttttttctcttaaggccttcaactgattggataaggtttaccattattatcaagactaatcaagtttaactcagatgattataaaagttaatgacatctacagcaacttctacatcagtatttgaccaaataacggcaccatagcctagccagggggacccataaaattaaccttcacaagcagcatccctggctttgatcaccaaagagagaaggagttctgcctcaagaatgaaacagattcttgcgtgagtttccagcctgtcagcctatgaattttggacccaagatggcaactttaactcttgcctgagttttcaacctgccctacagatttttgggacttactagaccccacaatcttctgaagcaatttcttaaaataaaccttccctaatcccccaaccccacactcatacttgctccattgtgtgtgtgtgtgtgtgtattctgttggttctggagactgactgacacgctgctaaacatccctggcacactgctaaacatcctctcccagttgtaacaaccaaaaatgtctccagtctttaccaaatgtcttctaggaggcaaattaatttattaagaagaaagtaggtatagtggtatactaatagggttttagtttgcatttgcctaataactaatgttattaatcacctttttatatgattattggcatttggaggttttcctttatgaaatgcctattcaagttcttttcacatttttgtttcaagacctttgttagatacaggtatttaaatatttgatctcagtctgaggcttgccttttaattctactagcagtgtcttttgacaaacacaagtcttaatttgaatgaagtccaatttatgaatctgttcttttatggttacagtgcttttcacgtctttttattcaacattggagattatatataacctccaatgtaagttattggtacaactagttaagtataattataattgtaataacaattacaactaattgtttctaatgcaaagaagcaagagaatgaaataaaaggcatccagattggaaaggatgcagtaaaattatttgcagttgacacaataatctatttttaaaatcttttagattgacaaaaaataatagtggaactaaacagtgagttttgcaagatgataggatacatgataaataatggaaaaatcaattgtatttctatatgttaccaacacataattggaaattaaaattaaaaatagcatttagcatcaaaaaatatgcttacaggtaaataagacaaaaatgtaaaagacatatcctgataagtccaaaacattgctgagagaaattaaagaagatttaaataaatagaaataccacgttcatggggcagaacacttaacgtttagttgttgagttccctttcttattttaacttagattattggcgttaggatctgagactttttccttcttgttttatatgttagccttcttagtctagtttttgttgttgtttgtttgtttttgagacagggtcttgctctgtcccccaggctggaggacagtggcacagtcttggcttatcatagccctgacttcccaagctcaggtgattctcccacctcagccttccgagtagctgggactacaggtgccaccatgcccagctaatttttatattttttgtagagacgggatttcgccatgttgcccaggctagtctcgaactcctgggcccaagtgatcctcccacctcagcctcccaaagtgttgggattacaggcacgagccactgtgcctggccagcctagttttttgataagccatttctgcttcatcatttcaggtccccatctcctgtcttccttcattcctttacatatccattcagtgatattgcttcattaaatctaacctttcaagccatttctatgctattggttaatttcttgtttttttgccagtttatttaaatgcctataaatatccttgggaacaaatttttgtttaattccattggttccattggtaattcccaaaaattgggacacagaaaattcccaaatattttgtatactcttaaatcttactgtatgaacaaataaagtttatttttatttactttcattactgtttatatcgttgactgtaacaaagaagctgttttacctgctatcaaatatgctggtaactttaaatatgtatttatagatatagtgccttgaagattgctcaaatattatgaattatcatgcatagctgaacagacataaaaattacatttgagtcttcttttttcctgaactagatttgtcatttgacatatatgagggtcagattactgccttacttggccacagtggaacaggaaagagtacattgatgaatattctttgtggactctgcccaccttctgatggtgagttttctgtcttaaagaaaaaaaaacttcattatatatattctttaaatgtgtattgaataatttttgtcaatgggaccaacttctgtatctgtaaaggtgttttctttttttcttgattatacacatgtggttgtttttagtagaagataaaaatgattctatcatgtttaataaagtaaaaaggatctaattttgtacatatttctatacatatacacacgtagatgtgtatgtatgtgtttttattcatcattttcaagggaggataaatgagtaacttattggaaattaaatcagaactatagactatttgaggttgagaaaataaacacaaatatctaaatatacagcaatagttcagcaggaaataattgtaaatgttcatactatcttctaaaatagaattttaaaggcatacctcaaaagtataattttgatatgtgattgtttggtaggtgagaattcattatagtagctccatattatgacagtaaccaaatagagtggcagtacaataaatattttactttacaaaagggctgaattgtattgaatctgcatttcaactctttaaatgttatttaacttttaaaattagtttgattttgttctttgtccttagttgtatcactctttgatggtagtcataatatcttacatttgtataagaatttatgatttttcctcatgattcttcataatgtatgattgttttaattttcactattaaaacaatgaatatattagtgttcactgtataaaaaaggaaagctggaatttaaagagattaagtaatttggccatgaccacacagctagttaggataaaatttatagttctttaatccctccactattgcacagtgtctagaaaattgttactggaatacaagtgtaaatagtgtatcaatagatatttatgtttagtgtcaagcttttactttcttgcttttcccactatgttatatgacctgtaagtgatggaaaatgagattgaaatataagtggatgcggatcaccaataatattgaagggtgtgttgtgccttgtaaatttatattaatttttaccttatatgtctgttataaccaaataactaagttatcaggatacttgaaaacatacacattataaaataattaatgtacatttaaatatatattttgcttttagggtttgcatctatatatggacacagagtctcagaaatagatgaaatgtttgaagcaagaaaaatgattggcatttgtccacagttagatatacactttgatgttttgacagtagaagaaaatttatcaattttggcttcaatcaaagggataccagccaacaatataatacaagaagtatgctattcatatagaaatctttacttttatttcctgtaatcaataaccttttgtaatgacttgtgcaataaaaatatgcttgaaaatctaaatataacacttgttctgagccagcaaacagaaagctattacaaagaattagacagaatttggagtaaatgttttagcacacataaaagtttgtttcatctggaggatgcttgcctgccttattcctgccttctcttgctctcatctcctctaccccctcccacttccacacatacattaagagccatcacagtgatctcttattccttccctaccacccaagaaggcacaaaattaaaacctttccctcaagaatcttgttacctgttgttttcataattatatatgagtatatgtcaaaggcagttccatgctaaaggatcatttttaaagttgatattaaaattatttaaaaacctatgttacttaaatatctaacacattaaaacttaaaatatttaaaaagtaatattgataattatataaatggtatgatttttaaaataacattgttcatgctttacttttacaggtgcagaaggttttactagatttagacatgcagactatcaaagataaccaagctaaaaaattaagtggtggtcaaaaaagaaagctgtcattaggaattgctgttcttgggaacccaaaggtaaataaatattacttttacagatgagctcattttaaattatgtcgaattaaaaagcaggttgtagaaagatataatacattatgtaaaggttaagtgtacataaaatgctgtatgttattatggatataatcatagtaatgagattttaaaagtgaagtcagaaagatgtataactttttttaattttagtagctgtcaaggtactaaaggtttttggttacatggatgaattatatagtggtaaattctgaggttttagtgcacccatctcctgagtactgtacatggtactcaatatgtagttttttttattcctcacccccttccaccctttcctttctgagttataacatctttatgataactggttacttttaggaaggagaatggaagaatagactttagttatgactgccatgttttctttctttctttctttctttctttctttcttctttttttttttaatttgtagagacgagaccttgctatgttgcccaggctggtcttgaactggcctcaagcgatcctcccgcctttgccttccaaagtgttgggattacaggcatgagccaccacgcctggcctccatgttttatttctttaaaaaatgatctgaagaaaatgtggccaaaaaataacattgctgaattggaatggtagctataatagtattactctcttgttctctatagtttaaaaaatatttgttatagttaataacaaaagttaagaaatagaacaaaatcaaaggagtgattcagtttatcactgtcctgctttgattttgtatgtatttgttttatgctgttctctgtcatagaaacagagaaacaactgatgtaccactttacacagggcatcaaaactgacaggtgcatgcatgcagctaggatgatctcctattgatccccaccatcctgccacattcccccttgctgttgcagctggggaatgattctggatcctggctttatgttcattagtcttcctctcagccaccaccaccatgttcttttttatattaaaaatagtcttgaaacaaattgcttcccttgaactactataaaaccatatattcttctccaaaaaagcaagtgttacatctacaaatttaattgttaaggataatagcaatatacttaatgttttgtttttagtttgtttgtctgactgttgttatacttttgtcttgtgtattacaggcagtcttttagaattaaacctgggaaaatattcacatgtcaaatttataattttaaaaatttatgtgaactcaattatgaatgaaaaaatctgatctaatatatttctgattgaaaataataatttgaaatggggcagttttttagtgtccacatgcctgtttaatatttagtttttctgaggattccctgcccttcttcacctcttttcacacagatactgctgctagatgaaccaacagctggaatggacccctgttctcgacatattgtatggaatcttttaaaatacagaaaagccaatcgggtgacagtgttcagtactcatttcatggatgaagctgacattcttgcaggtgagatttttgttttattttcgaaggctgagatcatgggccaaaaggaagatggatatagagatgctaattcctgaggtataaatagagaagcttttacctagtggtatgtttccttcacaaaaaaagttctaaaaaattttaaaatgatacatttttgtgttgagaatctccaagaccatcccaggtttagtgatgtcctagaagaactcatatgactcagcacatagtcatactcatgactatgatttattacagcaaaaggatacaaagctaagttagcaaagggaaaaggtatatgaggcaaagtctcgaggaaaccaggtagaagcttccaagagtcctactcccagtggagtagacagatgtgctttaatttcttcagcattgagttgtaacaacatgtgtgaaatatctacttgggaaagttagtatatactcagtgttcaagattcttattgggtgctgatcacataaacatcttctgcctagcacataccaaagttccagattctcagaaggaaagaagttgtttggcataaaccacattgtttgtacagtttaggcactgagccactcttacctgttttgagaatagtaggaaccctcccaaatccaagttctcaactaacagccaagggccaaccttgtaagcaggcctttctaaggatagaagcctctgacctgctatgttaactcttttctgcacaattttatacacatacatacatataaagaatccaagttgaagtcaacacatgacttttaatagctatgacagatatagaagtttgaaattcttgagcaacttctgtctgcttataatataatctaataaaattgggcaagtcattcatgtcttcagtagtacctttatttttaaaaacccaacaaactaacatttgttcttcttattacttttgttgatttttggagttgtttctacatttggttataaaggaaattgtgaaagtgcttgtattggtaagccttttaggaaaaatatatttggaataacatatggtaagtagactctagagtcagactccttgagtagagttcctggctttgttacttaatagctgtatgaaacatatataaggaatgtattttctttttaccttagtattcatatctgaaaaatagttgatgataatctagtaccatcctcataagactttttgtgatgattaatgatatcataatgtggatgactctcatatgagaaaccataaaatgtaaatgccaattattaatgctgttgatactttagaaattgaaatgtaaatatttatctgcagataggaaagctgtgatatcacaaggaatgctgaaatgtgttggttcttcaatgttcctcaaaagtaaatgggggatcggctaccgcctgaggtatcattcatttttattgacattattctatattatactcttgctatactgttattatgttggaggcttgctgttatatgctttgaccatcatttatggtactaaatttaatttaaagccttcataatttacttttggctgtttattgtataatcattaattgtgatttttggtattctctagcatgtacatagacaaatattgtgccacagaatctctttcttcactggttaaacaacatatacctggagctactttattacaacagaatgaccaacaacttgtgtatagcttgcctttcaaggacatggacaaattttcaggtattacttactttaagtctcttggtgtttgaactgggatcctatattgggaataggtttcattgatttcctttttgtttccttctccatgtagtattgccatgctcccaggtggccagagttaatattctgtttctgctttattttgtttttgaaagccagaaaaaacacagcaaaatttttttttttacaaacaccatgcaagaaactgtaactaatatattaaatacttaagaaaatgttaaaaaacgtaaaaataattgtgtttactttgttgtcaagaaaaaaaagaaattgcttgtaggcctcctgagagtaaggcatatatgtatatagtttatatacattctcaggttcttttatagtttcatgatttcataatgaattatatgataaatccttgaattcttttaattgaggcattattttttaattttttaatgaggaactcaaactcagtctccttcctctgtttaggaattgcttgatagacaaaaggatgttattgatgtaagtacattgtgcagaattttcatagcatttatctcataatcagaaaaatacttgttttttttttaaaaagaaatcacaaattaagtggactgaagtacacttgccaacttaatgcactctgcctatcattctatctacttatacccacctatctcctattctttagtaacatttatatgtgcttattttctaccagatgctggtctgtgccttttgcaattattagtttatttcattatcccaatatttcaagaaatacatgagataaatactattattgctttcattttacaaatgaagaaactgagacataaaaagatttaaggaacttgcccaaggtaacacaggtagaaagtggtggagctgagttttgaacccaggcaaatcagttccagaactcatggttttcaccaccatactttgttgttgactcttacatttctttgaaaaattgtcacggtatttcactggatttcacagtgtcttctgggatctcctgtaggatggaccgtaagacctcttaagggaattcataatgtcagcactttttctaataataccaaaatgttatttgccttattgaccctcagcttctcatgattatacagtgttttccagagactgcataatatgtgctatcacaacagattgaatacagaaacaaatatgagaacccatctgtcttctgttaagacagacattaaagagatttgcagaaatgtaaaacaatattctcttctcattatttttgttttaaaagatgcagtttttaaaaataaaattgtgttaacccgtaataggtttacttttttattttttaaaagatgaataagtatttaaatgattactgtatgttttctaatgtacatatttattttattattcaatatagtaacattctcagttttaatttcaaatactgtaaaatttttgttagtttataatatgatatagatataatatggtaatagatatgataatagatatattcccatatataaaatttctttgaggtccttaatttataagaatgttaagcctgttacttaggctggagttcagtgccacaatcacagctcactgcagcctcaaactcctgggctcaagtgatcctcccacctgagtctcctgagtagctaagactacaggcttgcatcagtatttatgcctagctaatttatttttattttttgtagagatgggtcatgatatgtttcacaggctgttcatgaacttatttttaaaggatattttacaataatttatgataatatgcttaaagatatactattctttcatttttttcttttaggtttgttttctgccctagacagtcattcaaatttgggtgtcatttcttatggtgtttccatgacgactttggaagacgtatttttaaagctagaagttgaagcagaaattgaccaagcaggtaaaaacagaactaacaaaacattttaggcaatgaatcagacagatggtgaataagacaaaaattatataaatgtaattttatattttttttagaataaagggtagaaataagtaaataagtaatgagatactgatagtgataggagtaatgcaggaaataatggggtggtcttagaaggcagcgaacttagattatatcatcaggaaggactttgttgagatgatacttgacctgaggcctgtataatgagaaaaatcaagtaggtgaagattttagggcagaaattttcagataaagaactgcaactgcaaaggtattaactgaggaatgagttggatgtctttgagggataaaaaaaggctaccatggccggagccatagtgaagctattacacagcaaagtcaggaggatactcaaagggatagatcatgttctgcctttgaacgtctggaaaacaatttcatttgttttcctattgtagtgtggaagctatcagagagttttaaagcaaataggtaccatgatctgatttgaatttttaaaaaaacacgttctggttgttgaatgataagagtattataaaggaagtgtggaagtaggaagaccagttaggaaactgctatagttaatactatcttgaactagggtgtcagtgaaaatagggaggccgggcgcagtggttcatgcctataatcccagcactttgggaggccaaggcagggagatcgcttgagcccaggagttccagaccagtcttggcaacatggcaaaaccttgtcacaaaaaacacaaaaattagccaggtatggtagtgtgtgcctatagtcccaactactctagaggctgcggtgggagaatcacctgaggccaggaggtcaaggctgcagtgagccatgattgcaccactgcactctagcctgggcatcagaaggagaccctgtttaaaaaaaaaaaaaaaaaaaaaaaaagggaaagaacagatatttgggttatactggtggtagtggtgatgagttgctgatagattgagtgttagaggctcaggagaagttggaatgaagaataattcctaagcttttgataactgggaatgagattgccatttcctgaaaataggggaagaataggtttgtggaaagaaggaatgcaggcatgagttttttccttttttttttttttttttgagtcttgctctgtcacccaggctggagtgcagtggcaccatcccggctcactgcaacctccgcctcccaagtccaagtgattctcctgctgcctcagcctcccaaacagctgggattacaggcgcccaccaccacgcccagctagttgttgtattttttagtagagacagggttttgccatgttggccaggctggtcttgaactgacctcaggtgatccgcccgccttggcctcccaaagtgctaggattacaggtgtaagccactgcgcccggccgaggcatgaattttgagtatattgtttgagatgcatctggagttaaatgaagatgttacggctgaagatacagatttggaagttactcacaggtagatggtgctatggaattggatgaaatctcttagttgggtaaggagtgtagataagaattgaggggcaagcctcctgggtgagcagtggagaaggagccaagagggctgaccgtgaatgagcaattattactctactttttcatgaaagagtggaaatggaaaaacctagaaaaatggtgtttaggaaagaggaagtggtcagttatttgtcaattgctgtgaagaataagatgaggacaaaaaaggtagttttggtaacagaggacggtgagggatttggtagactgtaagagtggtgatcttgacagatcaatttcatgatgcagtaaggagcaaggtggatctattcagtttacggtaagaacatgagttgaggaaactttcttatgatcgaaggttagcaaaatgtttgtagtggcaggtgaggagagcaaaggaaaccaggatgttagttcacagttgttaaaagagttgagatgctgcaaatacacattttgcatgaatgccgagtgggtgatgattaaaatcattgtgataccaaagtcaagaatcaagctgaatatatcatcatgaagtaaacttgcttatattatgctaaaataaatctggaacttaaaatattactagaatttaattattcatggtttggtagtcaaattttaaaagattggccttattgtgtgggaacaataatttgtcagcattgctaactgtaaagttgctcctgtagtcctacgtttatgataccagatgcccactttcaaatgcagtgaggagaagccatatatttttgagttcttaatttttcttttgttattatgtctggatcaaagaagatttatctgaaaattaatgtatgtgattttgtagtttctccttcttttgaaatttttaaatgatgaagtgggcattctgcttttagttcaccctcacaaattgtggaagaatccacaataaaacttttatattgaaagtgcgtggccttaatggaattaaataactaaaaaaagaagcaagtctcccaaatttgttttaatatcttgagtactaatatactgaaccactacataaaattaatattatataatctgatttctttttatattattatctaaattaaaaaatacatgtattggcccaaaagttataatgttcttcctaaagttatctcactagtacattctctttaatatttgcattaactgttaatatttttctgtgttgaaagttctgaatgtttttgagtttaaaataaacctcaattgtgtagtattttattcttgccattaaataaatatatgtttatggtttaattggtagaattttatttttttatttatttatttttatttttttttattattatactttaagttttagagtacatgtgcacattgtgcaggttagttacatacatatacatgtgccatgctggtgtgctgcacccactaactcatcatctagcattaggtatatctcccaatgctatccctccccgctcccccaaccccacaatagtgcccagtgtgatgttccccttcctgtgtccatgtgatctcattgttcagttcccacctatgagtgagaatatgcggtgtttggttttttgttcttgcaatagtttactgagaatgatgatttccaatttcatccatgtccctacaaaggacatgaactcatcattttttatggctgcatagtattccatggtgtatatgtgccacattttcttaatccagtctatcattgttggacatttgggttggttccaagtctttgctattgtgaatagtgccacaataaacatatgtgtgcatgtgtctttatagcagcatgatttatagtcctttgggtatatacccagtaatgggatggctgggtcaaatggtatttctagttctagatccctgaggaatcgccacactgacttccacaatggttgaactagtttacagtgccaccaacagtgtaaaagtgttcctgtttctccatatcctctccagcacctgttgtttcctgactttttaatgattgccattctaactggtgtgagatggtatctcattatggttttgatttgcatttccctaatggccagtgatggtgagcgttttttcatgtgtcttttggctgcataaatgtcttcttttgagaagtgtctgtttatgtcctttgcccactttttgatggggttgtttgtttttttcttgtaaatttgtttgagttcattgtagattctggatattagccctttgtcagatgagtaggttgcgaacattttctcccattttgtaggttgcctgttcactctgatggtagtttcttttgctgtgcagaagctctttagtttaattagatcccatttgtcaattttgtcttttgttgctattgcttttggtgttttagacaggaagtccttccccatgcctatgtcctgaatggtaatgcctaggttttcttctagggtttttatggttttaggtctaacgtttaagtctttaatccatcttgaattgatttttgtacaaggtgtaaggaagggatccagtttcagctttctacatatggctagctagttttcccagcaccatttattaaatagggaatcctttccccattgctcgtttttctcaggtttgtcaaagatcagatagttgtagatatgcggcattatttctgagggctctgttctgttccattgatctatatctctgttttggtaccagtaccatgctgttttggttactgtggccttgtagtatagtttgaagtcaggtagcgtgatgcctccagctttgttcttttggcttaggattgacttggcgatgcgggctcttttttggttccatatgaactttaaagtagttttttccaattctgtgaagaaaggcattggtagcttgatggggatggcattgaatctgtaaattaccttgggcagtatggccattttcacgatattggttcttcctacccatgagcatggaatgttcttccatttgtttgtatcctcttttatttccttgagcagcagtttgtagttctccttgaagaggtccttcacatccctcgtaagttggattcctaggtattttattctctttgaagcaattgtgaatgggagttcactcatgatttggctctctgtctgttgttggtgtataggaatgcttgtgatttttgcacattgattttgtatcctgagactttgctgaagttgcctatcagctgaaggagattttgggctgagacgatggggttttctagatatacaatcatgtcatctgcaaacagggacaatttgacttcctcttttcctaattgaataccctttatttccttctcctgcctaattgccctggccagaacttccaacactatgttgaataggagtggtgagagagggcatccctgtcttgtgccagttttcaaagggaatgcttccagtttttgcccattcagtatgatattggctgtgggtttgtcatagatagctcttattattttgagatatgtcccatcaatacctaatttattgagagtttttagcatgaagggttgttgaattttgtcaaaggccttttctgcatctgttgagataatcatgtggtttttgtctttggctctgtttatatgctagaattttaacataaagtacgtaaataaatttttattccaaatacatttggaatgtttaactgtaatttaaatgaatattaaatattaaaatgaaatctgaatgacataccttattcacactactgaatttgttataccttttaagtgttgtgctaataatctgtatgatcacactgtcattgatcatgtacaacctcagtaatcccaggaaattatattgaagtaggcattggctcttaaaccttccaaagactaaagatgaagttgaagggcagaatttggctgaaaactgagcctgaggctaaattttaattgagaagtaatgtaaagccaggagaggactctcaaacatggtgataagagagaagtctcgtgtatgatcaggatatgatgctaagttgtggtcagagaggaaaagttcacataaaagttggatattatacagatacagagataataagatcttaaatatggatatgtatccagtttgattttgaactagtggaattataccatgtgtctcctttgcatctgtcctctttcactcaaaatgacatttgtgaagttcagccatgttgttatgggtacagtagtttgttcattttcattggtttacactattccatagaatagtgttcttgttcttagtagaacaagaacattctcatgttcttgtacatgtgttttggtgaaacctgtattcatatctctgttgggtttatacctgttggggatctcttgggtcataagatatacatatgttcagctttaatagatactgccagaatataagagagttccatttgttccacataactgccagaccaatgcttctttaaatgttcctgcttcagaaagtttgtatcttttttaatgaacatactgaaatgtttgttttgttttggcaaatagattatagtgtatttactcagcagccactggaggaagaaatggattcaaaatcttttgatgaaatggaacagagcttacttattctttctgaaaccaaggctgctctagtgagcaccatgagcctttggaaacaacagatgtatacaatagcaaagtttcatttctttaccttgaaacgtgaaagtaaatcagtgagatcagtgtaagtataattatcacccttatacctgatggattgctttttaaggatacacattggttttaccatcttaatttttaaaatgttaacatatgtaaataatttatatagtttcgaaagattaccactgtaatttcacaatgttagagaaaaaaattacaataatttcatcgaataccctgtcttacactttttaaactagcatttattgtctcatctataaagtgaggaaataacaaatattccctaattgtataattttttaattactgtcattgtatctttttctttctttcacctgggagcacagattcaagtttccttgaatatattaatacactccccattgtatcttaaattttgttttgcgtttctattttttcgctattttttgcgtctattagttagtttttataaccactttttgtaagtagcaggaaaaatgagttttacctctatttatcctatgaggaaactgaaaaataaagaaggctacatagctagtagatctgggatcaaaatgacatctcaagttagctttagcccttctcagttaggttctcctagggtactaggaactgaataatttggaaataacattaaccactttcatataccacacacctatcttgttaagtccaaaatgtcagtagtaataaggcttaatcattaagattaagaatattgttatatgtttggaatatgctaaatttatatgctcttctttgaccaaattcagtgtcaaacaaatgtcaatcacgtatctgatttattccctggtcggcattactgaaagaaaaatgtttatttaaatcagcatgtttcaatttattttattatttttttatactttaagttctgggatatatgtgcagaacttgcaggtttgttacataggtatgcatgtgccatggtggtttgctacactcatcaacctatcactacgttaggtatttatcctaatgctatccctccccagtcccaaccctccaacaggccccggtgtgtgatgttcccctccttgtgtccatgtgttctcgttgttcagctcccacttatgagtgagaacatgtggtgtttggttttctgttcctgtgttagtttgctgagaatgatggtttccagcttcatccatgtaccttcaaaggacatgaactcatccttttttatggctgcatagtattccatggtgtatatgtgccacattttctaaacaccactctcataaaatacactcagaaaaataattaaaataccatctgggctcggtggctcaagcttgtaatcccagcactttgggaggccaaggcaggcggatcacaaggtcaggagatcaaggccatcctggccaacatggtgaaactccgtctctactaaaaatataaaaaaattagctgggtgtggtggtgggcgcctgtagtctcagctacttgagaggctgaggcaggagaattgcctgaactcgggaagcggaggttgcagtgagccaagatcgtgccactgcactccagcctggcaacagagtgagactccgtccctgcccccccgcccccccaaaaaaagaaaattaaaataccttagtcagctttgactgccatgacaaaataccatttactgggtgacttaaacagagtattattttctcacaattctgatggctgcagttctgagatcagggtgccagcatggtgatggctgtcttcctggcttgcagaaggccaccatctcactgtgtgctcatatgacctcttcatgtacactggcatgcaccctctggtgtctctttataaatgtactaatcccatcatggggaccccaccctcatgatgccatctgatgcagattacctttccgaagtcccatttccaaataccatcatatgggagttagggcttcaacatacaaatttggggaggcacaaacattcaatccataacaaaatgtgttccatggtcaaatacatttagaaaatattactcttatattccctatattaaagagttattcattagcataaaaaacatgagatgttctctggtaaagaaattccttcaactttgtttaacctcatgtttccaaatattatttaattgtgaatattttttaacctaaatcacttcttaacttattatggaacttgatcaatgccatatgcttttgaaatcttagatataacaatttaagaatttttttaaaaaaattacggggtatgtgaaatttataaattgctgaagtatgataatctaagctctccaactgcttgttaggacacttattacatgtgatatatagatattttatcagataagtagctgctcttcagataaaagggcattgtagtataccttgctttgcctcctgagagcagcagtggcaattaatatgataaaattgcgattaggatgagatttcaaagatatcagccattcagagtttaattgtatttttatttgcttctctatatctaaaatatttttcttgttacgtgaaaagtaaatggggctgggtgcagtggctcacacctgaaatcccagcactttggaaggctgcagcagctggatcacttgaggccaggagtttgagaccagtctggccaacatggcaaaaccctgtctctactaaaaatacaaaaattagccgggtacagtggcacatgccagtcgtcccacctacttgggaggctgaggcatgacaatcgtttgaacctgggaggcagaggttgcagtgagccgagatcacaccactgcactccagcctgggtgacagagcaagactccatctcaaaaaaaaaaaaaaaaaaaaaagtaaatggttaagatagagacaggacaggaagtaattccttcaggagtagagacaaatatttgagacataatgtcttgtgttttaacagttataactacgtgtttacatactcttagaaaaatttaagggcatcactgatctaaaatacacttttataacttttaattttgtcgtacagtattggctttctctccagtattgtcataagatcattttggggaatacgatttcttatttttttttttcagttttttttctttgtttttttcagtgattatcttttaactatctagagtttaaatctataccaatgtaggctggtcaaggtggctcacacctgcaatcccagcactttgggaggctgaggcaggcaagctccttgtttgagctcaggagtttgagaccagccttggcaacatggcgaaaccccatctctataaaaaataacaaaaattagttgtgtatggtggcgtgtgcctgtagtctcagctatttgggatggtgaggggagaagattgcttgagcctgggaggtggaggttacagtgagctgagatcatgccattacactccagcctgggtgacagaaccagaccctgtctcaaataaaaacaaaaaaagtccatatcaatgtgaagggagagttttaattgattttcatattaatgtacctttgtaccctgagctgtgttgttttttttttcttttcaggttgcttctgcttttaatttttttcacagttcagatttttatgtttttggttcatcactcttttaaaaatgctgtggttcccatcaaacttgttccagacttatattttctaaaacctggagacaaaccacataaatacaaaacaagtctgcttcttcaaaattctgctggtgagagtgtgtgaaggtctgtgaacgagtgttggcatggagcatggggttgaggggtggataaaggtctggattttaaaactatatttaaggtaaaggcatggtctgtctgcatgaaatctaaattatagttcaatacgtatcttattgatgctgaagaatatattacagtaaattttggtttacaaataaatgacagttttggccaggtgcgatggctcccacctgtaatcccagcactttgggaggccaaggcgggtggatcacctgaggtcaggggatcgagaccatcctggctaacacggtgaaaccccgtctctactaaaaatataaaaattagccaggcatggtggcacgcgcctgtagtctcaggtactcgggaggctgaggcaggagaatcgcttgaacccgggaggcggaggttgcagtgagccgagattgcaccactgcattccagtctgggcaacagagggagactctgcctcaaaataaataaataaataaataaatagttaaaaaaatttatactttgtataatagtagaatttccttttttaataataacgttattcttactagcatgttttatgctgataagtccatgatgagcaaaatatacttcaaaagttgaaaaaccctctttacaaagagttgtagtacataatatttatacaggtatgtgtctgcatagaagtgttttaattcttcaaggacagtctgaagaattagttaaaactaagaaaaataagacttaaatataaatatctctaattgaatatattagatttgtaatggatatttttggctttgctattagtattcttaccatgtagttgtcaaatatgaaaaaaatttaaacatacagacttgagcaaagctcaaaacaaaaaactgacatagtgttctgattttcaaaatattaaaagctaatacaaactttattcatatgtgatcagttgttcctataacatctcctattctgtagcagactctttggggtttaacctttctaacacttcacctacattctagtatcattcctttttgattcactaattcaaaaaagactttgcccagtattaaaataataagcatggctaggaatgattataaattagtattaaaataatcactgttaaaatctggtgcgtgttatattacataaccttcattctttctggtaaagatgtatttattgatggataaatgagtgagaacatggaaaattacctggagcatggaaaattaatggaaaattactcgaatggaaaatgttaggttttgcaattttttttctttcattaggaaatttcattatgaattctcgttttggttttaaaatacattttatattgctaatatataatccttacactgtgctaatcttgacattttttatatgtgtccagggaattgtacatgtatctcaaatatttcttttttttttaaaggaacttggattcaaatcatatctttttgctttgagttaattctcattgatctgcagaaattctagtattttcagtttgtctcttaattttttattattcttagagttgcttgcttatgcatgccatattttcctaagccttgtgtgtgttccaaaataaaaccacttttttttgaaccactggcctctgtgtgtatatatattgggtggtatcttacccaccttgcagagctttttgtatctcttgtgctgtggttccttcacttataatgtgtctctcttctcagggtacatagctggtcttgcaagttagagataagagatcagttaaggtactaggttgggagtaaagtagtgtcaccattctctatgacactgagatctagtgctgtgtctgatccaccctgccatactattcagttactagtaatgttttgctttgtttgatttaaatttctctctaaagtcacatttgtccttccctgaatcctgatttttgttatgatggaggagaaactgcatctattcggcagacatgttggtatagatttaaatcccgacaggatttaaaatcttactcttggctccaggtactttagagaatgtagagatgtgattatgtgtttgaatattttaaggtagttaaggcaattgacatgtctgcccagagcctacaaaaaattctctagggagtgatgttaccacacctatacctttctgaacttagcaggttatcttgttacctaaaattgtcagatagatttttattcttattatttaaccaaatttcatgtgttataggttaacttttcaatgttaataatagttgtagcagcagcagcagtggtggcagcagcagcagcagcagctaaaatatgcgcagttactatgtgtcaggttctaaactctgtgtatatattcagtcatttaattctcaggatgatcactctacctataaggcagatatacttattttacccactttacaaaagagggaacttaaggtccagaacatctaggtaacttgcttgaaggacgaatagtttaatgttacaactcaactttaaaaccaggctgactggcttcagagccaatgtacttacttgcgtattcgctaatgaaaataaaatatttctctaaaaatagaattatcttcccagtgttactaaaagcctcgtttagactcattttttattatttgcttattttctaacaccagactcagatatcagtgatcttattagctttttcacaagccagaacataatggtgacgatgattaatgacagtgactatgtatccgtggctccccatagtgcggctttaaatgtgatgcattcagaaaaggtaagatgaatgcagtgaatgaatatccatttgggagttatgcaagattaaaacgtttcttctaaaattaattatttgttgatttgaccttatgagttagaaattagattttacttttggaaataactagctgtctttatttatgatatatttcattacttcacagatgaccaatatataaagttacagaaatttagttttttaaaaaattatatgcttgtttaaaatattaaaatatctgtacattccaaaccagattgtctttatctgtcattgagtattatttctgtgagttgttgaagcagtttttctgtatgagaattagctttgttggtgagaaaagcttggtacatatcaataatatatccgcttatatacagtatgtaataagtgtcttttttttaattgtaggactatgtttttgcagctgttttcaacagtactatggtttattctttacctatattagtgaatatcattagtaactactatctttatcatttaaatgtgactgaaaccatccagatctggagtaccccattctttcaagtaagccaatgtatatacagataaatttccatatgcatgtcatatatataataaccattaaaaactaagcaaaaataacaaaatatgtagaaatttatcttgtgagatctcttagacttcttaaaactcaagtgagaaacggtttacattaaggtttaggattccccagtagaagtatgtttcagggtaaaggagattctgttttggtattaatatttgtataaggaataagtgtgttctatattgatcatagaataaaatataagataatttttaaatgaatattttttacctaaaatccaggtattgggtattgaaaaaaacttgagaagtcacccaggcaaccatttttcctctagatagaactgttggattgtacatatcagaatcaagattacagaaaagtatccaacatattttctcttaatccttttgattttcatatgctaaaaaataaatggacaaatatctgtaacaatattttctatcttcttcttttcatacttttaaaaacagcttcattgaaatataatgcccaatcaacctgaccattattcaaagtatacacttcggtgtcttttattatgcttatagagttgtgcagtcatcactacagtcagttttaaatatgccatcacccccctccaaaaaaaataacccttatactcattagtaatcactcatttcctctcatacccactcccaaccctaggcaaccactaatgtactttctgtttctatggatttccttattttagacattttatataaatggaatcatacagtatgtagtcttttttgtctgctttcttgtacttagcatactgctttgaagattcatctgttttgtaacacgtatcagtgcttcatttatttttactaccaaatcatatttcattgtgtggaatgtatggaatgtttatgtgaaatactgcattctacttatctgttcatcagttgatggcatttgggttatttccaccttttggctattatgagtaatgcttatgaatatttgagtagaagattttgtatgagcatatgtttttatttctcttggatatataattaggagtggaattgctagatcatctagtaactctatgtttaacacttgaagaactgccaaactgctttccaaaatggttgcatcattttccatttccagcagcagtgtctgtggagaggtatctcatattatgaaatatttcaaacgtacagaaaacgaaccacctactatccaaatatttcaaatgttaatattgcataatatttgtttttagtaaaacttttaagacacaggtgaaaactcatgttacccctctccaatcttgtttccttctctcctccgtaggagtaaccgcaattcacaatttcacaatttgtaattcccatacgtgtttttttgatgttactacatatgtctgtatccataactattacacaagattttacaacttacaattttcaacaacactgacatataatcatactatatttcgaaagaaatacatgggagtttttgaagctaactattcatatatagtcgtattaatatttcaaatttgtttcttcattagattctgtatgattggatccaactgtagtctcattcatttccacttcttgcactactagtctacatatttgtgggttctttctgagcctccactgtcatattacgagagtttcagacaaattctgcaatgtcatatgacctgaactttggaattgacttaattgctaaataggaaaactcagaaggctaggtttcagcaagacagtgatgtactctgtctctatgtcatcccatggaggggtgtgccagtgcgagggtatctgctaggcactgcggattctattccagtgcagagtaccttctctgtcccacgggtctgtattcttatagaacaaggggaggaaactgaccttggtgagggtggctgataatatagtatccttggacttgggtaatctgcatttgaagtgctagctgtttattgattgtctgggaaagttagctgactgcacctggatccctggggaagctaacgacattggggcctgtgggagttaattcctcttctgcttgggagaagaagttctagttccataggaagctgagcttggatatagcttttcccaattaaaaagacaagagcaacaaatatcattcttagatatttattattatttcataggaccactatggtggacatactaactgcttttcaaatacatcattcatttttatgaaattgtgaagcgtaatttatatgcctgattattctgtgttgtagacaggaaaatgaaagtaaaatgatttgcttaggatcagatagttattaataagtggcagagttggtaatattgtccacaaccacctgttaatacatctgccactcattctttcatgtagactatgcctgggttagatattctaatacattctttctgaggttttgatttttttttgatataagatatatcctaagatatatcttaagatataaaatgattctcagttccatttgttactctgtggttgtctttcaggaaattactgatatagtttttaaaattgagctgtattttcaagcagctttgcttggaatcattgttactgcaatgccaccttactttgccatggaaaatgcagagaatcataaggtaatgactcagttaaaaatatataatttgctaataagaagtgtcatataaaaataacctatttgcttgattgcaaggcttagtataattgttatttcagaaataagtaaatggaatataaatacatttattatagtttcttattgtaataagtgataattaatatttattatttgagacttgctacatgctttaaaaattatattctctaattctcacaacattgtgaggtaagttttttgttactgatttcttatagatcaggaaatcaaagatgggattgttcatatgacttgctcaggttgactcaacttgtttaaattgtggatttgggaagtgactgtgatctttatgttcttaactggcaaactaacatgcccgtcccttttatcctttaacagaggtattaagtagtcaaggtgctaaattcttattaatggaaaaaaaatagatgaaagtgattgtcatcattagggccttggagaaattgctaagtatacagaggttctttggtattctttcactttctttttacgcctttcccttttgttttccttcaggcatatagcgatcttgtacagtctttggttgttcaaagcctcccactttttcactctgctgagattatatcttactgctctaataaaaattctgatcttcttcatggatgatcttaattcagtaaaaacaaatttgtctaaattaatttacagactgtgatgaataatgagctcattattttaataaattctaaaaaaataaattgtaggccaggcgtggtggaccacgcctgtaatcccagcactttgggaggccgaggtgggcggatcacctgaggttgggagttcgagactagcctgaccaacatggagaaaccccgtctctactaaaaatagaaaaaaaattagggcgtggtggtgcatgcctgtaatcccagctactcaggagggtgaggcaggagaatcacttgaacccgagaggcggagattgcagtgagccgagatcatgccattgcactccagcctgggcaacaagagcaaaaactccatctcaaaaataaataaataaataaataaataaaataaataaatacattctaataaaaattttgttatttgtttactataaaagtaacacatatctctatttttaaaataatattcaatttttgttaaatatactcattgtagtaatgtataaattatagaaaagtataaggaatatagaaatccataacccactgcacaataataaaatttactggacatttgcattttctttcttgtttcaactgaaacattttttttccaatataaattttttatttttatttatttattttttaatttttttatttatatatatatatatttttattatactttaagttttagggtacatgtgcacattgtgcaggttagttacatatgtatacatgtgccatgctggtgcactgcacccactaacttatttttaattaaagtttctattttgagatagttgtatattcatgtttgtttgttagaaatgacagagagatcctgtgtactctttacattttgtcccaataataacatctcgtaaaattatagtacaatgtaacagggtattggcattgacacagtcaagatacagaacatttctgtcaccaaaaagattcccattttttgctctttcctagcctctctgacctgtggcaaccactactctgttctctatttctgtaattttgatagttcaaaaatgtaaaatggcatcacaataagttttcttttgggattggcttttttcaaatagcattttttttgaagttcatcctatttgtatttatcaataatccattccttttcattgctgagtaatattccatggtatggatacatcacactttctctaaccatttgcctgttgaagaacatttggattgttttccgtttttggcttttgtaaagttgctgtggacatttgcatacaggttttgtgtaaacatcattttcatttctctgagataaatgcccaagagtgcaattgctgaattatacatgttaattttataagaaattgccaaattattttccaagatgagtgttccattttatgttatccctaccagcagtgtgtgaatgacaaaagtttgaattatccaaaataattgcatttgccttagcttatgtttttattcttgtattagaatttacatgtgtctcatgttctcataattcattgaacagaaaacttgccaattttgttcatttctcctcttcttaactaatctttatatttcatgcttcctttatctctgtggacagctctttcatataataccttcagttattaggagtagatatttttatagatgacaaaaatcaactaaataaaattgttaggtatttggatttatgaaatattttagaaatttcaaattaaatgagaacatgagataggaaaactatgatcatttgagtttaccattaacaaacttgtgacgtaaataacaccttagatttatatgctataccagtgtacacaaaaggctttgaacatttcaaaagctttcacttaagctgaaagccttatgtaaatccaaaggatacttggcaatttattagtgtttttatttatgaaaggttcatttttaaaactgagaattctttttctgtgtaaacatgtcttcccatctgtttccacagtatttcaaaagtagtaatgttttggctatttattatttgtatagctgtaaccccaaccgccatgacaccttttgctttattttaatctcagtttcttggcagcactactgtattctgattcttaaaaattttgttgaaattgttacatctcagaaataatgagccaaattaaaggctaaatggaatttgtatttagtgtgagggggacttttattacctataagcctggaatgtaacctttttggttttgctgatgtaaaattaagagatctacaataatttactaatttatttgtgtgtttctaaagtgtctaaaattataataaattgtttttcattttttttagatcaaagcttatactcaacttaaactttcaggtcttttgccatctgcatattggattggacaagctgttgttgatatccccttattttttatcattcttattttgatgctaggaagcttattggcatttcattatggattatatttttatactgtaaagttccttgctgtggtaagttaacgttagttgtactcatgctatttatagatagaatgttatttaaaatctgttataaacatgacagttgacttattgcataatttggttattaatttgttaaagaaaatagagcaagtgtgtctggtatttaatacatgtaatcattttatatgataagtgacttttaaaaacaataacttaccaccattttaaaataatttcttgaaactaaagtgatctttcatgtagaccacctacttgggtgtaatcaggaacgttttaatatattccttccttaaaatgccttccttcgtttttcttatgcctgaaaataatttcacaaaggataagctcttttattccatagtttaaaatatagcttaacatttctctatctcaataatgggcaggctgcgagccagatgaagaacacaactccatttacaatagccacaaaaaattaaaatacctaggaatacatctaacagaggagatgaaagatctctacagggagaactacaaaacattggtgaaggaattcagagatgatacaagcaaatggaaaaaaatttcatgctcatggattagaagactcaatatattaaagtggccatactgcccaaagcaatctacagattcaacactattcctatcaaactaccaacattattcatcacagaattttaaaaagctattctaaaattcatatggaaccccaaaagtacccagatggctaaaggaatcctacataagctgggcgcgggggctcatgcctataatcccagcactctgggagaccgagacgggtggatcacgaggtcaagagatcaagaccatcctggtcaacatagtgaaacaccatctctactagaaatacaaaaaaatagctggacgtggtggcatgcgcctgtagtcccagctactcaggaggctgaggcaggagaatcgcttgaaccggggaggtagaggttgtgttgagccaagatcgtgctactgcactcaagcctgggcaacagagagagactttttatcaaaaaaaaaaaaaaaaaggaatccatgtaaaaagaacaaagccagaggcatttcattacctgacttcaaactatactataaaggctccagtgaccaaaacagcatggtattggtacaaaaacagacatgtagaccgatgaaacagaatggaggacccagaaataaagccacacatctatagccatctgatcttcaacaaaattgataaaaataagcaataggaaaggactctgtgttcaataaatggtgctgggatagctggctagccatattcagaagaatgaaattggacctccacctttcaccgtatgtaaaaagtaactcaagatggattaaagatttaagggtaagacatcaactataagaattctacaagaaaacataggaaataccattctggaccttgggaaagaatttatgggtaaataagtcttcaaaagcaattgcaacagaaataaaaattgacaagtggcacctaattaaactaaagagcttctgcacagcaaaagaaactatcaacagagtaaatggataacatacagaatgggagaaaatacaaactatgcatccaacaaaggccaagtatccagaatctataaggcacttaaacaattcagcaatcaaaaaacaaaactccattaaaaagtgggcaaaagatatgaacagacacttctcaaaagaagacatgcaaatggacaacaaatgtatgaaaaaatgctctacatcactaatcatcagagaaatgtaaatcaaaaccacagtaagataccatctcatgtcagttagaatggctatgattaaaaagtcaaaaccaacagatgctggcgaggctgcagagaaaatgaaatgcttatatactcttatatactcttggtgggaatgtaaacttcagcagccatggaaagcagtttggagagttctcaaaaaacttaaaacagaactaccttataactcagaaaccccattactgggtatatatccaaaagaaaataaatcattctaccaaaaagacacatgagtatgttcattgcagcactattcacaatagcaaagacatggaatcaacctaggagcccattgaccagtgattgaataaagaaagtgtggtacatatacaccacggaatactgagcagccataaaaaagaatgaaattatgtctgttgcagcagcacaggtgcagttggaggccattattctaagtgaattaacaaaggaacagaaaaccaactattgcatgttcccacttataaatgggagctaaattgggtaaacatggacataaaaatggcaacagtagacactgggcactactagacgggggcaggaggaaggggagcaagggttgaaaaactaactgttaggtactgtgtccagtacctaggtgacagaatgaattataccccaaacctcagcatcatgcagtatacccatgtaacacacctgcacatgtatcccctgattctaaagtaaaactagaaattacttaaaataaaatatagcttaaaatatcaaagaagagactgatttgcattcatgttcacatgtaaatgactgacagcaggccctttcattgattactttattaggaaaaagggaaaacagagttacatgaggttgatgctgaaagtaaatttaccgattttgtcagagatcataatgaccttatatattagtttctgccatataaaataataatgtttttcttacacattaaaaaataaagtgctgtatattaaaatagtagctaatatttgagagagagaacgttgtagctagctatacttgctttttataataatgagagatagtattttacttggtacaaaaaactacaagtagtgttcagtttaaatgatttatttaggattatattaataatttcatattttaatatggctagtatttcatgtcatgtgtattgcaagctattcatatttttatagaaacatatttctgatttacaggttttttgccttattggttatgttccatcagttattctgttcacttatattgcttctttcacctttaagaaaattttaaataccaaagaattttggtcatttatctattctgtggtaagtcacattttacattatttcaactttccatagcagtttaattaacatgaattctttcctgattatactaaaaatgttacatgtcttttgtaagtgaataatttagataggtaattggcagcttctttttgtgtgtacatttgtcttctgaatcatcctttccacgtaggaacaatatggaagagatttagcaactagtgtatcaaggatactagctacaaacaagtggtattcttgttgcttgctggctaaatatcatctcttgttccatgttttattagaggattgaaaaaatagtttaatgcgtagacaccaatttgtaagaagtttctaaacactttgtcacttttatttatttatttttttctttaggcagcgttggcttgtattgcaatcactgaaataactttctttatgggatacacaattgcaactattcttcattatgccttttgtatcatcattccaatctatccacttctaggttgcctgatttctttcataaaggtaattctgctaaatattttaatatgttaaaaaacataaaataaatatggtctaatttggggatgttagttcttgtatagaaaacagtaaaatgcattgggctaatggctactacttgatttagatattattaatgcagcataaattattgtgagctcttgtcaaactgtaaattctcaaaggaaaagggctatgttcattacaggttctctcatgctcaaaatgatgtatataattagaagtgtgacatggtttcagtcagtatttgtttttaggagtttatcagtgattaaataacgtatttcactataaagggatgagaaagaataaagtgtaagagattttctccaagaaaaaatagagacaaaaaccagattgattttattaaggctggataattgaaagaaatttccatgtgattagaaaaaatattgttatgaattcttggtttggaattgctaattaattctacttactaatcctactacccctgcttccctttttaggtctcagttcaatgtgtttaatttatactgatcctcagaaatattttgggacagggaagattttaagtaaaaaacataacttactaatatgaacagctaacttattatagaaagtacacgtttgctaaacaaaatacattttttcattttaatccaaatatttctacatattgcagcgtatatattttcaaatctttttgtcttagatttcttggaagaatgtacgaaaaaatgtggacacctataatccatgggataggctttcagtagctgttatatcggtaagaaataaagtgtttttgtgaattagcatgtaccttaagaatggtttggtcctatggttttaactatgtttagttttttatcctgttgcatgaaaaagaaggtgcataaaaagttaagcatgttagttaacgctagctaatctgtatttcagtggggagtacctttcatttactgaatatgttcactttaatatacttagccttttacatgttattaattctgtttaattacagttctgtcttagaagcaaaaacaaagtttttgtgttcgattatattttatgaagctgacaataaatgaatgatacagaggcagaaaatatgtgaataatttgctaaaaataattctgctttggtttgtattaaaatttatttttaattatctttatcatgtaaaatataaaaaagttgtgattacttcttttggtaatggcaaggaacttgatgtatgtagtcttagttctgttggcaaaggaaaaaacaacaacaacaacaacaaatcttttagtcatgagctgctacatgttcttcttttagccttacctgcagtgtgtactgtggattttcctcttacaatactatgagaaaaaatatggaggcagatcaataagaaaagatccctttttcaggtcagttgattttttaaaaattttaaatgtttttagtatatttacagaactgtgtaaccattaccataacataattttggaacatttccagcactccaaaaagaaactttgtacccattaacagccactttcttatccctattcccatagctcccagtcttaggtaaccactaatctactttctgtttctgtcagatttgcctgttctgaacactttatataactggacaatggaaatatgctttggaaaacttgagtcaaaagaccaacaattctcttaaataccttgtatttaacttttatatctgtttgctttttaccatagttggttggcatgttattttaatgttggaaaatcatcagatttgccagataacatctttgaaaaattgctaggatttgggcactataattagtatctagcatatggttttacacttagtataatgtttggagggcttatcatgtagtcgtgtgtagcactttttatatatcttaatgagttgcttttacttttcaactattatgaacaatgctgctatgaattcagctattatgaacaatgttgctagtttgtatacaactgtttgtatggacatatattttcatttctcttgggtggatacctagaaatgggattgctgggtcatttgaggaattgccagactgtttctaaagtggtaataccattttacactcccgctaggaatgttttagggttctattttctccacatccttgccaatgcttgttattgtttgtcttttttacatattcttccaaatatattagctaatttgtttttactttttcttctatccagccttgcttacatgattcatcactttattatcatttcagcatcctcaacttttgtcttttcgaactgtccactaaaaattataattattggtgaatcgaattatatgctggaaaaaataacataaaagttccatttgataatactacatatttattccatataaattcagctggttttttaaaaaaaatattttagatttgggggtaaatgtgcatgtttgttagctgggtatattgcatactggtggggattgggcttctattgtaacattacccaaatggtgaacgttgtacctaataggtagtttttcaacccttatccccacccccttttggagtccacagtcctagtgtttccatgtttatgttcatgtgtatccactgataagtgagaacatgttgtatttgattgtctgtttataagtgagaacttataagtgagaacatgtggtatttgattgtctgttccaaattagttcacttaggataatggtctccagttccatccatgttgctgtaaagaacataatttcattctatttatggctgtggagtattccatggtgtatatgtaccatattttcttcacccagtcaactgttgatggactcttaggttggttctatgactttgctattgtgaatagtaccatgatgaacatatgagttcaggtgtcttttttatgtaatgattttttttttcctttggatatatatccagtagtaggattgctgggttgaatggtagttatattttaatactgtttggtaacgaataacattttcctagttagcaccttcttatctctttcttttcaatagttattcaaagctttctctttattccttgtattcctcaaatcaccttatcttacttcctacttctcagtaaataatcttgtcatttatctcagaaaatagaagcacttaattataagttataaatttctacaaacttactcacatcttccatcatttttgccttttcccagtcctagaggaagcagcagtccatcctattacccaaatcttcatttattctatatacttggaatattgctcaattttctttttctctttttctctttcctttctggatctcaaaagtgtattttttctctttttctctttcctttctagatctcaatagtgtatttttttctctttttctctttcctttctggatctcagtggtatatttttggggttggggagggtcacctttctttcatatatgaaagaacccatggatctcatttgaacatgaatccatccctaattcctattctatatctctctttcctttcatagccaaaattcttctatctccagttactcaccttccatccactcctataactccctgcaatctgggttttcccttacctttccattgatactattttcaataagataactaatgattttgtcttttcattgtctaataggctcaacttatttaactaatctgcaggctttaatatgattgacattgttctccttacacatttttctttttttttttttttttgagatggaatctcactctgtcacccaggctggagtgcagtggcatgatctcagctcactggttgaaacgattcttctgcctcagcctcccaagtagctgggattacaggcatgtgccaccacacctggttaatttttgtattttattttttagtagagacagggtttctccatggtggctaggctggtgttgaactgctgacctcaagtgatctgcatgcctcggcttcttaaagtgctaagattacaggcaggagccactgcgcctggccacatttttcttgttcctttgttttccattatgtcttctgtttgcctctgtacttcaaaattgcctttgcaagcacttcatcctctgtctatccctaaaaatggtgttactgtgggttctgatgtcaaccctctacatctactctttctgggcaatttcatttatactcaggttgtaaattttttgagggcaaggttcatgttttttcatctttctttctgtgtaataatacctgacacctactagtcataaataatattgttgaataaatgaatgaatttagataatatcgtccaaatgttatcagtcattgaaaaataatgcttgtggctgggcatggtggcttgaacctgtaatcccagtactttgggaggctgaggcaggtggatcttttgaggccaggagtttgagaccagcctgggcaacatggtgaaaccctgtctctactaaaaatacaaaaatgagccgggcatggtggcgcgtgcctgtaatcccagctactcaggaggctgaggcaggagaatcgcttgaacccaggaggcagaggttatagtgacctgagatcgtaccactgcactccagcctgggcaacagagtgtgagaccctgtcttaaaaaaaaaaaaaaagaaagaaagaaagaaaaaaaaagaaatatcgcttataattccacctttcagagataatcctagatcttatgttagtgtattttttcagtcttttctctacctagtatctgaatttcttactattttaattatttgaaaacctactgtcttttatatttattatatatatgtagaaacctttcaacgaagtctaaaaataggaagcttccagaaccaccagacaatgaggatgaagatgaagatgtcaaagctgaaagactaaaggtcaaagagctgatgggttgccagtgttgtgaggaggtaatttattctttatggctaagtcatagtaaatatgaaatgatcaattcccggtatatagaaattaatctgaaaaatatttttctttgcatatgaagcaatctgaaaaaaatctttcttggaaaaaaatacttcgtttacttacttttgaataagccagaatttcagtcataaatggatatttatttgtacagtatccccttattagccaatataatttttgtaatatggatatgaggtatgtgcagcctgtcatttcatgataagttttataactttctttttaaatacaatttttcttattagaaaccatccattatggtcagcaatttgcataaagaatatgatgacaagaaagattttcttctttcaagaaaagtaaagaaagtggcaactaaatacatctctttctgtgtgaaaaaaggctggtatttaatttttccttacataacttttctagaagagtaatttctacttttagtatgatttgattatgatttttttttctttcaattcctttaggagagatcttaggactattgggtccaaatggtgctggcaaaagcacaattattaatattctggttggtgatattgaaccaacttcaggccaggtatgatatataagagtataggatatgttgaatgtgatttatattgttaattaacataaacttttagtgacaaattcggattttatattcaatttttatgtatatttttagaattttttgtacagcctgatcaaattatgatcttttgggttatctgtaaaaataatgtgcatggtgaaattttcatagacacatgtagacacacgcatatacagtatttctgcttttgtaatgcttacatgcgtgagttatttgtctaccaacttaatggaagacagttttattagcttcaggagatatgggagcttgttttgacctgccatcagctagtcttttattataagcatgtcactgaccactttgtggatacttcacaaaactaccctgatcccatttcctgcttctctccccttgcttactttatgccagccacactaactcattgctttcctggaaaatgccaggcatactcttttctttgggtttttgcccaagatgttttctttgtttggctataccttataccctagaaatacatatactaaattcacttacctctttggctcaaatgtcaccttccagtgaagctccctgatcattagaattacatcttgctttttcatccaactctgtattaccctttctgaccaagtctctgaactctgacttagctttatatgtccttccatcatcaaacatcaaaaaggagtaaaacatctgggcgggtgcagtggctcattcctgtaatcccagcactttgggaggctgaggcaggaggatcacttgagctcaggaattcaagactagcctgggcaacgtagtgagacatcttccctcctaaaattcaaaaaagaaaaaagcaatagccaggcatggtggcacatgtttgtagtctcagttacttagtgataataataataatgacaataaaggagtacaaatctgacttgatattagtctggctgtaggaaggggttttaattaatgtacttgccacttccttcacagtgtaaattaagcaaaataataaaaattggtttgtgtttctataggtatttttaggagattattcttcagagacaagtgaagatgatgattcactgaagtgtatgggttactgtcctcagataaaccctttgtggccagatactacattgcaggaacattttgaaatttatggagctgtcaaaggaatgagtgcaagtgacatgaaagaagtcataagtcggtaaaataattgtctttagattccttttgttacttagaggaaaggtttgcatttcatatttttaaaatttcataacaagcatttctgtggacaatgatttttatagaaaatgtttattactttttcatatattctttatgatatatgaaaatatactgatagctgtaaattatgatagttataaaaaggtcattttttaatttctagttacaggataaatatacctatagatatcatgaaacttattttaattcaaagtgaaccattttatcaagatattaatttatttaaaatgatgtaaattggagacttttgcccttacctacttataataagcttcgactaagtaactattctagagaaaacaacatcagggatcacacccagttggtatttgtgtttatatatatcatggtattctcattttgtattgttcattttgcagaataacacatgcacttgatttaaaagaacatcttcagaagactgtaaagaaactacctgcaggaatcaaacgaaaggtactttcattaaacaccaaataatgcctgtatttttattgatagtttagtacctgatattgtcttgatagattccttatagtgaacctttgttaatttcccacccatctttttctttccatgtagttgtgttttgctctaagtatgctagggaatcctcagattactttgctagatgaaccatctacaggtatggatcccaaagccaaacagcacatgtggtgagtatggtacttgtgacacagtacatgatactttagaatagaacagtttcttttattataatagtttaatgttagttatatgtacatcttgattttaaatcctattcaaacgatacactagtaattaaaaattaaatagatttagagatttccttaagcttttaaaactttgcatatttttcatgaagtgttcataatattttacatattccgaaacagaaataagcatgagtcattattaagataaagagttctagtgttctgaatagtttttaagtttttttctagtcatttagcatacaaatgatcttttccataataatagtgtcttaaatttatgttgagactctttctaggacagtcatgcattgcctaatgacagagatacattctgagaaaggtgatgttgtcgttgtgcaaacataatagagtgtacttatataaatctctgggtggttatagcctactacacacctagactatatggtatagcctattactcctaggctataaatctgtagagcatgtcactgcactgaatactgtaggcagttgtaacacaatggtatttgtgtatctagatgtatctaaacacagaaaagatacattataaaagtattataatcttatggaatcactgttggaaatgtgtttcatcattgactgaaatgtcattatgcagtgcctgtaaagtactaattagttgaacaactctttttttttttttttttttgagtcagagtcttgttctgttgaccaagctggagtgcagtggtgccgtcttggcttactgcaacctctgcttcccaggctgaagcgattctcctgcctcagccttccaagtacctgggactacaggcaagagccaccaagcccggctaattttttgtatttttggtagagacagggtttcaccatgttggccaggctggtcccgaactccagacctcaggtgatccgcccccttcggcctcccaaactgctgggattacaggtgtgaggcacagtgcctggccttgaacaactctttaagcctcaacttccatgtctataaaatgtaaggtttggtttggatgcatgttacggttttcttatgattcaaagcctgttttggttataacatgaaaaggcatcaattttaaaatttatttgttgtcatacttttagcccatattaacatttgaaatcatagattttttttttccatttgacaagctttcaaaatgaagggaaaataaattagaatataaaagtcatggcctggcgcagtggctcacgcctgtaatcccagcactttgggaggctgaggcagcagaccacgaggtcaggagatcgagaccatcctggctaacacggtgaaaccccgtctctattaaaaatacaaaaaaaaattagccgggtgtggtggcaggcacctgtagtcccagctactcaggaggctgaggtaggagaatggtgtgaacctgggaggtggagcttgcagtgagccgagatcgggccacttctctccagcctgggggacagagcgagactccgtctcaaaaaaaaaaaaatcatagttgggcaggatgtaatagccatagcaattgatatttggtaagttttaattaacttaattaaccaaccggttggatttttaaaaacccatttttttttaacaaacagatgtgttcctctctttttgttttatttatgttttataggcgagcaattcgaactgcatttaaaaacagaaagcgggctgctattctgaccactcactatatggaggaggcagaggctgtctgtgatcgagtagctatcatggtgtctgggcagttaaggttgatgtctaaatagcgtgccattcaggggaagaggttgggggttggattttgaaagtcatcatttcaaaaacatggcaatagttagtaatttaaatgttaaatattttagtttttgagttagcttttgatagattgacttggaagtatgttgagttttttaaaaatatggctgtctactttgaatttgaattcacttaatatttcaataacttggaatattatttttaggcatagtacttgttatttcaaaaaattgttatatattggattaattatgtaacacaaatatgaaataaacatatgagtttctacttacataaataaataattgagtaaagaaatgtgtcagagaagaggtacatcttccttacagaacaattccaaataataatatatgtagataatacccacttcaagggaggaggcttaatctcctatcccccaagtttggacgggacttagccagtttcttgtaaaaaatgaacgacagaaggagaaaaatagtaactttacagttgagaaagctggcaaatactaccttaactaaacgatgttgtgcagatatcatgtattcactgatatgatatgatggaaaaagtactacagctgtgtaatattctctccaaaacccataacccaagtgtagtcatgagaaaaatatcagactaacccaaattgagggaccttctaacacacacctgaccagtacttctcaaaactgtcaaaatcatgaaaaagacagaaagagtaagaaactgtcacccacagttagagactaaggtgacgtgacagccaagaacactacggtatcctggatagaacctggaataaacaaaggacactaatagaaaattggtgaaatctaaataaagtatggagttcagtgacaaggaatgtaccaatgtcggtgtctcagttgtgaggaatttaccatggtaatataagatgataagattagggaaactgaaaccggataaagagtgtatggggatgctgtattttctttgtaatttttctctaaatataaaggtatatttttttaaaatgtagttatatgtgtgagagattattctttgaagctgtcattttatatctgagctttcttttaaaaaattacttcagatgtatcggaacagtacaacatctaaagagtaaatttggaaaaggctactttttggaaattaaattgaaggactggatagaaaacctagaagtagaccgccttcaaagagaaattcagtatattttcccaaatgcaagccgtcaggaaaggtaaaattttaaagaatgtggttatatttctttatagagcaaaggttataaaaagttattatattaaggattaagtgaaaaatcatcttttcattcatagaccatatatatatatatctctgtgtgtgaatatatatgtatattttttcatatatatgaaatatatgtatctgtagatagataatttatatatctctctctgtattatcaccaatactggactaatgaagtctgatggctggtgttttatatctgccttagtattagatttttcaatattcagtagtatttaaatttttttaacattcttagtagtaatgagagttgttttgcatgaaaatgttattattttaaacaattttcatccaactaaataccaaaataagttattgaatttaattttgaattttaaacatgttgaactttagctttagaacataatagtagtaatttttaatttttttccatattttatctttttttccagtttttcttctattttggcttataaaattcctaaggaagatgttcagtccctttcacaatctttttttaagctggaagaaggtaagtagtatcttctattttggcttataaaattcctaaggaagatgttcagtccctttcacaatctttttttaagctggaagaaggtaagtagttgaaaagcacttatgttgtagctctcaaattatgaaagaattttatttaaaaagtttaaaactggggactcggtttattttagaaactatggcagataagaagataaccttttattcatttaatctaagacacaggtaaacactaatgtcatagggattttgtagataaactctattgtaatgtaaaccttttacaatttttagagagcattgacacagtttatcacattgcatctatgagaagggtcagcttaattatcgagtctttgcagttagtccagcagcaagagctctgagtttcttgaatccttacttcatactggtccatagaagtagcaacactatcaagactccagtggcaaagagaattctgagtgtagcgaggggtgggcagtccccaaaattttaaggaagcttatagaatcttggcatttaaaaaataagtggtatgtaggataaatatatatatgctggtgacagttgagggagatcacctcctggaagaatcaggtattcatatgcagattattttatggcatttataaactgtgaaacaacctatatttatgtataaggtttattattaataattttcaaaataactacaggatttttatgattgttctttatgtgattactgaatacaaaaagatttcctgatactgtatatattcttgttgcagctatggattaatgggtttacttttgccaagaacactaattaattattttttggtctgtaatatatggcctgcatgatgttcattgtttattcatgtttattggccggcatggtggttcacacctataatctcagcactttgggaggctgaggcgggaggatcccttaagcccatggttcaagaccagcctgagcaacatagtgagactctgtttttacaaaatattttttaaaattacccgggtatagtggcatgtgcctgtagtcccagctaactcaggaggctgaggtgggaagattgtttgagcctgggaggtcgaggctgcagtgaaccatgattgtatacttgctgtgttgcccaggccactgtataccagcctgggcaacagagcaagaccttgtcttaaaaacaaaacaaaacaaaacaaaaggtttatggagataggaccaatatccagaatctagttcaagaagccagaataggctacagtggagttggagaatgggagataagagagcagggatcaaaagaagacatgaaaagaatcaccaggaaaaagataatggaggagaacttagaaaaagtgaaataagacaagtaacattcaacatacagtacttagggctatagaggaattataggtgtggggaagagaaaggaagtaagcgggaaaaataacatgttttggcagcttcaaatttaagtgggttgattacagagatattttaaaacattgttagccactttggtaggtattgccatttttttcagatattgataagtaaaatactatttttatattttaatagctaaacatgcttttgccattgaagaatatagcttttctcaagcaacattggaacaggtactataaagttaaatttttaaaaattattttatagaagaaagtatctgatatcgattgttttggtttatattagagagggagagatatcgtaaaccagtgacaaattggtacagaatgatcttaaacttggtataattttaatcaaccttaggttcttcacttactaattttttaaattttattttttaaattgatattattttaaattgacaaatcacactgtttattgggtacagtgatgttttgatacatgtgtgcaatatggaatgcttaaatcaagctaactttcatttgctgattttgaatatctgtttttttcattttgtaaagaaagtgagtcatgatggtggtgtttcacattagtgtatttgaaattacattgtttaagtagttatgaattattttttaaaaaacatatctattaatctaaaatagtattcatctttgcatgtaacttttgaaaataatctgtttgaataatgttaatgttaataaatctcttgatacttgttgatataactagatatagccttgtaccatttctgatttagttaaaagttctttgaggtacttgagatacagcatactgtattcatttatttcttttcacctaggtttttgtagaactcactaaagaacaagaggaggaagataatagttgtggaactttaaacagcacactttggtgggaacgaacacaagaagatagagtagtattttgaatttgtattgttcggtctgcttactgggacttctttctttttcacttaattttaactttggtttaaaaagttttttattggaatggtaactggagaaccaagaacgcacttgaaatttttctaagctccttaattgaaatgctgtggttgtgtgttttgcttttctttaaataaaacgtatgtataattaagtgaagctgcatgtttgtattgaagtatattgaactatatagtttgtatgtcatctttttcaccattcagaaacagtgcttctgaatttgtgatttaaaggaattgtaatagaatagttttatttttaagttatctttaagtttatgccatcttcttaaataagtacgtaatgttccaatctaaataaaaaactaattcataactaatgcatagaaaagatacataaagcaatgtgaaagtttcttgcttctcctttttaatttctaaaaaagccactttgaatggaagttgtcatccgtaaaagctgaagtgtaagcactaggaaatctcaatatagagatttgaggaaagttatatccactaggtggcagtcattgatcataataagtgaaat

SEQ ID NO: 15291 - DNA, 39117 bp, Homo sapiens
atgttcctcaaaagtaaatgggggatcggctaccgcctgaggtatcattcatttttattgacattattctatattatactcttgctatactgttattatgttggaggcttgctgttatatgctttgaccatcatttatggtactaaatttaatttaaagccttcataatttacttttggctgtttattgtataatcattaattgtgatttttggtattctctagcatgtacatagacaaatattgtgccacagaatctctttcttcactggttaaacaacatatacctggagctactttattacaacagaatgaccaacaacttgtgtatagcttgcctttcaaggacatggacaaattttcaggtattacttactttaagtctcttggtgtttgaactgggatcctatattgggaataggtttcattgatttcctttttgtttccttctccatgtagtattgccatgctcccaggtggccagagttaatattctgtttctgctttattttgtttttgaaagccagaaaaaacacagcaaaatttttttttttacaaacaccatgcaagaaactgtaactaatatattaaatacttaagaaaatgttaaaaaacgtaaaaataattgtgtttactttgttgtcaagaaaaaaaagaaattgcttgtaggcctcctgagagtaaggcatatatgtatatagtttatatacattctcaggttcttttatagtttcatgatttcataatgaattatatgataaatccttgaattcttttaattgaggcattattttttaattttttaatgaggaactcaaactcagtctccttcctctgtttaggaattgcttgatagacaaaaggatgttattgatgtaagtacattgtgcagaattttcatagcatttatctcataatcagaaaaatacttgttttttttttaaaaagaaatcacaaattaagtggactgaagtacacttgccaacttaatgcactctgcctatcattctatctacttatacccacctatctcctattctttagtaacatttatatgtgcttattttctaccagatgctggtctgtgccttttgcaattattagtttatttcattatcccaatatttcaagaaatacatgagataaatactattattgctttcattttacaaatgaagaaactgagacataaaaagatttaaggaacttgcccaaggtaacacaggtagaaagtggtggagctgagttttgaacccaggcaaatcagttccagaactcatggttttcaccaccatactttgttgttgactcttacatttctttgaaaaattgtcacggtatttcactggatttcacagtgtcttctgggatctcctgtaggatggaccgtaagacctcttaagggaattcataatgtcagcactttttctaataataccaaaatgttatttgccttattgaccctcagcttctcatgattatacagtgttttccagagactgcataatatgtgctatcacaacagattgaatacagaaacaaatatgagaacccatctgtcttctgttaagacagacattaaagagatttgcagaaatgtaaaacaatattctcttctcattatttttgttttaaaagatgcagtttttaaaaataaaattgtgttaacccgtaataggtttacttttttattttttaaaagatgaataagtatttaaatgattactgtatgttttctaatgtacatatttattttattattcaatatagtaacattctcagttttaatttcaaatactgtaaaatttttgttagtttataatatgatatagatataatatggtaatagatatgataatagatatattcccatatataaaatttctttgaggtccttaatttataagaatgttaagcctgttacttaggctggagttcagtgccacaatcacagctcactgcagcctcaaactcctgggctcaagtgatcctcccacctgagtctcctgagtagctaagactacaggcttgcatcagtatttatgcctagctaatttatttttattttttgtagagatgggtcatgatatgtttcacaggctgttcatgaacttatttttaaaggatattttacaataatttatgataatatgcttaaagatatactattctttcatttttttcttttaggtttgttttctgccctagacagtcattcaaatttgggtgtcatttcttatggtgtttccatgacgactttggaagacgtatttttaaagctagaagttgaagcagaaattgaccaagcaggtaaaaacagaactaacaaaacattttaggcaatgaatcagacagatggtgaataagacaaaaattatataaatgtaattttatattttttttagaataaagggtagaaataagtaaataagtaatgagatactgatagtgataggagtaatgcaggaaataatggggtggtcttagaaggcagcgaacttagattatatcatcaggaaggactttgttgagatgatacttgacctgaggcctgtataatgagaaaaatcaagtaggtgaagattttagggcagaaattttcagataaagaactgcaactgcaaaggtattaactgaggaatgagttggatgtctttgagggataaaaaaaggctaccatggccggagccatagtgaagctattacacagcaaagtcaggaggatactcaaagggatagatcatgttctgcctttgaacgtctggaaaacaatttcatttgttttcctattgtagtgtggaagctatcagagagttttaaagcaaataggtaccatgatctgatttgaatttttaaaaaaacacgttctggttgttgaatgataagagtattataaaggaagtgtggaagtaggaagaccagttaggaaactgctatagttaatactatcttgaactagggtgtcagtgaaaatagggaggccgggcgcagtggttcatgcctataatcccagcactttgggaggccaaggcagggagatcgcttgagcccaggagttccagaccagtcttggcaacatggcaaaaccttgtcacaaaaaacacaaaaattagccaggtatggtagtgtgtgcctatagtcccaactactctagaggctgcggtgggagaatcacctgaggccaggaggtcaaggctgcagtgagccatgattgcaccactgcactctagcctgggcatcagaaggagaccctgtttaaaaaaaaaaaaaaaaaaaaaaaaagggaaagaacagatatttgggttatactggtggtagtggtgatgagttgctgatagattgagtgttagaggctcaggagaagttggaatgaagaataattcctaagcttttgataactgggaatgagattgccatttcctgaaaataggggaagaataggtttgtggaaagaaggaatgcaggcatgagttttttccttttttttttttttttttgagtcttgctctgtcacccaggctggagtgcagtggcaccatcccggctcactgcaacctccgcctcccaagtccaagtgattctcctgctgcctcagcctcccaaacagctgggattacaggcgcccaccaccacgcccagctagttgttgtattttttagtagagacagggttttgccatgttggccaggctggtcttgaactgacctcaggtgatccgcccgccttggcctcccaaagtgctaggattacaggtgtaagccactgcgcccggccgaggcatgaattttgagtatattgtttgagatgcatctggagttaaatgaagatgttacggctgaagatacagatttggaagttactcacaggtagatggtgctatggaattggatgaaatctcttagttgggtaaggagtgtagataagaattgaggggcaagcctcctgggtgagcagtggagaaggagccaagagggctgaccgtgaatgagcaattattactctactttttcatgaaagagtggaaatggaaaaacctagaaaaatggtgtttaggaaagaggaagtggtcagttatttgtcaattgctgtgaagaataagatgaggacaaaaaaggtagttttggtaacagaggacggtgagggatttggtagactgtaagagtggtgatcttgacagatcaatttcatgatgcagtaaggagcaaggtggatctattcagtttacggtaagaacatgagttgaggaaactttcttatgatcgaaggttagcaaaatgtttgtagtggcaggtgaggagagcaaaggaaaccaggatgttagttcacagttgttaaaagagttgagatgctgcaaatacacattttgcatgaatgccgagtgggtgatgattaaaatcattgtgataccaaagtcaagaatcaagctgaatatatcatcatgaagtaaacttgcttatattatgctaaaataaatctggaacttaaaatattactagaatttaattattcatggtttggtagtcaaattttaaaagattggccttattgtgtgggaacaataatttgtcagcattgctaactgtaaagttgctcctgtagtcctacgtttatgataccagatgcccactttcaaatgcagtgaggagaagccatatatttttgagttcttaatttttcttttgttattatgtctggatcaaagaagatttatctgaaaattaatgtatgtgattttgtagtttctccttcttttgaaatttttaaatgatgaagtgggcattctgcttttagttcaccctcacaaattgtggaagaatccacaataaaacttttatattgaaagtgcgtggccttaatggaattaaataactaaaaaaagaagcaagtctcccaaatttgttttaatatcttgagtactaatatactgaaccactacataaaattaatattatataatctgatttctttttatattattatctaaattaaaaaatacatgtattggcccaaaagttataatgttcttcctaaagttatctcactagtacattctctttaatatttgcattaactgttaatatttttctgtgttgaaagttctgaatgtttttgagtttaaaataaacctcaattgtgtagtattttattcttgccattaaataaatatatgtttatggtttaattggtagaattttatttttttatttatttatttttatttttttttattattatactttaagttttagagtacatgtgcacattgtgcaggttagttacatacatatacatgtgccatgctggtgtgctgcacccactaactcatcatctagcattaggtatatctcccaatgctatccctccccgctcccccaaccccacaatagtgcccagtgtgatgttccccttcctgtgtccatgtgatctcattgttcagttcccacctatgagtgagaatatgcggtgtttggttttttgttcttgcaatagtttactgagaatgatgatttccaatttcatccatgtccctacaaaggacatgaactcatcattttttatggctgcatagtattccatggtgtatatgtgccacattttcttaatccagtctatcattgttggacatttgggttggttccaagtctttgctattgtgaatagtgccacaataaacatatgtgtgcatgtgtctttatagcagcatgatttatagtcctttgggtatatacccagtaatgggatggctgggtcaaatggtatttctagttctagatccctgaggaatcgccacactgacttccacaatggttgaactagtttacagtgccaccaacagtgtaaaagtgttcctgtttctccatatcctctccagcacctgttgtttcctgactttttaatgattgccattctaactggtgtgagatggtatctcattatggttttgatttgcatttccctaatggccagtgatggtgagcgttttttcatgtgtcttttggctgcataaatgtcttcttttgagaagtgtctgtttatgtcctttgcccactttttgatggggttgtttgtttttttcttgtaaatttgtttgagttcattgtagattctggatattagccctttgtcagatgagtaggttgcgaacattttctcccattttgtaggttgcctgttcactctgatggtagtttcttttgctgtgcagaagctctttagtttaattagatcccatttgtcaattttgtcttttgttgctattgcttttggtgttttagacaggaagtccttccccatgcctatgtcctgaatggtaatgcctaggttttcttctagggtttttatggttttaggtctaacgtttaagtctttaatccatcttgaattgatttttgtacaaggtgtaaggaagggatccagtttcagctttctacatatggctagctagttttcccagcaccatttattaaatagggaatcctttccccattgctcgtttttctcaggtttgtcaaagatcagatagttgtagatatgcggcattatttctgagggctctgttctgttccattgatctatatctctgttttggtaccagtaccatgctgttttggttactgtggccttgtagtatagtttgaagtcaggtagcgtgatgcctccagctttgttcttttggcttaggattgacttggcgatgcgggctcttttttggttccatatgaactttaaagtagttttttccaattctgtgaagaaaggcattggtagcttgatggggatggcattgaatctgtaaattaccttgggcagtatggccattttcacgatattggttcttcctacccatgagcatggaatgttcttccatttgtttgtatcctcttttatttccttgagcagcagtttgtagttctccttgaagaggtccttcacatccctcgtaagttggattcctaggtattttattctctttgaagcaattgtgaatgggagttcactcatgatttggctctctgtctgttgttggtgtataggaatgcttgtgatttttgcacattgattttgtatcctgagactttgctgaagttgcctatcagctgaaggagattttgggctgagacgatggggttttctagatatacaatcatgtcatctgcaaacagggacaatttgacttcctcttttcctaattgaataccctttatttccttctcctgcctaattgccctggccagaacttccaacactatgttgaataggagtggtgagagagggcatccctgtcttgtgccagttttcaaagggaatgcttccagtttttgcccattcagtatgatattggctgtgggtttgtcatagatagctcttattattttgagatatgtcccatcaatacctaatttattgagagtttttagcatgaagggttgttgaattttgtcaaaggccttttctgcatctgttgagataatcatgtggtttttgtctttggctctgtttatatgctagaattttaacataaagtacgtaaataaatttttattccaaatacatttggaatgtttaactgtaatttaaatgaatattaaatattaaaatgaaatctgaatgacataccttattcacactactgaatttgttataccttttaagtgttgtgctaataatctgtatgatcacactgtcattgatcatgtacaacctcagtaatcccaggaaattatattgaagtaggcattggctcttaaaccttccaaagactaaagatgaagttgaagggcagaatttggctgaaaactgagcctgaggctaaattttaattgagaagtaatgtaaagccaggagaggactctcaaacatggtgataagagagaagtctcgtgtatgatcaggatatgatgctaagttgtggtcagagaggaaaagttcacataaaagttggatattatacagatacagagataataagatcttaaatatggatatgtatccagtttgattttgaactagtggaattataccatgtgtctcctttgcatctgtcctctttcactcaaaatgacatttgtgaagttcagccatgttgttatgggtacagtagtttgttcattttcattggtttacactattccatagaatagtgttcttgttcttagtagaacaagaacattctcatgttcttgtacatgtgttttggtgaaacctgtattcatatctctgttgggtttatacctgttggggatctcttgggtcataagatatacatatgttcagctttaatagatactgccagaatataagagagttccatttgttccacataactgccagaccaatgcttctttaaatgttcctgcttcagaaagtttgtatcttttttaatgaacatactgaaatgtttgttttgttttggcaaatagattatagtgtatttactcagcagccactggaggaagaaatggattcaaaatcttttgatgaaatggaacagagcttacttattctttctgaaaccaaggctgctctagtgagcaccatgagcctttggaaacaacagatgtatacaatagcaaagtttcatttctttaccttgaaacgtgaaagtaaatcagtgagatcagtgtaagtataattatcacccttatacctgatggattgctttttaaggatacacattggttttaccatcttaatttttaaaatgttaacatatgtaaataatttatatagtttcgaaagattaccactgtaatttcacaatgttagagaaaaaaattacaataatttcatcgaataccctgtcttacactttttaaactagcatttattgtctcatctataaagtgaggaaataacaaatattccctaattgtataattttttaattactgtcattgtatctttttctttctttcacctgggagcacagattcaagtttccttgaatatattaatacactccccattgtatcttaaattttgttttgcgtttctattttttcgctattttttgcgtctattagttagtttttataaccactttttgtaagtagcaggaaaaatgagttttacctctatttatcctatgaggaaactgaaaaataaagaaggctacatagctagtagatctgggatcaaaatgacatctcaagttagctttagcccttctcagttaggttctcctagggtactaggaactgaataatttggaaataacattaaccactttcatataccacacacctatcttgttaagtccaaaatgtcagtagtaataaggcttaatcattaagattaagaatattgttatatgtttggaatatgctaaatttatatgctcttctttgaccaaattcagtgtcaaacaaatgtcaatcacgtatctgatttattccctggtcggcattactgaaagaaaaatgtttatttaaatcagcatgtttcaatttattttattatttttttatactttaagttctgggatatatgtgcagaacttgcaggtttgttacataggtatgcatgtgccatggtggtttgctacactcatcaacctatcactacgttaggtatttatcctaatgctatccctccccagtcccaaccctccaacaggccccggtgtgtgatgttcccctccttgtgtccatgtgttctcgttgttcagctcccacttatgagtgagaacatgtggtgtttggttttctgttcctgtgttagtttgctgagaatgatggtttccagcttcatccatgtaccttcaaaggacatgaactcatccttttttatggctgcatagtattccatggtgtatatgtgccacattttctaaacaccactctcataaaatacactcagaaaaataattaaaataccatctgggctcggtggctcaagcttgtaatcccagcactttgggaggccaaggcaggcggatcacaaggtcaggagatcaaggccatcctggccaacatggtgaaactccgtctctactaaaaatataaaaaaattagctgggtgtggtggtgggcgcctgtagtctcagctacttgagaggctgaggcaggagaattgcctgaactcgggaagcggaggttgcagtgagccaagatcgtgccactgcactccagcctggcaacagagtgagactccgtccctgcccccccgcccccccaaaaaaagaaaattaaaataccttagtcagctttgactgccatgacaaaataccatttactgggtgacttaaacagagtattattttctcacaattctgatggctgcagttctgagatcagggtgccagcatggtgatggctgtcttcctggcttgcagaaggccaccatctcactgtgtgctcatatgacctcttcatgtacactggcatgcaccctctggtgtctctttataaatgtactaatcccatcatggggaccccaccctcatgatgccatctgatgcagattacctttccgaagtcccatttccaaataccatcatatgggagttagggcttcaacatacaaatttggggaggcacaaacattcaatccataacaaaatgtgttccatggtcaaatacatttagaaaatattactcttatattccctatattaaagagttattcattagcataaaaaacatgagatgttctctggtaaagaaattccttcaactttgtttaacctcatgtttccaaatattatttaattgtgaatattttttaacctaaatcacttcttaacttattatggaacttgatcaatgccatatgcttttgaaatcttagatataacaatttaagaatttttttaaaaaaattacggggtatgtgaaatttataaattgctgaagtatgataatctaagctctccaactgcttgttaggacacttattacatgtgatatatagatattttatcagataagtagctgctcttcagataaaagggcattgtagtataccttgctttgcctcctgagagcagcagtggcaattaatatgataaaattgcgattaggatgagatttcaaagatatcagccattcagagtttaattgtatttttatttgcttctctatatctaaaatatttttcttgttacgtgaaaagtaaatggggctgggtgcagtggctcacacctgaaatcccagcactttggaaggctgcagcagctggatcacttgaggccaggagtttgagaccagtctggccaacatggcaaaaccctgtctctactaaaaatacaaaaattagccgggtacagtggcacatgccagtcgtcccacctacttgggaggctgaggcatgacaatcgtttgaacctgggaggcagaggttgcagtgagccgagatcacaccactgcactccagcctgggtgacagagcaagactccatctcaaaaaaaaaaaaaaaaaaaaaagtaaatggttaagatagagacaggacaggaagtaattccttcaggagtagagacaaatatttgagacataatgtcttgtgttttaacagttataactacgtgtttacatactcttagaaaaatttaagggcatcactgatctaaaatacacttttataacttttaattttgtcgtacagtattggctttctctccagtattgtcataagatcattttggggaatacgatttcttatttttttttttcagttttttttctttgtttttttcagtgattatcttttaactatctagagtttaaatctataccaatgtaggctggtcaaggtggctcacacctgcaatcccagcactttgggaggctgaggcaggcaagctccttgtttgagctcaggagtttgagaccagccttggcaacatggcgaaaccccatctctataaaaaataacaaaaattagttgtgtatggtggcgtgtgcctgtagtctcagctatttgggatggtgaggggagaagattgcttgagcctgggaggtggaggttacagtgagctgagatcatgccattacactccagcctgggtgacagaaccagaccctgtctcaaataaaaacaaaaaaagtccatatcaatgtgaagggagagttttaattgattttcatattaatgtacctttgtaccctgagctgtgttgttttttttttcttttcaggttgcttctgcttttaatttttttcacagttcagatttttatgtttttggttcatcactcttttaaaaatgctgtggttcccatcaaacttgttccagacttatattttctaaaacctggagacaaaccacataaatacaaaacaagtctgcttcttcaaaattctgctggtgagagtgtgtgaaggtctgtgaacgagtgttggcatggagcatggggttgaggggtggataaaggtctggattttaaaactatatttaaggtaaaggcatggtctgtctgcatgaaatctaaattatagttcaatacgtatcttattgatgctgaagaatatattacagtaaattttggtttacaaataaatgacagttttggccaggtgcgatggctcccacctgtaatcccagcactttgggaggccaaggcgggtggatcacctgaggtcaggggatcgagaccatcctggctaacacggtgaaaccccgtctctactaaaaatataaaaattagccaggcatggtggcacgcgcctgtagtctcaggtactcgggaggctgaggcaggagaatcgcttgaacccgggaggcggaggttgcagtgagccgagattgcaccactgcattccagtctgggcaacagagggagactctgcctcaaaataaataaataaataaataaatagttaaaaaaatttatactttgtataatagtagaatttccttttttaataataacgttattcttactagcatgttttatgctgataagtccatgatgagcaaaatatacttcaaaagttgaaaaaccctctttacaaagagttgtagtacataatatttatacaggtatgtgtctgcatagaagtgttttaattcttcaaggacagtctgaagaattagttaaaactaagaaaaataagacttaaatataaatatctctaattgaatatattagatttgtaatggatatttttggctttgctattagtattcttaccatgtagttgtcaaatatgaaaaaaatttaaacatacagacttgagcaaagctcaaaacaaaaaactgacatagtgttctgattttcaaaatattaaaagctaatacaaactttattcatatgtgatcagttgttcctataacatctcctattctgtagcagactctttggggtttaacctttctaacacttcacctacattctagtatcattcctttttgattcactaattcaaaaaagactttgcccagtattaaaataataagcatggctaggaatgattataaattagtattaaaataatcactgttaaaatctggtgcgtgttatattacataaccttcattctttctggtaaagatgtatttattgatggataaatgagtgagaacatggaaaattacctggagcatggaaaattaatggaaaattactcgaatggaaaatgttaggttttgcaattttttttctttcattaggaaatttcattatgaattctcgttttggttttaaaatacattttatattgctaatatataatccttacactgtgctaatcttgacattttttatatgtgtccagggaattgtacatgtatctcaaatatttcttttttttttaaaggaacttggattcaaatcatatctttttgctttgagttaattctcattgatctgcagaaattctagtattttcagtttgtctcttaattttttattattcttagagttgcttgcttatgcatgccatattttcctaagccttgtgtgtgttccaaaataaaaccacttttttttgaaccactggcctctgtgtgtatatatattgggtggtatcttacccaccttgcagagctttttgtatctcttgtgctgtggttccttcacttataatgtgtctctcttctcagggtacatagctggtcttgcaagttagagataagagatcagttaaggtactaggttgggagtaaagtagtgtcaccattctctatgacactgagatctagtgctgtgtctgatccaccctgccatactattcagttactagtaatgttttgctttgtttgatttaaatttctctctaaagtcacatttgtccttccctgaatcctgatttttgttatgatggaggagaaactgcatctattcggcagacatgttggtatagatttaaatcccgacaggatttaaaatcttactcttggctccaggtactttagagaatgtagagatgtgattatgtgtttgaatattttaaggtagttaaggcaattgacatgtctgcccagagcctacaaaaaattctctagggagtgatgttaccacacctatacctttctgaacttagcaggttatcttgttacctaaaattgtcagatagatttttattcttattatttaaccaaatttcatgtgttataggttaacttttcaatgttaataatagttgtagcagcagcagcagtggtggcagcagcagcagcagcagctaaaatatgcgcagttactatgtgtcaggttctaaactctgtgtatatattcagtcatttaattctcaggatgatcactctacctataaggcagatatacttattttacccactttacaaaagagggaacttaaggtccagaacatctaggtaacttgcttgaaggacgaatagtttaatgttacaactcaactttaaaaccaggctgactggcttcagagccaatgtacttacttgcgtattcgctaatgaaaataaaatatttctctaaaaatagaattatcttcccagtgttactaaaagcctcgtttagactcattttttattatttgcttattttctaacaccagactcagatatcagtgatcttattagctttttcacaagccagaacataatggtgacgatgattaatgacagtgactatgtatccgtggctccccatagtgcggctttaaatgtgatgcattcagaaaaggtaagatgaatgcagtgaatgaatatccatttgggagttatgcaagattaaaacgtttcttctaaaattaattatttgttgatttgaccttatgagttagaaattagattttacttttggaaataactagctgtctttatttatgatatatttcattacttcacagatgaccaatatataaagttacagaaatttagttttttaaaaaattatatgcttgtttaaaatattaaaatatctgtacattccaaaccagattgtctttatctgtcattgagtattatttctgtgagttgttgaagcagtttttctgtatgagaattagctttgttggtgagaaaagcttggtacatatcaataatatatccgcttatatacagtatgtaataagtgtcttttttttaattgtaggactatgtttttgcagctgttttcaacagtactatggtttattctttacctatattagtgaatatcattagtaactactatctttatcatttaaatgtgactgaaaccatccagatctggagtaccccattctttcaagtaagccaatgtatatacagataaatttccatatgcatgtcatatatataataaccattaaaaactaagcaaaaataacaaaatatgtagaaatttatcttgtgagatctcttagacttcttaaaactcaagtgagaaacggtttacattaaggtttaggattccccagtagaagtatgtttcagggtaaaggagattctgttttggtattaatatttgtataaggaataagtgtgttctatattgatcatagaataaaatataagataatttttaaatgaatattttttacctaaaatccaggtattgggtattgaaaaaaacttgagaagtcacccaggcaaccatttttcctctagatagaactgttggattgtacatatcagaatcaagattacagaaaagtatccaacatattttctcttaatccttttgattttcatatgctaaaaaataaatggacaaatatctgtaacaatattttctatcttcttcttttcatacttttaaaaacagcttcattgaaatataatgcccaatcaacctgaccattattcaaagtatacacttcggtgtcttttattatgcttatagagttgtgcagtcatcactacagtcagttttaaatatgccatcacccccctccaaaaaaaataacccttatactcattagtaatcactcatttcctctcatacccactcccaaccctaggcaaccactaatgtactttctgtttctatggatttccttattttagacattttatataaatggaatcatacagtatgtagtcttttttgtctgctttcttgtacttagcatactgctttgaagattcatctgttttgtaacacgtatcagtgcttcatttatttttactaccaaatcatatttcattgtgtggaatgtatggaatgtttatgtgaaatactgcattctacttatctgttcatcagttgatggcatttgggttatttccaccttttggctattatgagtaatgcttatgaatatttgagtagaagattttgtatgagcatatgtttttatttctcttggatatataattaggagtggaattgctagatcatctagtaactctatgtttaacacttgaagaactgccaaactgctttccaaaatggttgcatcattttccatttccagcagcagtgtctgtggagaggtatctcatattatgaaatatttcaaacgtacagaaaacgaaccacctactatccaaatatttcaaatgttaatattgcataatatttgtttttagtaaaacttttaagacacaggtgaaaactcatgttacccctctccaatcttgtttccttctctcctccgtaggagtaaccgcaattcacaatttcacaatttgtaattcccatacgtgtttttttgatgttactacatatgtctgtatccataactattacacaagattttacaacttacaattttcaacaacactgacatataatcatactatatttcgaaagaaatacatgggagtttttgaagctaactattcatatatagtcgtattaatatttcaaatttgtttcttcattagattctgtatgattggatccaactgtagtctcattcatttccacttcttgcactactagtctacatatttgtgggttctttctgagcctccactgtcatattacgagagtttcagacaaattctgcaatgtcatatgacctgaactttggaattgacttaattgctaaataggaaaactcagaaggctaggtttcagcaagacagtgatgtactctgtctctatgtcatcccatggaggggtgtgccagtgcgagggtatctgctaggcactgcggattctattccagtgcagagtaccttctctgtcccacgggtctgtattcttatagaacaaggggaggaaactgaccttggtgagggtggctgataatatagtatccttggacttgggtaatctgcatttgaagtgctagctgtttattgattgtctgggaaagttagctgactgcacctggatccctggggaagctaacgacattggggcctgtgggagttaattcctcttctgcttgggagaagaagttctagttccataggaagctgagcttggatatagcttttcccaattaaaaagacaagagcaacaaatatcattcttagatatttattattatttcataggaccactatggtggacatactaactgcttttcaaatacatcattcatttttatgaaattgtgaagcgtaatttatatgcctgattattctgtgttgtagacaggaaaatgaaagtaaaatgatttgcttaggatcagatagttattaataagtggcagagttggtaatattgtccacaaccacctgttaatacatctgccactcattctttcatgtagactatgcctgggttagatattctaatacattctttctgaggttttgatttttttttgatataagatatatcctaagatatatcttaagatataaaatgattctcagttccatttgttactctgtggttgtctttcaggaaattactgatatagtttttaaaattgagctgtattttcaagcagctttgcttggaatcattgttactgcaatgccaccttactttgccatggaaaatgcagagaatcataaggtaatgactcagttaaaaatatataatttgctaataagaagtgtcatataaaaataacctatttgcttgattgcaaggcttagtataattgttatttcagaaataagtaaatggaatataaatacatttattatagtttcttattgtaataagtgataattaatatttattatttgagacttgctacatgctttaaaaattatattctctaattctcacaacattgtgaggtaagttttttgttactgatttcttatagatcaggaaatcaaagatgggattgttcatatgacttgctcaggttgactcaacttgtttaaattgtggatttgggaagtgactgtgatctttatgttcttaactggcaaactaacatgcccgtcccttttatcctttaacagaggtattaagtagtcaaggtgctaaattcttattaatggaaaaaaaatagatgaaagtgattgtcatcattagggccttggagaaattgctaagtatacagaggttctttggtattctttcactttctttttacgcctttcccttttgttttccttcaggcatatagcgatcttgtacagtctttggttgttcaaagcctcccactttttcactctgctgagattatatcttactgctctaataaaaattctgatcttcttcatggatgatcttaattcagtaaaaacaaatttgtctaaattaatttacagactgtgatgaataatgagctcattattttaataaattctaaaaaaataaattgtaggccaggcgtggtggaccacgcctgtaatcccagcactttgggaggccgaggtgggcggatcacctgaggttgggagttcgagactagcctgaccaacatggagaaaccccgtctctactaaaaatagaaaaaaaattagggcgtggtggtgcatgcctgtaatcccagctactcaggagggtgaggcaggagaatcacttgaacccgagaggcggagattgcagtgagccgagatcatgccattgcactccagcctgggcaacaagagcaaaaactccatctcaaaaataaataaataaataaataaataaaataaataaatacattctaataaaaattttgttatttgtttactataaaagtaacacatatctctatttttaaaataatattcaatttttgttaaatatactcattgtagtaatgtataaattatagaaaagtataaggaatatagaaatccataacccactgcacaataataaaatttactggacatttgcattttctttcttgtttcaactgaaacattttttttccaatataaattttttatttttatttatttattttttaatttttttatttatatatatatatatttttattatactttaagttttagggtacatgtgcacattgtgcaggttagttacatatgtatacatgtgccatgctggtgcactgcacccactaacttatttttaattaaagtttctattttgagatagttgtatattcatgtttgtttgttagaaatgacagagagatcctgtgtactctttacattttgtcccaataataacatctcgtaaaattatagtacaatgtaacagggtattggcattgacacagtcaagatacagaacatttctgtcaccaaaaagattcccattttttgctctttcctagcctctctgacctgtggcaaccactactctgttctctatttctgtaattttgatagttcaaaaatgtaaaatggcatcacaataagttttcttttgggattggcttttttcaaatagcattttttttgaagttcatcctatttgtatttatcaataatccattccttttcattgctgagtaatattccatggtatggatacatcacactttctctaaccatttgcctgttgaagaacatttggattgttttccgtttttggcttttgtaaagttgctgtggacatttgcatacaggttttgtgtaaacatcattttcatttctctgagataaatgcccaagagtgcaattgctgaattatacatgttaattttataagaaattgccaaattattttccaagatgagtgttccattttatgttatccctaccagcagtgtgtgaatgacaaaagtttgaattatccaaaataattgcatttgccttagcttatgtttttattcttgtattagaatttacatgtgtctcatgttctcataattcattgaacagaaaacttgccaattttgttcatttctcctcttcttaactaatctttatatttcatgcttcctttatctctgtggacagctctttcatataataccttcagttattaggagtagatatttttatagatgacaaaaatcaactaaataaaattgttaggtatttggatttatgaaatattttagaaatttcaaattaaatgagaacatgagataggaaaactatgatcatttgagtttaccattaacaaacttgtgacgtaaataacaccttagatttatatgctataccagtgtacacaaaaggctttgaacatttcaaaagctttcacttaagctgaaagccttatgtaaatccaaaggatacttggcaatttattagtgtttttatttatgaaaggttcatttttaaaactgagaattctttttctgtgtaaacatgtcttcccatctgtttccacagtatttcaaaagtagtaatgttttggctatttattatttgtatagctgtaaccccaaccgccatgacaccttttgctttattttaatctcagtttcttggcagcactactgtattctgattcttaaaaattttgttgaaattgttacatctcagaaataatgagccaaattaaaggctaaatggaatttgtatttagtgtgagggggacttttattacctataagcctggaatgtaacctttttggttttgctgatgtaaaattaagagatctacaataatttactaatttatttgtgtgtttctaaagtgtctaaaattataataaattgtttttcattttttttagatcaaagcttatactcaacttaaactttcaggtcttttgccatctgcatattggattggacaagctgttgttgatatccccttattttttatcattcttattttgatgctaggaagcttattggcatttcattatggattatatttttatactgtaaagttccttgctgtggtaagttaacgttagttgtactcatgctatttatagatagaatgttatttaaaatctgttataaacatgacagttgacttattgcataatttggttattaatttgttaaagaaaatagagcaagtgtgtctggtatttaatacatgtaatcattttatatgataagtgacttttaaaaacaataacttaccaccattttaaaataatttcttgaaactaaagtgatctttcatgtagaccacctacttgggtgtaatcaggaacgttttaatatattccttccttaaaatgccttccttcgtttttcttatgcctgaaaataatttcacaaaggataagctcttttattccatagtttaaaatatagcttaacatttctctatctcaataatgggcaggctgcgagccagatgaagaacacaactccatttacaatagccacaaaaaattaaaatacctaggaatacatctaacagaggagatgaaagatctctacagggagaactacaaaacattggtgaaggaattcagagatgatacaagcaaatggaaaaaaatttcatgctcatggattagaagactcaatatattaaagtggccatactgcccaaagcaatctacagattcaacactattcctatcaaactaccaacattattcatcacagaattttaaaaagctattctaaaattcatatggaaccccaaaagtacccagatggctaaaggaatcctacataagctgggcgcgggggctcatgcctataatcccagcactctgggagaccgagacgggtggatcacgaggtcaagagatcaagaccatcctggtcaacatagtgaaacaccatctctactagaaatacaaaaaaatagctggacgtggtggcatgcgcctgtagtcccagctactcaggaggctgaggcaggagaatcgcttgaaccggggaggtagaggttgtgttgagccaagatcgtgctactgcactcaagcctgggcaacagagagagactttttatcaaaaaaaaaaaaaaaaaggaatccatgtaaaaagaacaaagccagaggcatttcattacctgacttcaaactatactataaaggctccagtgaccaaaacagcatggtattggtacaaaaacagacatgtagaccgatgaaacagaatggaggacccagaaataaagccacacatctatagccatctgatcttcaacaaaattgataaaaataagcaataggaaaggactctgtgttcaataaatggtgctgggatagctggctagccatattcagaagaatgaaattggacctccacctttcaccgtatgtaaaaagtaactcaagatggattaaagatttaagggtaagacatcaactataagaattctacaagaaaacataggaaataccattctggaccttgggaaagaatttatgggtaaataagtcttcaaaagcaattgcaacagaaataaaaattgacaagtggcacctaattaaactaaagagcttctgcacagcaaaagaaactatcaacagagtaaatggataacatacagaatgggagaaaatacaaactatgcatccaacaaaggccaagtatccagaatctataaggcacttaaacaattcagcaatcaaaaaacaaaactccattaaaaagtgggcaaaagatatgaacagacacttctcaaaagaagacatgcaaatggacaacaaatgtatgaaaaaatgctctacatcactaatcatcagagaaatgtaaatcaaaaccacagtaagataccatctcatgtcagttagaatggctatgattaaaaagtcaaaaccaacagatgctggcgaggctgcagagaaaatgaaatgcttatatactcttatatactcttggtgggaatgtaaacttcagcagccatggaaagcagtttggagagttctcaaaaaacttaaaacagaactaccttataactcagaaaccccattactgggtatatatccaaaagaaaataaatcattctaccaaaaagacacatgagtatgttcattgcagcactattcacaatagcaaagacatggaatcaacctaggagcccattgaccagtgattgaataaagaaagtgtggtacatatacaccacggaatactgagcagccataaaaaagaatgaaattatgtctgttgcagcagcacaggtgcagttggaggccattattctaagtgaattaacaaaggaacagaaaaccaactattgcatgttcccacttataaatgggagctaaattgggtaaacatggacataaaaatggcaacagtagacactgggcactactagacgggggcaggaggaaggggagcaagggttgaaaaactaactgttaggtactgtgtccagtacctaggtgacagaatgaattataccccaaacctcagcatcatgcagtatacccatgtaacacacctgcacatgtatcccctgattctaaagtaaaactagaaattacttaaaataaaatatagcttaaaatatcaaagaagagactgatttgcattcatgttcacatgtaaatgactgacagcaggccctttcattgattactttattaggaaaaagggaaaacagagttacatgaggttgatgctgaaagtaaatttaccgattttgtcagagatcataatgaccttatatattagtttctgccatataaaataataatgtttttcttacacattaaaaaataaagtgctgtatattaaaatagtagctaatatttgagagagagaacgttgtagctagctatacttgctttttataataatgagagatagtattttacttggtacaaaaaactacaagtagtgttcagtttaaatgatttatttaggattatattaataatttcatattttaatatggctagtatttcatgtcatgtgtattgcaagctattcatatttttatagaaacatatttctgatttacaggttttttgccttattggttatgttccatcagttattctgttcacttatattgcttctttcacctttaagaaaattttaaataccaaagaattttggtcatttatctattctgtggtaagtcacattttacattatttcaactttccatagcagtttaattaacatgaattctttcctgattatactaaaaatgttacatgtcttttgtaagtgaataatttagataggtaattggcagcttctttttgtgtgtacatttgtcttctgaatcatcctttccacgtaggaacaatatggaagagatttagcaactagtgtatcaaggatactagctacaaacaagtggtattcttgttgcttgctggctaaatatcatctcttgttccatgttttattagaggattgaaaaaatagtttaatgcgtagacaccaatttgtaagaagtttctaaacactttgtcacttttatttatttatttttttctttaggcagcgttggcttgtattgcaatcactgaaataactttctttatgggatacacaattgcaactattcttcattatgccttttgtatcatcattccaatctatccacttctaggttgcctgatttctttcataaaggtaattctgctaaatattttaatatgttaaaaaacataaaataaatatggtctaatttggggatgttagttcttgtatagaaaacagtaaaatgcattgggctaatggctactacttgatttagatattattaatgcagcataaattattgtgagctcttgtcaaactgtaaattctcaaaggaaaagggctatgttcattacaggttctctcatgctcaaaatgatgtatataattagaagtgtgacatggtttcagtcagtatttgtttttaggagtttatcagtgattaaataacgtatttcactataaagggatgagaaagaataaagtgtaagagattttctccaagaaaaaatagagacaaaaaccagattgattttattaaggctggataattgaaagaaatttccatgtgattagaaaaaatattgttatgaattcttggtttggaattgctaattaattctacttactaatcctactacccctgcttccctttttaggtctcagttcaatgtgtttaatttatactgatcctcagaaatattttgggacagggaagattttaagtaaaaaacataacttactaatatgaacagctaacttattatagaaagtacacgtttgctaaacaaaatacattttttcattttaatccaaatatttctacatattgcagcgtatatattttcaaatctttttgtcttagatttcttggaagaatgtacgaaaaaatgtggacacctataatccatgggataggctttcagtagctgttatatcggtaagaaataaagtgtttttgtgaattagcatgtaccttaagaatggtttggtcctatggttttaactatgtttagttttttatcctgttgcatgaaaaagaaggtgcataaaaagttaagcatgttagttaacgctagctaatctgtatttcagtggggagtacctttcatttactgaatatgttcactttaatatacttagccttttacatgttattaattctgtttaattacagttctgtcttagaagcaaaaacaaagtttttgtgttcgattatattttatgaagctgacaataaatgaatgatacagaggcagaaaatatgtgaataatttgctaaaaataattctgctttggtttgtattaaaatttatttttaattatctttatcatgtaaaatataaaaaagttgtgattacttcttttggtaatggcaaggaacttgatgtatgtagtcttagttctgttggcaaaggaaaaaacaacaacaacaacaacaaatcttttagtcatgagctgctacatgttcttcttttagccttacctgcagtgtgtactgtggattttcctcttacaatactatgagaaaaaatatggaggcagatcaataagaaaagatccctttttcaggtcagttgattttttaaaaattttaaatgtttttagtatatttacagaactgtgtaaccattaccataacataattttggaacatttccagcactccaaaaagaaactttgtacccattaacagccactttcttatccctattcccatagctcccagtcttaggtaaccactaatctactttctgtttctgtcagatttgcctgttctgaacactttatataactggacaatggaaatatgctttggaaaacttgagtcaaaagaccaacaattctcttaaataccttgtatttaacttttatatctgtttgctttttaccatagttggttggcatgttattttaatgttggaaaatcatcagatttgccagataacatctttgaaaaattgctaggatttgggcactataattagtatctagcatatggttttacacttagtataatgtttggagggcttatcatgtagtcgtgtgtagcactttttatatatcttaatgagttgcttttacttttcaactattatgaacaatgctgctatgaattcagctattatgaacaatgttgctagtttgtatacaactgtttgtatggacatatattttcatttctcttgggtggatacctagaaatgggattgctgggtcatttgaggaattgccagactgtttctaaagtggtaataccattttacactcccgctaggaatgttttagggttctattttctccacatccttgccaatgcttgttattgtttgtcttttttacatattcttccaaatatattagctaatttgtttttactttttcttctatccagccttgcttacatgattcatcactttattatcatttcagcatcctcaacttttgtcttttcgaactgtccactaaaaattataattattggtgaatcgaattatatgctggaaaaaataacataaaagttccatttgataatactacatatttattccatataaattcagctggttttttaaaaaaaatattttagatttgggggtaaatgtgcatgtttgttagctgggtatattgcatactggtggggattgggcttctattgtaacattacccaaatggtgaacgttgtacctaataggtagtttttcaacccttatccccacccccttttggagtccacagtcctagtgtttccatgtttatgttcatgtgtatccactgataagtgagaacatgttgtatttgattgtctgtttataagtgagaacttataagtgagaacatgtggtatttgattgtctgttccaaattagttcacttaggataatggtctccagttccatccatgttgctgtaaagaacataatttcattctatttatggctgtggagtattccatggtgtatatgtaccatattttcttcacccagtcaactgttgatggactcttaggttggttctatgactttgctattgtgaatagtaccatgatgaacatatgagttcaggtgtcttttttatgtaatgattttttttttcctttggatatatatccagtagtaggattgctgggttgaatggtagttatattttaatactgtttggtaacgaataacattttcctagttagcaccttcttatctctttcttttcaatagttattcaaagctttctctttattccttgtattcctcaaatcaccttatcttacttcctacttctcagtaaataatcttgtcatttatctcagaaaatagaagcacttaattataagttataaatttctacaaacttactcacatcttccatcatttttgccttttcccagtcctagaggaagcagcagtccatcctattacccaaatcttcatttattctatatacttggaatattgctcaattttctttttctctttttctctttcctttctggatctcaaaagtgtattttttctctttttctctttcctttctagatctcaatagtgtatttttttctctttttctctttcctttctggatctcagtggtatatttttggggttggggagggtcacctttctttcatatatgaaagaacccatggatctcatttgaacatgaatccatccctaattcctattctatatctctctttcctttcatagccaaaattcttctatctccagttactcaccttccatccactcctataactccctgcaatctgggttttcccttacctttccattgatactattttcaataagataactaatgattttgtcttttcattgtctaataggctcaacttatttaactaatctgcaggctttaatatgattgacattgttctccttacacatttttctttttttttttttttttgagatggaatctcactctgtcacccaggctggagtgcagtggcatgatctcagctcactggttgaaacgattcttctgcctcagcctcccaagtagctgggattacaggcatgtgccaccacacctggttaatttttgtattttattttttagtagagacagggtttctccatggtggctaggctggtgttgaactgctgacctcaagtgatctgcatgcctcggcttcttaaagtgctaagattacaggcaggagccactgcgcctggccacatttttcttgttcctttgttttccattatgtcttctgtttgcctctgtacttcaaaattgcctttgcaagcacttcatcctctgtctatccctaaaaatggtgttactgtgggttctgatgtcaaccctctacatctactctttctgggcaatttcatttatactcaggttgtaaattttttgagggcaaggttcatgttttttcatctttctttctgtgtaataatacctgacacctactagtcataaataatattgttgaataaatgaatgaatttagataatatcgtccaaatgttatcagtcattgaaaaataatgcttgtggctgggcatggtggcttgaacctgtaatcccagtactttgggaggctgaggcaggtggatcttttgaggccaggagtttgagaccagcctgggcaacatggtgaaaccctgtctctactaaaaatacaaaaatgagccgggcatggtggcgcgtgcctgtaatcccagctactcaggaggctgaggcaggagaatcgcttgaacccaggaggcagaggttatagtgacctgagatcgtaccactgcactccagcctgggcaacagagtgtgagaccctgtcttaaaaaaaaaaaaaaagaaagaaagaaagaaaaaaaaagaaatatcgcttataattccacctttcagagataatcctagatcttatgttagtgtattttttcagtcttttctctacctagtatctgaatttcttactattttaattatttgaaaacctactgtcttttatatttattatatatatgtagaaacctttcaacgaagtctaaaaataggaagcttccagaaccaccagacaatgaggatgaagatgaagatgtcaaagctgaaagactaaaggtcaaagagctgatgggttgccagtgttgtgaggaggtaatttattctttatggctaagtcatagtaaatatgaaatgatcaattcccggtatatagaaattaatctgaaaaatatttttctttgcatatgaagcaatctgaaaaaaatctttcttggaaaaaaatacttcgtttacttacttttgaataagccagaatttcagtcataaatggatatttatttgtacagtatccccttattagccaatataatttttgtaatatggatatgaggtatgtgcagcctgtcatttcatgataagttttataactttctttttaaatacaatttttcttattagaaaccatccattatggtcagcaatttgcataaagaatatgatgacaagaaagattttcttctttcaagaaaagtaaagaaagtggcaactaaatacatctctttctgtgtgaaaaaaggctggtatttaatttttccttacataacttttctagaagagtaatttctacttttagtatgatttgattatgatttttttttctttcaattcctttaggagagatcttaggactattgggtccaaatggtgctggcaaaagcacaattattaatattctggttggtgatattgaaccaacttcaggccaggtatgatatataagagtataggatatgttgaatgtgatttatattgttaattaacataaacttttagtgacaaattcggattttatattcaatttttatgtatatttttagaattttttgtacagcctgatcaaattatgatcttttgggttatctgtaaaaataatgtgcatggtgaaattttcatagacacatgtagacacacgcatatacagtatttctgcttttgtaatgcttacatgcgtgagttatttgtctaccaacttaatggaagacagttttattagcttcaggagatatgggagcttgttttgacctgccatcagctagtcttttattataagcatgtcactgaccactttgtggatacttcacaaaactaccctgatcccatttcctgcttctctccccttgcttactttatgccagccacactaactcattgctttcctggaaaatgccaggcatactcttttctttgggtttttgcccaagatgttttctttgtttggctataccttataccctagaaatacatatactaaattcacttacctctttggctcaaatgtcaccttccagtgaagctccctgatcattagaattacatcttgctttttcatccaactctgtattaccctttctgaccaagtctctgaactctgacttagctttatatgtccttccatcatcaaacatcaaaaaggagtaaaacatctgggcgggtgcagtggctcattcctgtaatcccagcactttgggaggctgaggcaggaggatcacttgagctcaggaattcaagactagcctgggcaacgtagtgagacatcttccctcctaaaattcaaaaaagaaaaaagcaatagccaggcatggtggcacatgtttgtagtctcagttacttagtgataataataataatgacaataaaggagtacaaatctgacttgatattagtctggctgtaggaaggggttttaattaatgtacttgccacttccttcacagtgtaaattaagcaaaataataaaaattggtttgtgtttctataggtatttttaggagattattcttcagagacaagtgaagatgatgattcactgaagtgtatgggttactgtcctcagataaaccctttgtggccagatactacattgcaggaacattttgaaatttatggagctgtcaaaggaatgagtgcaagtgacatgaaagaagtcataagtcggtaaaataattgtctttagattccttttgttacttagaggaaaggtttgcatttcatatttttaaaatttcataacaagcatttctgtggacaatgatttttatagaaaatgtttattactttttcatatattctttatgatatatgaaaatatactgatagctgtaaattatgatagttataaaaaggtcattttttaatttctagttacaggataaatatacctatagatatcatgaaacttattttaattcaaagtgaaccattttatcaagatattaatttatttaaaatgatgtaaattggagacttttgcccttacctacttataataagcttcgactaagtaactattctagagaaaacaacatcagggatcacacccagttggtatttgtgtttatatatatcatggtattctcattttgtattgttcattttgcagaataacacatgcacttgatttaaaagaacatcttcagaagactgtaaagaaactacctgcaggaatcaaacgaaaggtactttcattaaacaccaaataatgcctgtatttttattgatagtttagtacctgatattgtcttgatagattccttatagtgaacctttgttaatttcccacccatctttttctttccatgtagttgtgttttgctctaagtatgctagggaatcctcagattactttgctagatgaaccatctacaggtatggatcccaaagccaaacagcacatgtggtgagtatggtacttgtgacacagtacatgatactttagaatagaacagtttcttttattataatagtttaatgttagttatatgtacatcttgattttaaatcctattcaaacgatacactagtaattaaaaattaaatagatttagagatttccttaagcttttaaaactttgcatatttttcatgaagtgttcataatattttacatattccgaaacagaaataagcatgagtcattattaagataaagagttctagtgttctgaatagtttttaagtttttttctagtcatttagcatacaaatgatcttttccataataatagtgtcttaaatttatgttgagactctttctaggacagtcatgcattgcctaatgacagagatacattctgagaaaggtgatgttgtcgttgtgcaaacataatagagtgtacttatataaatctctgggtggttatagcctactacacacctagactatatggtatagcctattactcctaggctataaatctgtagagcatgtcactgcactgaatactgtaggcagttgtaacacaatggtatttgtgtatctagatgtatctaaacacagaaaagatacattataaaagtattataatcttatggaatcactgttggaaatgtgtttcatcattgactgaaatgtcattatgcagtgcctgtaaagtactaattagttgaacaactctttttttttttttttttttgagtcagagtcttgttctgttgaccaagctggagtgcagtggtgccgtcttggcttactgcaacctctgcttcccaggctgaagcgattctcctgcctcagccttccaagtacctgggactacaggcaagagccaccaagcccggctaattttttgtatttttggtagagacagggtttcaccatgttggccaggctggtcccgaactccagacctcaggtgatccgcccccttcggcctcccaaactgctgggattacaggtgtgaggcacagtgcctggccttgaacaactctttaagcctcaacttccatgtctataaaatgtaaggtttggtttggatgcatgttacggttttcttatgattcaaagcctgttttggttataacatgaaaaggcatcaattttaaaatttatttgttgtcatacttttagcccatattaacatttgaaatcatagattttttttttccatttgacaagctttcaaaatgaagggaaaataaattagaatataaaagtcatggcctggcgcagtggctcacgcctgtaatcccagcactttgggaggctgaggcagcagaccacgaggtcaggagatcgagaccatcctggctaacacggtgaaaccccgtctctattaaaaatacaaaaaaaaattagccgggtgtggtggcaggcacctgtagtcccagctactcaggaggctgaggtaggagaatggtgtgaacctgggaggtggagcttgcagtgagccgagatcgggccacttctctccagcctgggggacagagcgagactccgtctcaaaaaaaaaaaaatcatagttgggcaggatgtaatagccatagcaattgatatttggtaagttttaattaacttaattaaccaaccggttggatttttaaaaacccatttttttttaacaaacagatgtgttcctctctttttgttttatttatgttttataggcgagcaattcgaactgcatttaaaaacagaaagcgggctgctattctgaccactcactatatggaggaggcagaggctgtctgtgatcgagtagctatcatggtgtctgggcagttaaggttgatgtctaaatagcgtgccattcaggggaagaggttgggggttggattttgaaagtcatcatttcaaaaacatggcaatagttagtaatttaaatgttaaatattttagtttttgagttagcttttgatagattgacttggaagtatgttgagttttttaaaaatatggctgtctactttgaatttgaattcacttaatatttcaataacttggaatattatttttaggcatagtacttgttatttcaaaaaattgttatatattggattaattatgtaacacaaatatgaaataaacatatgagtttctacttacataaataaataattgagtaaagaaatgtgtcagagaagaggtacatcttccttacagaacaattccaaataataatatatgtagataatacccacttcaagggaggaggcttaatctcctatcccccaagtttggacgggacttagccagtttcttgtaaaaaatgaacgacagaaggagaaaaatagtaactttacagttgagaaagctggcaaatactaccttaactaaacgatgttgtgcagatatcatgtattcactgatatgatatgatggaaaaagtactacagctgtgtaatattctctccaaaacccataacccaagtgtagtcatgagaaaaatatcagactaacccaaattgagggaccttctaacacacacctgaccagtacttctcaaaactgtcaaaatcatgaaaaagacagaaagagtaagaaactgtcacccacagttagagactaaggtgacgtgacagccaagaacactacggtatcctggatagaacctggaataaacaaaggacactaatagaaaattggtgaaatctaaataaagtatggagttcagtgacaaggaatgtaccaatgtcggtgtctcagttgtgaggaatttaccatggtaatataagatgataagattagggaaactgaaaccggataaagagtgtatggggatgctgtattttctttgtaatttttctctaaatataaaggtatatttttttaaaatgtagttatatgtgtgagagattattctttgaagctgtcattttatatctgagctttcttttaaaaaattacttcagatgtatcggaacagtacaacatctaaagagtaaatttggaaaaggctactttttggaaattaaattgaaggactggatagaaaacctagaagtagaccgccttcaaagagaaattcagtatattttcccaaatgcaagccgtcaggaaaggtaaaattttaaagaatgtggttatatttctttatagagcaaaggttataaaaagttattatattaaggattaagtgaaaaatcatcttttcattcatagaccatatatatatatatctctgtgtgtgaatatatatgtatattttttcatatatatgaaatatatgtatctgtagatagataatttatatatctctctctgtattatcaccaatactggactaatgaagtctgatggctggtgttttatatctgccttagtattagatttttcaatattcagtagtatttaaatttttttaacattcttagtagtaatgagagttgttttgcatgaaaatgttattattttaaacaattttcatccaactaaataccaaaataagttattgaatttaattttgaattttaaacatgttgaactttagctttagaacataatagtagtaatttttaatttttttccatattttatctttttttccagtttttcttctattttggcttataaaattcctaaggaagatgttcagtccctttcacaatctttttttaagctggaagaaggtaagtagtatcttctattttggcttataaaattcctaaggaagatgttcagtccctttcacaatctttttttaagctggaagaaggtaagtagttgaaaagcacttatgttgtagctctcaaattatgaaagaattttatttaaaaagtttaaaactggggactcggtttattttagaaactatggcagataagaagataaccttttattcatttaatctaagacacaggtaaacactaatgtcatagggattttgtagataaactctattgtaatgtaaaccttttacaatttttagagagcattgacacagtttatcacattgcatctatgagaagggtcagcttaattatcgagtctttgcagttagtccagcagcaagagctctgagtttcttgaatccttacttcatactggtccatagaagtagcaacactatcaagactccagtggcaaagagaattctgagtgtagcgaggggtgggcagtccccaaaattttaaggaagcttatagaatcttggcatttaaaaaataagtggtatgtaggataaatatatatatgctggtgacagttgagggagatcacctcctggaagaatcaggtattcatatgcagattattttatggcatttataaactgtgaaacaacctatatttatgtataaggtttattattaataattttcaaaataactacaggatttttatgattgttctttatgtgattactgaatacaaaaagatttcctgatactgtatatattcttgttgcagctatggattaatgggtttacttttgccaagaacactaattaattattttttggtctgtaatatatggcctgcatgatgttcattgtttattcatgtttattggccggcatggtggttcacacctataatctcagcactttgggaggctgaggcgggaggatcccttaagcccatggttcaagaccagcctgagcaacatagtgagactctgtttttacaaaatattttttaaaattacccgggtatagtggcatgtgcctgtagtcccagctaactcaggaggctgaggtgggaagattgtttgagcctgggaggtcgaggctgcagtgaaccatgattgtatacttgctgtgttgcccaggccactgtataccagcctgggcaacagagcaagaccttgtcttaaaaacaaaacaaaacaaaacaaaaggtttatggagataggaccaatatccagaatctagttcaagaagccagaataggctacagtggagttggagaatgggagataagagagcagggatcaaaagaagacatgaaaagaatcaccaggaaaaagataatggaggagaacttagaaaaagtgaaataagacaagtaacattcaacatacagtacttagggctatagaggaattataggtgtggggaagagaaaggaagtaagcgggaaaaataacatgttttggcagcttcaaatttaagtgggttgattacagagatattttaaaacattgttagccactttggtaggtattgccatttttttcagatattgataagtaaaatactatttttatattttaatagctaaacatgcttttgccattgaagaatatagcttttctcaagcaacattggaacaggtactataaagttaaatttttaaaaattattttatagaagaaagtatctgatatcgattgttttggtttatattagagagggagagatatcgtaaaccagtgacaaattggtacagaatgatcttaaacttggtataattttaatcaaccttaggttcttcacttactaattttttaaattttattttttaaattgatattattttaaattgacaaatcacactgtttattgggtacagtgatgttttgatacatgtgtgcaatatggaatgcttaaatcaagctaactttcatttgctgattttgaatatctgtttttttcattttgtaaagaaagtgagtcatgatggtggtgtttcacattagtgtatttgaaattacattgtttaagtagttatgaattattttttaaaaaacatatctattaatctaaaatagtattcatctttgcatgtaacttttgaaaataatctgtttgaataatgttaatgttaataaatctcttgatacttgttgatataactagatatagccttgtaccatttctgatttagttaaaagttctttgaggtacttgagatacagcatactgtattcatttatttcttttcacctaggtttttgtagaactcactaaagaacaagaggaggaagataatagttgtggaactttaaacagcacactttggtgggaacgaacacaagaagatagagtagtattttgaatttgtattgttcggtctgcttactgggacttctttctttttcacttaattttaactttggtttaaaaagttttttattggaatggtaactggagaaccaagaacgcacttgaaatttttctaagctccttaattgaaatgctgtggttgtgtgttttgcttttctttaaataaaacgtatgtataattaagtgaagctgcatgtttgtattgaagtatattgaactatatagtttgtatgtcatctttttcaccattcagaaacagtgcttctgaatttgtgatttaaaggaattgtaatagaatagttttatttttaagttatctttaagtttatgccatcttcttaaataagtacgtaatgttccaatctaaataaaaaactaattcat

SEQ ID NO: 15292 - DNA, 53212 bp, Homo sapiens
agctctgcctgcgccaggagcgcgcgggtgcgcgcggccgcgccctcgcacagatcccagctgggtcacccgcactgagtcaacagactgagcgcgtccaggcctgacagctctgcggctcgggccctgaggtgaggcgggcgtcgcgggcggcggcggcgcttgaggctagcctgggacagccgtccctgggggagttgaggggacgaggaggggctggccagcgagggacggcggggagagaaggggagttcggcgtctgaggtgtggggtgaagcgggctcggaagcgggcagaggcggcgagctgagggaaacagacctccctcagctcccgggaagcgcgggttgccagcctcggggatgcggtgggagcgcccaggatgcggacgtgagggggtcggggccctgcggcgggggctccgcgaggctcccctgggaccgggtccggccgtgggacttcgggacactgcctttgcctggacgctgtcgttccaccctcagcaacctcagggaaagaaggaaaacaaatattgatgtaaatttccgtctgaacagctgggtaatgagcgcttgctcttccctgcgaggttacgcgcggatcattaccttgcgtgttaaaaggagtttcagtgagaagaaaatgcgcagatctcatgacacagtttgggagggaaattccctgatcctaaaacacgaataggagctccaggcatggaaatacttaattggatcggaaagctgggcaggctggagctattaagctgaaggaggttttcccctgggctcctcaggcttcgatttacgttttaaataaataagtccgaaaataatgaagataataaccacgtttactttctacaagggcgttctgaaggaatctaagggaagaggagtatttgctggactacagctttaagccaggctcggtattagctcttttcattctgacagcaaccctgtaggattggagggggttattccagttgggcaggtgtggagaatgggcctcaaagaggttaagtaacttattaaggtctcagctagtaaaaggatggagttgagattccaacccgggctgccagaccctaattctggtgctttatttagtatattttgtgtttgccgggagagcaatattgtatgtgttttagggaagactccatagtagggaacattattagggcagttagggctttgtgggtatttgtgttaaaatcaaactaaagaggcgttaatctttgcatatgtgctgtttgagtatatttcctttcaaacagatttagtgtagggaaatcttacattcactataagagcaaatttattagtacattccatgtgtattgcatgtcttttatttttaaagagacagcgtctcgggctagagtgcagtggtgcgatcaaagttcactgcagccttgaacgtctggactctagggaccctgctgaatagctggggctacaggcgtgtgtcactgcgcccaggtaattttttatttgtttttcagagacgaagtcttgctatattgcccaggctggtttgttgcatgtcttttacattccagataccatactatgtgccaagagtaccgatatgaatacaatttataatctctgtccttgagtttagttgagagggtgattgcataaaagaattttatgatattgtactaagtcataacttttctagtatgtaaattagttggattaaaaatagttttaagggcaagcttttaaggacctattatgcataagaaaatttattggatgacttgtcctctgtgtaccattgcattgttattttctccctcagcaagaaacactgtgataaaatttaggttaaattatattgacaactagcatttttttttttttgagacagggtctcattctgtcacccaggatgaagtgcagtggcaggatcttggctcactgcagccttgacttcgcaggctcaagtgatcctcccacctcagcctcccaagtagctgggaccacagttgtgtgcccctacgcctggctatttttttttttttttttttggtagagacagtgtctctctatgttgcccaggttgatcttgaactcttgggctcaagccttcctcccactgggattgccacgtgagccactgcacctgactgcattttgttttattattgcaccaccttacagtaaattttaaagcaataaagaagatgagagcatttataatttatccctttttaagctaaaaggcatattttgtagtgcttttatttcattgattgagaagcaaatgatgtagctaggcaggagtttgtttcatgtgccagatatgttcctaatttctcattccaaaaatatcttagtttaaaagtgtagctaataccagattgcatttaatttcttgtgtttcagagttgtaatgaaatcagtcttcagtttaggctgaaatggcacattgttgaaatgtataacattactttgtggtggattttggaaatctcttttaattgcttcagttttctcagtaaagtaggattcaaggtcataatctgagggtgatcctacagatggaagctttggagatttggggattgggaaagtgatggactagtggaatatgtgattgctaggaaattaaacatgactcacagttgtgaaaagtacagtagaggaaagatatgagtgcacaaattagggtgtctaattttggataccagaaacttcataatccattcccaatgcctgcctttaccgtgttatctagaacatacatctgcaccccttgctccggttcactttgccttatgcctctgccatatggcaggtatccctgttcttcacaaaagtcaagcccttttgtttgggagtctagctttaccattcttttctttctgcctggaaattccattccactcctttccaggctctttctctcttatcacattatattaaattttatctctctgcaaagttagtgacagtgtctaactttattttttttgcctcataatgttggatgcataaatccttcagtaaatgttaagtgaatatgccacttttctcacttcccctcttcttcctttttacaggagttgaccaacgttttttgtaaagtgccagatagtaaatattttaggtttgcagacagtatggtctctgtctcaataactttactgttgtagcacaaaagcagtcatagataatacataaatgaatgagcatggctgtgttccaataacactgtatttatagacactgaaatttgaatttcatataatttttgcatgtcacaagatattattattatttttcaaccttttaaaaatgcagaagcagtgttcctcatgggctgtgccaaacagactgagggttggatttagcccccacctctttcatcatagtttgcacatccttgatctttaaggactctcaggaagccttgataaaggaatctgtggtaagatgatactgggtttaatatttccattggtggtggagaaacaaagataaataagactgttgtttttttcatcaaggatctcatggtcaagttcaagatgaaaatatataaataaataatggtgacagggtatagttactgcagttacagttatgtttactgggtatagaggtaaaacaaaggagtgataatcagctccatgtcaatgttaataatgacatttaggcaatatgattaaaaattgagtttatttgagcataaaacttgaggatggtcacacaggaggacacagactcctgaaggatgaggtaaatgctccaaagtggagaggtttgagggtcctttacataggcaaggcctggggatgcttaacagggttacatcatttttcgtacgaggttagtgcatagttagagcaattcaattagttataggcagtgtttctttttgggggaagggtatatttaacatttcacattaaggatgtaatggtcaaagggtcttttatcacagtcagcggtcttttatccctggcatcatctggtgtgatctaggaacaagaaaataaggaaggaatttcatgtataacaaaaggtcagtaattaagaggtcaagcttcatgacccagtctccaaagtcaaccttcagtgccgaacaacgtttagaagccccaagtagacagactatccattttctgttacatctgcttaggtggatgagaagtaacctctaacagtcatttgttggaggtagggaatgtattttcagctagcctttctggaaatcttttaaggatgctaagaaggtgaccacgtttcttatcaggatggctctaaacatcaggatgactcaacttatttattttatagggtataatcttaatttgtttctcacagaaataaacatggatatgtttttaatcaggtctctatgaaaataatttaaaaaatttaaagttattttacctgctacataataaatggattgtttattccacaggtatttagtacctcctctgctgtgcagtgagttgttttactagctgaaaatatttgaaggagataatggtatcattagataagtgatggattttgcgggggaggtgggggaagagagaggctcttctaaggaaagcactgcttttaacaaaggcagtaggtataatagtagaactaccttagattttaaaaaatactttatagctttcaaatttcttattttaattaattaaattcatgcatcctaaataatttttctctaacaattatttctaaaggttatgtacatttttattacttttagtgatgtggaatatgtttcgtaggacttggaacgtagtaaccagcacttttttttttttttttttttttttgagacggaatcttgctctgttgccaggctggattggcacagtgtcagctgactgcaactttcacctcccgggttcgagtgattctcctgcctcagcctcctgagtagctgggattacaggtgcccgccaccacacccagctaatttttgtatttttagtagagacagggtttcaccatgttggccgggatagtttctgtctcctgacctcgtgatcttcccgcctcagcctcccaaagtgctgggattacaggcgtgaaccactgtgcctggccgtagtaaccagtactttaagataaattaagaagtgaatttttgatattgaactttggattatgcaactcctggtctttaagtcaattaatacattagaaaaggaagatgggctttagtaggctttccattttcttgcaacttattggatttagtataaattattttatctagtaaattatttatctaggaaagttaaatttgattaaatctttagagatgttaggtgtttaaaactcacctaattattatttaaagccctacaacaaacttagcacatttctcaggtatgctgtggaagtatggaaaataactttttttttttagattttgaacccgtatttctctttgtgccactgttttttaacagctaagaattggctttgttaaagagtgttttaaagtatttcattggtaagattttgagttggaaccatacaaattctgctttggtcttgtattaactcagctgctagtgagtgaactcctagatattgccatttagaggcaattaaacttaaacagttaaacttgaggcaggccatgcatctttttactgcgtttttctcttattcttccaaaaaccatcacataaagctataaaattttggaattctagtatagaaagaggaaatgtatagctccatgctaaatacggggtttcttgtatcccaagaaaaggcacctgataagtcaaacccttcatagatgtcccctttttggtcatgcctcatttgtaactttgcagccctgttttcagatatatgcttctgtcaggaacaccgctttcatgtcacctctgctgtgtggatctccacctttctttctggaaacctcattctttcatccacaagagttgttcccatctcaagatattaaccctttagttttgggtgttcgtcaatatagaaaagtactgccttcccacattcttccttcatcccagttttcccaccctaactccctgttaggctagtcagtattgtcctttgggattccagaccctgcaaaacagtggaggatgtggtgaagagaggggcctttgtgattaccatatcagtgagagttgtaatcacccctttttttattctatcttgtttctctgtcttctccccaaaggacaggtataatctctcgaccaattgtcgagagacaatgtggtctcgacacctgaaaaggaagccaaatattttccccagcacctcatcatttgcaaagaatttatagggtagagttagtgtttacattattatgcagaccagtccttgcttatttattcgccatatcccttttcaaattgggcctgcttagacactgtggactggcaggttggaggatgcagcaggcaaagaggagggtgaataggtacgttgttgggttagtttacaaagacctgactatagctttgaagtttctgttttagatcaacgttaaagtttaaaggtttatgaagaattaatgttaagaatgtttcattcttttcaatcaaacagctaaaccatgtatttcatactatgaagaaaaccagtgatcagatgggcttaagagattttttttttgtttcaataacttgaattgaagctcaagattattgaaagttaatattttcatatgattagactaaagcttttgagtataagaaaaatcagattgttgaggtcattcataatactgagtcattggtataatttgatgacagagttaatactttcatcatttttttctctctgtccttttgcaattcattctgtagggtttctttgactcacgcttcaatttagctcactaattcgtctttaaatgaagttcaccccatcttttagtgcttttttatttctatcagttttttatttcatttctaagttctgtaattgcttttttcttaattatctttctcttgttccaagaatatgatattctctattactcttttaaggatattagttatacttttatacacaatcgtgatcaatgtgtataattagttgccatgtacaagccaccattttcagcttttcatgtattaattcttttagtcattttaacaacccaaagaggtaggtactactattgttgtattttacagataataaaacttaggcgcaaaaacattaaataacttgcccaaggtcttgaagttagtatgtagcagaggcaggattcatgtttagttggtttggcttcagaggtcatactcttaacctatactactttgggcattattagttcttatgtttgttaattttggtgcctttgtaatattggttaagatgcttttttgcaagaaatagaatctgatactggttagcttaagtgaaaatgaaaatatattgggaagataataggacatttcacatactccaaggaagaaaaatcgagttgtgagcacagtaggtgtggtacattagaagaaagcttagagtaagaatgtgtaaactttctttcttaaatgttgccattcatgtaattcagtttccttgacttccatccagtctgtgggtctcttagttaattctgccaagagaaattttaactgacacagctcaagagtagtggtggtggtggtgatggtttgtgtgcgttgggatggtgtttggggagttggtttagttttgctttaaaaagctgtgatgagaggtggagtgggtgggcaggttttttagacaaggcccttagagactcaaccttgagttcaggaagcagttctcaaaaaaacaaaaaattctgtgaatccatctactctatgagtctgttatataaaaatgaagagttaagcatccaacattcaaagtggattaataatttagtagcattcacaaaatcaatgtgttttggcaagtaacttgagaatgttcatgctgcattaggttagtgtttctatgtttgtattgtagcaaataatgcttgaatgagtacagctttcttccttccttccctcctattatcaactctttgctaaatgtgatataacatagttgagactgttagaagaatttatttattgaccattacagaagtttatttaacagagtctaatatgaaaatatacatgacttaatttttacatcatagtaaaacaggcccttttgagagggagacatgggtttttctgctgaacagccattatttatacttgttccaaggcttctaacatgatgatgccattacatcgcattaccaccattccaatattgttctgttgcccactagttgccatctccacacattaatctatcacaagattcataaagggatcaaatccccacaatattccttggacatgtctgccaccatttaattttcaatgataactttttgtccatcaattttttcaactcgggagtgtaagctttgctcatggtgtctactccacaggttcacagatgccttggaatggaatgctggaagaatttattttaatgtatcttctattcttgactgcttttgttttgctgtttttaatttactcatttagtatttttacagtatgtctaattgtttaattgctttttttttactatgtaagtaatacatagaaaaaaagcatgaagaaaataaaagttgtctttaattccattgctaatttaaacagttctttccagtcttccttctgtgcatataaagaagatgctcatttaagccaaactttaattatatatatttactggaaaagacaaactgcctctcaaaaattatggaccaggcacggtggctcactcctgtaatcccagcactttgggaggcaaaggcagatggatcacctgaggtcagaagtttgagaccagtctgaccaacatggtgaaatcccatctctactaaaaatacaaaaattagctgagcatggtggcaggcgcctgtaatcccagttacttgggaggctgaggttggagaattgcttgaacccaggagccgagactgtgccattgcactccagcctggacaaaagagtgagactccatctcaaaaaaaaaaaaaaattgtgagttttctttatttaggtgtagacagtcttccagcttgcaacagatggtccttgttttggaggagagttatagcagtggcctcactagataggtttatttaaaacaagggcacagcaatttctctggaaggtttaacaggatttttttgttgttgttgttatttcccctgctatcttctcaatacttcttagtatgcagagatcctaggttactgggttgagtgtatttgaataggggcagtggacattgcagttgagactctgaccacttctattttgagttcagctggaatgaaacctctgaagaatcgagatagctccaatagaggtccacaggcagaaaggatttcaaggatcttcaaagggtaaatgtaccctggaagagggatactggacctgtgataggtacaatgatttagatcattcaatgttattttttgaagtaatttattaaggtaaaatttatttccaaggtaaaactccttaccttgtaagcagtttctcctcattctttactctccctggcctctgacaatcaccagttggcattctgtccctacatttatcttttctggaagtttcctataaagggaatcatataacatttgacatttttagtctgactttcacttgacataacgttttgtatgttcattttaattgtagcatatagcagtacttcattcctttttttttttttttttttttttgagacagagtcttgctctgatgcccaggctggaatgcagtggtgcaatctcagctcactgcaacctctgcctcccagatttaagcaattctgcctcggcttcctgagtagctggagttacaggaacgtaccaccatgcccagctaatttttgtatatttttttttagtagagacggggttttgccatgttggccaagctggtctcaaacccctgacctcaagtgatccacccgccttggcttcccaaagtgctgggaatacaggcatgagccactgcacctagccacttcattcctttctatggctgaataataattgtatgtatatgccacagtttgttcatttatctgtcggtaagtatttgggctgtttctacctttctgctattctgaatagcactactgtgaacgtgtgtgaacatgtactcaattgagtccttatgttcatttcttttgggtgtatacctaggagtggaattgtgaggtcatatagtaaaactgtttttctcagcatctgaaccatttgctttcccgccagtaatgtattccactttctccgcagtttcttatgagaagtctgctctcattcaaattgttactctctgtaggtaatacatcattgttctctgactgctttcaagattttttgttgtcttaattttcagcagtctaattataatgtgtataggcatggattttctttatgttttctgggcttcaccaactttcttgaaacttatgtgtttatatcccttgctaaattggaagttttcagccattaagtctttaattttttttttttttttttagcattaatactctttctcctctccttttataaatctgataatatgaaagttagactttttgttattgtcctatagttttcttttttcttctttttttttttctttgagacagggcctcactttgtcacccaggttggggtgcagtggaacaatctgggctcactgcaacctcctcctactgggttcaagcgattcttttgcctccccagtagctgggattacaggcgcccaccaccacacctggctaatttttgtatttttagtagagatggggttttaccatgttggccaggctggtcttgaactcctgacctcaggtgatctgtctgccttggcctcccaaagtgttgggattatgggcgtaagccagtgtgcccagactgtctcacagttttctgaagcactgttaattttttaaaaatcttttttctctctgttgttcagattggataatgcctattgataatcttcaagtttcctgactttttttctgttgtgttcattctgattttgagccactccatgagttttatttattattgtgtttttctgttctaaagtttccatttgtatttatttcttattgtgtttttgtgttctaaaatttccatttgattctgcttaatgtcttgtttctttgctaagattttctatttttcattgctttcaagagtactttcgattgtttgctgaagcccttaaatagctgctttaaaagttttatcagataatttcaaagtctgtgttatttcagcattggtatctttgattttattttcttagtagagttgctatttttttttttttttgaggcggatccttgctctgtcacccaggctggtgtgaagcggtgcaatcttggctcactgcaacctccgcctcccgggttcaagcagatctcctgcctcagcctcctgagtagctgggattacaggtgtgtgccaccacacccagctaatttttatatttttagtagagacagggtttcaccatgttggtcaggctggtctcaaactcctgacttcgtgatctgcccaccttggcctcccaaagtgctgggattacaggcgtgagccaccgcacccggtcagctattttctacatgcttcatttgcagtgtaatattggattgtatgagactttgggttttgtgttaatacctacagaaaatgttgatattttctcttagcaggctgtcaaccaggttaggttcaggtcataagtttctacccacattctttgaactgtagttgtcattttagtttatttttcaaaaacttttgcagtacctttttggtctgtcttgtgtgtgccttgcagtgaacagtctggatttggacagtggtctgtctgttagttcagtttctcaagcctttgtcacactaataggattggatttatgtatgtccagcttgggaattattacaggaattaaaaacaactttttagagtgctttcctgagctctctttctatttgttcccccttctactttttgcttccctgtggctgctgtttctatcctccagccagagagctagtgtttattttctccattgtgttacacacttgtgcagctgcaaccaccatatccagggcccaatggtaggaggtagagaagaaaagcaaaagggattggcctcatcctcttacaacgatagttccattgaatagagagaaaggttttcctgcctcagagtgttggctgcactaggcttttgttactgtagtctggccctgttaccatgggattgcttgcatgtggggatacaggagaattcagaaaagaaaaaaagatttgctatttctacattctccctgagcattaagacttcccttgcccattcctcaattcaaagctaaggcttcttctggagctgcctctgtgggcggttcgggagataccaaaggagaaaaagtaccactgttgatatggtggtatttcaaattctggtctaccctatttcacatgccttgtttacttttcagagctgacagattgctgctccatgcattctgtccagtttcctaagagagacagcttggagtatgcttaatccatcttacctgggactgaaacagctgcttattttgccgttaaaaattacatgcagtttactgcgtggctccgggtttgtttgtttgtttttcctctttaataggtttattcagaaaacatgtccactgcaattagggaggtaggagtttggagacagaccagaacacttctactgaagaattacttaattaaatgcagaaccaaaaagagtagtgttcaggtaagttaaataactctttcttatgcttttttgcagtttattttgcttgatatattctatcttgaagtgatgatttattttgctaaatatatttttattataattttatttttctttgcttgtaaagtaaaagcttgccatgttagccacagaaaaataactgaattacttaatgctttctaaatgttaaaaattttaataataatttctacatttagttaatttctaacatctgtgcttcattttcagcttttaggcatgtgtttcctaagtttcatgaactaacattccacaataactttgattccagagttttatatcccacaacctcgtattttatggactctagattgagttgcccatgagtattaatattatgacacagatttgtacccacagcatacattacttttgataagggtaaaagaaaggaagaacttgggtaaccagctagtaataatttcaaaggatgaaaacatattattcatcttccctgaaactggtaaaacaattaaacagcaagatgatataatagctcatttctactaaaactgaccgtagaatttaattcagtatggttttggtagtatacatttaggtataattaaagtatgatttctaattcagaattgaataaaggcatttttatggtgaatccatatagggatgttcggtaaattgctttagataaaattatatgagtaaatttattatgttttatgtcaataatctaagatgtttaaatattatcttttatgtcaccttaatttattttgtgacttgaattttaaaatatttcagtaaaactaaatacaaaggaaaaaataatatgcatgttgggttggatgaggtgttcaacacaaaattcttttgggatagaattgcttttattttattcataagaaaggacaaccaaatttcctgttttttcttagtattatattatttgccaagaaatcttgatgatttttgctgccattgttatactttgtaattactttgtttcttttattgtaggaaattctttttccactattttttttattttggttaatattaattagcatgatgcatccaaataagaaatatgaagaagtgcctaatatagaactcaatcctatggacaagtttactctttctaatctaattcttggatatactccagtgactaatattacaagcagcatcatgcagaaagtgtctactgatcatctacctgatggtattgtgagcttatatatatattctgtttataatattaagccttttcaatatttatcagcttgctttattgaatgaatagcagtcttaacacttagagatgtgttcctccaccaaagtcagttttataaaaatactaaaattatttaattctgttgccttatttttcttgtgaaacattaatttatattcttggtggtaggaagcatattttatgtacttttatatttaattcttagaccatttataaaatagtttaagtatacttgtataagatacaagctttgatgggctatttcattttgattctgactttcatataattatgaagctagcaatgtttagctgaatgtggtagcatgtgcctgtagtcccagctactcaagaagttgaggtggggggatcccgtgagcccaaaagtttggggctgcagtgaactatgatcatgccacttcattccagcactccttactctgggcaacagaatgggacccccatctataacaataaaaaatttaaaaaggaagctagaaatatgtgataaagactgtaaagcagtcaccttttcagcttaccatgcttgtttatagaagtgtatggtgtaaactgaagaagtacctaactttggagactacaactatgactatggctaagtccctaactctgttttatttatttatatatatattttttgtagagatgggatcttgctatgttgcccaggttggtctaaactcctgggatcaaatgatcttcctcccttggcctccacctaaagtgccacctaagtcttttttctcaatgtgcacttctcacaaagaaatgaactagaaaacagtgtaagcagtgaagtgccactgaacttaaagtggctgtgagagaacctaaagcaaaagctggagaaagtgacagaaattcttatgctattaatgattaaacaaggaagtgctaaattgtagaaaatgacagattagcatgttattttttgccatatgggatagttgtaattagcttatatgtcatcgcattattggattttatgtcattgaatggaaagtgttaattatacagtcagaagccaggtaacttttattccattggtttctttctctggctatttctatttaatattttgattaaatacacttcttgttatatggtagtgtatcatattaggtacaagtagtatagattaccatgagaatttagtgtacaagctcaaaaagctgattaaaaatgttgaaatgaaattcattggtaattctgagtaggaggaaagaatataaaccaaagaaatatgaggccaggcatggtgactcacgcctgtaatcccagcactttgggaggccgaggtgagcagatcacctgaggtcaggggtttgagaccagactggccaacatggtgaaaccctgtctctactaaaaatacaaaaaaattatccagccatggtggtgggtgcctgtagtcccagctacttgggaggttgaggcaggagaattgcttgaacccgggaggcggaggttgcagtgagctgagattgtaccactgcactcaagcctggcgacagagcaacactcaatatctcaaaaacaaaaaacaaaacaaaaaaagaacaaacaaacaaaaaacaactaagtcagtgtgtattagatgccaaaatagtgtatacatatacacaaatttttttagacttctgtatttttaacaacagaactatctgaaaatgggttatgcatacatacataacatgactggtaggatgttgaactaacaccctctttattcatgtaaatcctggagttccctgtccctcttaaaaggcctggaaaatctattaattaacatttaagtaatactttagaatctatgaagcattttttttttgtctttttcttcttttgtttgagatgggatctcactgtcaagctggtttgcagtgctgtgatctcagctcactgcagcctctgcctcctgggctcaagtgatactcccgcttcagcctcctgagtagctgggactacaggtgcacaccaccacacctggctaatttttgtattttttgtagagacagggtttcgccatgctacctaggctggtctcaagcaatctactcctggactcaagcaatctacctgcctccaccttccaaagtgctggcattataggtgtgaggcaccacatccagcctacaaagcgttttgatgtttgttacttcacttgttcttcacaacaacccagtgtcatcagctaggcattgtagatgaggacactaaagtctgaagagttcaaatcgcctgtctgtgctcacacagttaatacatgaagacgttaagtactaattctatattctttccatttcaccacatgtttgaagcttctgtagtgaaaattagttgcttgtaaacaaaactacaagaaaatatttaaaaattagtcttatctgatgagaaagaatgattacagtattttttccacttatcttctaagaaaggaacaagcaatattggatttgaatgacaatttttatttaaggaggagttgtgtcatagttactaaaatgcctatttagtttctgagaaggattgtggaattttctttataagaaatatttaaaaataaaaaattcatatatttactaaaaagttatttttgtgcaggtgcactggctcatgcctgtaatcccaactagtccggaggctcaggtgggaggatcacttgaggccaggagttcaagaccagcttgggtaatgtagtgacacctcatttctaccaaaattaaaaacaaaaaattagccaggcatggtgatgagtgactatcgaccaagctctactccagaagctgaggtgggaggatctcttgacccctgaagtttgagtgcaagatccagtgcactgcaggctgggtaacagaacaaagccctgtctctaaaaaaatataaaataaaataacgaagttattttttagtttaacttcgagatagataaatgaactgcattactaataatttttataattttattgctgcctgaaattagtataattaattgaggttttgagaaacagcaatttcttgaagaaatatgagttctgcatattgttttatactatatttcatatatttataacataagtataacactgacacatttctgtaatcaaatgacagctgagtagtgtctgcaacattgtaccattttattattattattttgttggaagaattgtcttctttttgtttgtttgttttttttgagacatggtctcactctgttgcctaagctggagtgcagttgctcagttatggctcactgcagcctcgacctcctagctcaaatgatcctcccacctccgcctcccaagtagctggaagtgcaggcacacatcactacacctggctaatttttttattttttggagacagaacctcaccatgttgcccaggttggacttgaacttctgagctcaagcaatcctcccatcttggtcttccaaaatgttgggattacaggtgtgagccactgtgcttggactgttttcattttttaagaagtaaatatagcaaaagtgtttataaaatattccattcatcaaaataattgtaaacttgatctactgtattgtggtattttaatttgtgagctaactatattgttatgatatcttacagtcataattactgaagaatatacaaatgaaaaagaaatgttaacatccagtctctctaagccgagcaactttgtaggtgtggttttcaaagactccatgtcctatgaacttcgtttttttcctgatatgattccagtatcttctatttatatggattcaagaggtaaatagccctacataatcattgaagatcaattaaatgcatatctttgctgcttgcagttcatagtcaaaattttatatagttcaatattggcattttcaactattcttacttgttccaataggaaaactgagaagtatagcataaaaatatttatttataaatacctatctacttctacacataaaacatttttatatatacccattttgatttaatacatttatatatattaaatacagtagcataaagcaaaattgcattttgggttatatgactttctaaatctctttttttcatgtaattgtttttacttgtggtatgtacaaatctttaaaatcttgaggtcttctactagtgaacttgattagttttatatttgaaacatgggaaacaacctttggttgtttaaatctatgaagaaatattatcaaccacaaacatttattgagcaatgttaaagtcactatgctaaatactgaatttgtgactttatttcaaaaagcccttctgaaaattcttttttcctgtttgcttaactttgacttttccttgcttctggaagtgctttagagctaagtcatgtagaatgatttactttaaaacaaaaaagtaacttgttttaaataactacaattaatttctttctttacatttttattcatttactatttagtattctaacacatataacttttatttcaaaatttcaagtaaatgatcagaaatcttgtaagtattgtttacctttgaaagtcagtagcttatttctttggtcctgtaaagattgattgattatattgttttggtaggtatctctccatataatatctttaaaacgatgcacttgcatgttgtacagaatcttagatctcatattcttccccccatagctggctgttcaaaatcatgtgaggctgctcagtactggtcctcaggtttcacagttttacaagcatccatagatgctgccattatacaggtaaatatgataaaggaagaaatacaaaaactatgccattttaaaataaatatttccttattctttacaatagtatttggtttgactactgtcaaatgtacaaaatatgtaacctactacaactcctttgagaaaaaagataaaaaagtcatattttctgatttggtactttttgttgtgtttcatattttagcagaaaaactggccatgaaatttatttttaaaaatcttacttttgtgtctgggctagataacagtagatgaagttaccttagaattcaaactattcaaattaaccatatttcattcttccatgttctgtatggatctgtggcttttttttccatttgccctttctaattgaatttactatgctacaaaatttactatgctacaaaatattgtaatttcaaaatgtatatcaaccatcttgtctgctaaacaatacgtttaaagtatgtatgaataatgatggagctggaatcaaaatctgaacaggagtcttgtctctgttgttacactgctatgtagtaaaatgactattataatagtactttacttgacagcattgtcgtaagaaccaaatgagatgatttatgtataattgtcttgtaaacttttgtagtacagtataaacatattagggacgtgtaatattgcacaaattcaataatacagaaatttaaggtaaagatagtgaaatacggatctattacattgatgatgttgtatcacctatttgtattttggccaaagtttttagccatccacagcacagaccacactggatgaataggcaggatagatttcaatttaggcattaattggaatgttagaagtattatgtggcataaatagttttattatttggtctatatgtgctaaatatatagactttaaagcagtagaagggcatggtatttagaagaacattttttaaacaatcataggaatgatggcactaataatcactcctaaattcctaaattttgaagatgtatatttttactaagatacatataattgtctgcttaagatgataattgtgcaattttattttatttgacaaattatttaatcaaaatttatacacttactgactttaaactttaaactttatggtatacttttagaataaattgaatgcaatattctactcagaattatgatattggggtcactcactttatttcaggtatggagctttttgaggattgtatttgtactaggttactgaccaaatttagggatatagctgtcccgttttactaggggctgctatcataactaaattaatttgatgtatttacattttctaattatagttgaagaccaatgtttctctttggaaggagctggagtcaactaaagctgttattatgggagaaactgctgttgtagaaatagatacctttccccgaggagtaattttaatatacctagttatagcattttcaccttttggatactttttggcaattcatatcgtagcagaaaaagaaaaaaaaataaaagaatttttaaagataatgggacttcatgatactgccttttggtatgttattaaaaatttattacttaatataattaaaaattgtattaaatatacagattttcaaaattgtaattttgatatttacctaacttgatgatgtgcttatcctgttttcttacaatgattgccttagtcttggaatttgagattagtcaagaagtttcaacaactaattggcttcatttaacataagggatgaagaatgtcaaagcttgtgttgacaatacgtgtttaaattttatttcacattttatttgaatcatgggcacactccgtgtatatttcagtgtatttcaatatactccacgtatatttctgtgtatttcagagttcaggaaatgtgaaatcttggaacattagaaattaattgcttgttacagttcttccataatatagcatatatataatattaaaaatttagttatagtgattaaagtctgtatatgtggtatatggactttttttccctcgaaagttttagttatttgggtgaattaagatgaatatggaaataattttagagaaagaaatgagaaaaccatgttttcactagtgacctttaatgtatcagcatttttgtacagtgataattttacaaaggcatgcatttttataaatctaagtgtagtttccttactcttttcactatgtaatgaagttcattctggggggaaggttaatactgtgcatgtgagctgttatagtctgttttacaaaattttattccaattagcccaatgtaacaattaatcattaacactttacataatggaattattgtatataacatatttcctttgcttgtttttctttcatttgttattttagaaattattggttttggattattttttgagacagggtcttgctctgtcacctaggctggagtatagtggcatgatcatgggtcactgtggcctcaaactcccaggctcaagagattctcccatctcagtctctcaagtagttgggactacaggtgcatgctgtcatgcccaactaattttcaatttttttgtagggacgggggtctcgccatgttgtgcaggctggtctcaaagtcttggcctcaagtgatcctctcatcttggcctcccaaagtgctgggattacaggcatgagccactgtgcctggccaaaggattggtttttaaaatttattgggttattaaagtattttatggagaaccggtagctggaagaatttaggcaaatcattctctcagggtctcagttttgcctcagtaaaatgatggattcaattttgataatttcgctacctttttagccttaactcagtgatttcatgacatcattaaatcctgagctaacttggaaaaatatgtaaaataaaacttaatactgcagcaattccattgagctctgatttgtaaagaagtcttgagcaaaaatagtgaattcattactgatcttgttgatttcacattgtgtaattgtagtaattatgtcattgattagtgaggtaaggtagcctttattgtttatagttacagaagccatcagaggtttaattgtagcacatgccataaagaaaattgttatcttgactcattaaactcctacattttaagaaaatcagagacattgtgtgctattgaacttttgagaatattagatttaaattaattatgaattactattcattttgaaagcttttttaactctggaagatagtattttttatcagattacacttttacctatcacttaaccaatactatttttaattacttacaagactattaatttttagtacataagcatacacagaaatgaacagtgacttaattttaagaataaaatggctaaaatctaaaaattttgtttaaaatgattttttaactggttaagcctatgcatttgaccataactatatctgtattctcattttaggctttcctgggttcttctatatacaagtttaatttttcttatgtcccttcttatggcagtcattgcgacagcttctttgttatttcctcaaagtagcagcattgtgatatttctgctttttttcctttatggattatcatctgtaagtattttaacttgtgataggaataaagaactgtcaaaatgtttgataacatagcaaagtctttttcttcagtttacttatagtcaatttgccatgaaagacagattttactaattgataagtgacttaataaataaatgatgtggcatcactgtattcctgtatttttagtaatgttacaaaatagttttagatttagatttagcttttgtcatatgatgtatttcacatacaactcctctatctgttgtctttatataatgatgtatataattaagactgtcaagtattggactatttttgtttgtcttcatggaatccttactctttcaagttaatttatgctccaggatgatgatttttaaagatacatctttgcaaatgtaactctttagcagtcttgatattcatttgatatattggctgaatgagaggttttaatgaccagcctttgttttaagtggttccatcttccattctgattggtttatgtgcccaccctgtatcagttgttaaatgttttggctatcatttctgctctttaaaataataaattgcaaataactaacatacttccatatgtaattgcctggtttttttttaaatgtttaattttacttttttgagacagggtcttgctctgtggcccaggctggagtgcagtggcacactcatggctcactgcagccttgacctcccaggctcaatccttcaacctcagcctcctgagtagctgggactacaggtgtgtgccatcacaccttgctaatttttgtgtgtgtgtatgtatatatgtatatatatatatacatatatatatgtatgtatatatatatatacatatatatatatgtatgtatatatatatatatatatatatttttttttttttttttttttttttttagagtcgaggtcttcctaagtgtccaagtttggtcttgaactcctgggctcaagtgatccacttgccttggcctcccaaagtgctgggattacatgagcgagccactgcagcaggccttctggttttttttttctttttaaactgttttttttatcttatgaataaattaagtttaaaatatgggtcttgtacttaaaatttttgttgatttattattttttcacatattttatgcatcttactgcagaaacacatggctatttatggtttctgtaatgtagaggtggtcatgtttacctatgatacagataaaaatacagtatttaatatttgttagtttaagaccagatgtggtggctcacacccgtaatcccagcactttgggaggcaaggcaagaagattgcttgaggcaaggagtttgagaccagcctgggcaacatggtgaaaccctgtctctacaaaaaaaatactaaaatgctggacgtggtgccccacgcctgtaatcccagctacacgggaggctgaggtgggaggatcacctgaacccaggaggtggaggttgcagtgagccaagatggcaccactgcacttcagctagggtgacagaacaagaccctgtctcaaaaacaaaatcaaaacaaaaacacaaaaatatttgttagtttaaatttttaaaaggtatatcactatttgtttgaaaataaaataccatagcatttagaaattatagttgtatttttatgaatgcatttttcatgaaaatagcttgttctttcagaagcaaactttaattttgttttcatactggtatatatgaacattgcactaaccttaatatttgtattttataggtattttttgctttaatgctgacacctctttttaaaaaatcaaaacatgtgggaatagttgaattttttgttactgtggcttttggatttattggccttatgataatcctcatagaaagttttcccaaatcgttagtgtggcttttcagtcctttctgtcactgtacttttgtgattggtattgcacaggtaggtaatatattaatcttgcattcactaaatattttctttctgttttatgtagcttcttatactaccatgaatactacctttgatttaccaaaaaaattattttaaaattttagcatgaggaagaaatgatttctagagtatattttatatctagttttatttatgtttgtccaattttaagtttttagttaaatgttctgtttataaattttttactttttacttcagtgtatctcagtgatttatttcactgcagaaactcagtttgatagtaatgtgtttaaatgtcaagtaattcttattgcctatggcctggttatattgctatcatttgtacatttatctcagaagaatgcatgggagaaaattgtgtgtggagcagaacaaatttaccgtgagtgtagtggtggaataagtaggcctggtggattttgttggcccaggcttcatggaattgtcattcaaaataacattcagacttacaaatattatttttattagtccttacaggagtagttaggttctaaatggaagaagtcttataagaaatggctttgtagtggaacatgaatttggctaatgtacaaagaaaaaaatgtaattactaaatataagaaattactcatgttggttggatagaagttctgatttatgagatataattaaatattgagttaatcattttacttttttgagacctgagaatgattgttatacattttgagagttcattgagtccccgagtccgcgttctctaggaacgaagaattatagattcataggtttttgttgtgagtgggatggcctttcagtgtcattgaatttatcttcttcattttataaatgagaggactgaagcctagaatagtataattaaagcgtattcacttaatggcagggctaggacctaaatgaggcttcaacctccagtacatttctctttccatgctatcacaaatatctactatgaatactttaataattgtgttaattaatcaaaatacttgcttttctctattggaaagatgctaacctaattttattccctaatacttaatttgtttggctttcatatggatcataacccttttgtttgcatttgttattattaatattgcagtttgtttttatttcatttgttagtaattacattggaattaaatgcccctagagtgaatatatcccagttaaagaagcacaacattaaaaacatgattgaaaggaattggtttgataaacttacatttttgtaaagtctttattgttttccttataaatttatattattaatttggtcaagtgtttaatctattaaaaggcccagttggttactatcactctggatatgctaaataactcttaagtagtgttagcttttgcttgtttttgtcatttttatgtaataaagttagtgtttgtatttttcaggtcatgcatttagaagattttaatgaaggtgcttcattttcaaatttgactgcaggcccatatcctctaattattacaattatcatgctcacacttaatagtatattctatgtcctcttggctgtctatcttgatcaagtcattccaggtatgcagatggtttttgaattttactttaaagatttttaggcttttttgcccacatagggtcagcttaattttaagattttttttcctaaccagggtaccctaagtcatattcattgttaaagcttttaatttgactttaaataagtatattttgtaccttaggctatagccactagtgaacataaagagatcgtgtaaaaagagagcagttttgaaagccttaagtctctagttgatcttaccttggtccttctttatatcagtcttttttaattgaagtattttattttaccctctaaggtctaaaactatgaagtgatcttgtaactcctaccattttctttatctcctgtccacatctatagccaatatagcaaactcctgtagattcaatagtaatattaagtattgagcatatttccttttccacttgtattcctcattacctgtgtctgtattctacacctgtactgtcctgtatggtaactactagccatgtgtggcttttaaaatttaaattgattacaattaaatcaattaacaatttatttttttcagtagcacaggccacattccaagtgctcagtagccatatatggctgttagttactaaattgcatggtgcaatctagatgttctgtagaacattttgaccattataaaagttgtattgtgtaatactagtctagactagaggttcccaacccccaggacacagatcttactagctgcctgtgaggaactgggctgcacagtaggaggcatgtgagtgaagcttcatctgtattcacagctgctcctcattgcttgcattaccacctgagctccacctcctgtcagatcagtggcagcattcaattctcataggagtatgaaccctattgcgaaccgcgcatgtgaaggatctaggttgcatgcttcttatgagaatctaatgcctgatgatctgtcactgtctcccatcacccccagatgggaccgcctagttgcagaaaaacaagctcagggctcccactgattctaccttatagtgagttgtataattgtttcattatatattacaatgtaataataatagaaataaaattcacaataaatgtaatgcatttgaatcatcctgaaactatccttgctccctgtctgtggaaaaattttctatcacaaaaccagtccctggtgccaaaaaggctggggaccactagtctagaccattgcagtatctctcatctagttacatacctcaagtctgtctgagcacttcacccctttttttgaggttttattattttttaatagatttttggggaacaggtggtgtttggttacatgaataagtcctttagtgttaatttctgagatattggtgcacctgtcaccctagcaatgtacactgtacccagtgtgtattcttttatccctcacccccctcccaccttttccctgagcccccataatccattgtatcgttcttatgtctttgtgtcctcatagcttagctcccacttatgagtgagaacatacaatatttggttttctattcctgagttactttacttagaataatggtctccatttccatccaggttgctgcaaatggcattattttgttcctttttatggatgagtaggattcctttgtgtgtgtgtgtgtgtgtgtgtgtgtgtatgtgtgtgtgtgtgtatcacattttctttatccagttgttgggatgggcatttaggttggttccatatttttgtaattgtgaattaattatactgttatcaacatgtgtggggaagtatatttttcacataatgacttcttttcctctgggtagatgcccaggagtgggattgctggatcaatcggtagacttaccttagttctttaaggaatctccacactgctttccatagtggctttactagtttacattcccaccaacagtggaaaagtgttcccttttcaccacatccatgccaacatctattattttttgatgtttcgataatggccattctcgtaggagtaaggtggtatcacattgtggttttgatctgaatttccctgatcattagtgatgttgagcattttttcatgtttcttggccatttgtatatcttattagagttatctattcatgttcttagcgtactttttgatgggattgttcgttttgttcttgctgatttgagtgactcatagattctagatgttagtcctttgtcaacatatatatatagtgaagaccttctcccactctgtgggttatctgtcaactgctgattatttcttttgctatggagaagctttttggtttaattaagtcctatctatctttgtttttgttgcatttgcttttggcttcttggtcatgaagtctttgccttttttctgatgttatcgtctcaaatttttatggtttcaggtcttagatttaagtcttttatctatcttgagttgatttttgtatagggtgagagatgaggatccagtttcattcttctacgtgtggcttgccaattatcccagcaccatttgttaaatagggtgtcctttccctacatttatgtttttgtttgcttgctgttggagcagtaacagttcccagaggaatgccaagtactgataaaatcaattggaatcctctgtacttggcatcagatccctttgaaatgtggccaatctaaaagaagagtagatatttgaaaaaaatgaggagtgtaggtattttgagagggaaaagggagaaaatggaacatgttgtctgggcagttaccactgtatgccctttctttccttctttccttccttccttccttccttccttccttcctctctctctctttctttctctttcccctccctcccttccttccttccttccttccttccttccttccttccttccttccttccttcctacctaccttccttccttccgacagggttttgctgtgtcttttttgagacagggttttgctgtgtcttccaagctggagtgcagtggcacgatcacagctcactgcaggctcagcctcctgggctcaagtgatccccttgcctcagcctcccaggtagctgggactacaggcatgcaccaccgcatctgactaattttttgtattttttgcagagacaaggttttgccatattgcccaggctggtctcaaactcctgggctcaagcaatatgccagcctctgccttccaaagtgttgggattataggtgagagccaccatgcctggcctcattgtataccatttctaagtctcatatttctatcctgttgttttgttgctctccataattctgtagtcttttccatgaagcatatccacttttctagttactacctattttcaaagatcatttaagatggtgcccattcaagtcttcaacacattcagcctgtgttgtgttcttgccatttgctatctacttgtactcataaaggcattagttcctttagcatagaagatgtgctttattcacctttacctcccactcagcaattctgaaactatttatggactagaattatttatcaataaaactttgattcatacaatattgatttaatacaatacagctaatctttatttacttattacttttcaatgacaaatgaaaattgtatatatttattgtgtacaacatgatgtttggaaatatatatatgttgcggaatggtacctaaactttagatgcaggttgtcatatgtttgaaatgctgtctttatgatttaaaaactaattatggtaactcagttttttaatgtttatttttcaggggaatttggcttacggagatcatctttatattttctgaagccttcatattggtcaaagagcaaaagaaattatgaggagttatcagagggcaatgttaatggaaatattagttttagtgaaattattgagccagtttcttcagaatttgtaggaaaagaagccataaggtatggttcaatctttggcaatttaggtataagaactgctgatgaaacatttaaatcctattctttaaatatgtatgtaaatatggtatattagatttggtacatatgccatgattttaaaacattaataagggctacttttctctttttcttattttctttgcaaccatttagaataaagttggtgctaggtttgaaattttatgtttctttctttctgttttttgagacagaatctcgctctgtcgcccagcctggagcacagtggcacaatctcggctcactgtaacctccacctcccagattcaaacaattcttgtgcctcaacctctcaagtagttgagtctacaggcatgcgccaccatgcctggctaatttttgtatttttagtagagacagggtttcaccatgttggccagactggtctcgaattcgtagcctcaggtgatccacctgcctcggcctcccaaagtgctgggattacaggcgtaagccaccacacctgtcccctgaaattttatgtttggatggaaaattttaaaagtaataaaacctgatgtttatacaattaatgtttaaagcttttcccattatgtagactgaaacatgataaatattaactatataattttgttcatgctacattgttttatacagcatattaaattgtcatctgttaatttcatagatttttagggtttgaggcataattagaacatttcattactttaatttttaagaaccaaagaaattcattacgattccttgttaggtcagtcagtaccaaatttagaaataaaattaggtgaaagaaaagaaataaaataaaatgaaataaaaaagtgaagcataatattttttaaatttaagaaaaatgtaaaaattccagagaaagtcaaaatacttaagatgtaattcattggccagtggcctgctttcttaacggtaaattttaactgattaacaaatcatttccttaaaaaaatatgaaaaaaataaggtagaataagaaaatcacttcacatttgttaatggtttgaaatttgtgctgacatgaaatgacatctggtttatatcccccttcactgatgtaacaagtgtttgataatcagaaatgaaaaaaaatccataaattgcttaaatcagattcttcacttagttttagaagttgggttggcatgaaaaatgaatcaatgacgcttacaatggaaaggaatactatgcttttctcttgtaccttctttaaaataattttatagttgatccctgaaaaatacaagtttgaactacaccagttcacttatatgtggatttttttcagtaaatatattgaaaatttttttggagatttgtaacaatttgaaaaaactcgcagatgaactgttagcctagaaataccaaaaacaaatgttaggtatgtcatgaatgcataaaatatttatagatattagtctattttaacatttgctaccataaaatatacacagattatagtaagttatgctttatcaaagcttaatgtacacaatattgacagacctacattatgccaatgcccagttgagagaaatgtaaacaaatgtgaagatgcagtattaaatcatagctgcataatattaactacagtattactgtaccactgcaataattttgtagcaccttcttttgctgttatggtgagcttgtgtgttccaagcatatacttcgaatgccatgtgactcaattatctccttgtgagctgttcatctctccagtaaattgcatatcatgataaaaagtaatgtctcagggttcttgcttattttttattatgtgtagtgcaataccgtaagccttgaatagcatcatgggatccataggaattgccactagtgatgctggaagtgctctcaagaagcagagaaaggtcatgacattataagaaaaagttgaattgcttgtatgtaccatagattgaggtctgtgggtgcggttacctgtcatttcagatagactgtgcatcttgttcatcttataaatagatgatgtgaactgacggcattgataaatacagtataataatgtaaatatatattttttccttataatttcttaacattttctttagtgtacttcataaaaatacagtgtttaacatgtaaaacctacaaaatatatgctaaacaacggtttatgttatctgcaagacttcttatcaatagtaggctattaatagattagttttaggggattaaaaatgttatatgtgtattttcaactatgtgtggcagttggcactcctaacctgtgttttcaagtgtcaattgtattttcattatcaacattatttggttcattgttttagtaggaaagtactttattattattttattattcttataaaatgtgatagcattgataaaaatatgcatggtaaataaacacacatacttataaattgctttaaatacttaaaatataaaactttatatttcagaattagtggtattcagaagacatacagaaagaagggtgaaaatgtggaggctttgagaagtaagtagttttcctagtattcaggccatagtatttaaagtacaactagaaaaataatttgcatagcttgtgggaaatttaaacttctctaccatgattttctgtcttgcttttattttattttattttttttgagatggagtctcgctctgtcacccaggttatagtgcagtggcgttctcttggctcactgcaacctgcgccttctgggttcaagtgattcgcctgccttagcctcctgagtaggtgggattacaggtgtacgccaccatgcccagctaatttttgtatttttgtggagacggggtttcaccaagttggccaggctggtctcaaactcctgacctcaggtggttcgcccgcctcagcctcctaaagtgctggaattacaggcatgagccactgcgcccagcccctgtcttgcttttttgagatactttcgtttatgtgattaatattcaaaataaaactaacaacatgacatttgtaaaagtaaaatgtagtatctattaaaatgaaaaatactcaattatttgaataaggctatgtccttgtttcagtttattattttgcatgtatatgcaatacatgttagttactttttgaaaaattcatttggcctatcgtagggtttttcaacctcagcactactgacattttggtcctgataattctttgttgtgaagaactgttctttaatgtagaatgtttagcattgtgtcaatgtgttagtcagtccccagaaccaatagaatacacacacacacaaacacacacacacgcacacacacacacacacacacacacacacacacacacaccagtatgattgtagggtgggggattaggggaggtttgttttaagtaattacttcatgagatagtgggccctggtaaatgtagaaatctgtaaggcaggttggaaactcaggcaagtgttgaagtttcagtcttgagctcaaaatttgtagacaggctgacaggctgcacactcatgtaggagtctgttacattcttgaggcaggactcttccaaggaacctgttttttctcttaaggccttcaactgattggataaggtttaccattattatcaagactaatcaagtttaactcagatgattataaaagttaatgacatctacagcaacttctacatcagtatttgaccaaataacggcaccatagcctagccagggggacccataaaattaaccttcacaagcagcatccctggctttgatcaccaaagagagaaggagttctgcctcaagaatgaaacagattcttgcgtgagtttccagcctgtcagcctatgaattttggacccaagatggcaactttaactcttgcctgagttttcaacctgccctacagatttttgggacttactagaccccacaatcttctgaagcaatttcttaaaataaaccttccctaatcccccaaccccacactcatacttgctccattgtgtgtgtgtgtgtgtgtattctgttggttctggagactgactgacacgctgctaaacatccctggcacactgctaaacatcctctcccagttgtaacaaccaaaaatgtctccagtctttaccaaatgtcttctaggaggcaaattaatttattaagaagaaagtaggtatagtggtatactaatagggttttagtttgcatttgcctaataactaatgttattaatcacctttttatatgattattggcatttggaggttttcctttatgaaatgcctattcaagttcttttcacatttttgtttcaagacctttgttagatacaggtatttaaatatttgatctcagtctgaggcttgccttttaattctactagcagtgtcttttgacaaacacaagtcttaatttgaatgaagtccaatttatgaatctgttcttttatggttacagtgcttttcacgtctttttattcaacattggagattatatataacctccaatgtaagttattggtacaactagttaagtataattataattgtaataacaattacaactaattgtttctaatgcaaagaagcaagagaatgaaataaaaggcatccagattggaaaggatgcagtaaaattatttgcagttgacacaataatctatttttaaaatcttttagattgacaaaaaataatagtggaactaaacagtgagttttgcaagatgataggatacatgataaataatggaaaaatcaattgtatttctatatgttaccaacacataattggaaattaaaattaaaaatagcatttagcatcaaaaaatatgcttacaggtaaataagacaaaaatgtaaaagacatatcctgataagtccaaaacattgctgagagaaattaaagaagatttaaataaatagaaataccacgttcatggggcagaacacttaacgtttagttgttgagttccctttcttattttaacttagattattggcgttaggatctgagactttttccttcttgttttatatgttagccttcttagtctagtttttgttgttgtttgtttgtttttgagacagggtcttgctctgtcccccaggctggaggacagtggcacagtcttggcttatcatagccctgacttcccaagctcaggtgattctcccacctcagccttccgagtagctgggactacaggtgccaccatgcccagctaatttttatattttttgtagagacgggatttcgccatgttgcccaggctagtctcgaactcctgggcccaagtgatcctcccacctcagcctcccaaagtgttgggattacaggcacgagccactgtgcctggccagcctagttttttgataagccatttctgcttcatcatttcaggtccccatctcctgtcttccttcattcctttacatatccattcagtgatattgcttcattaaatctaacctttcaagccatttctatgctattggttaatttcttgtttttttgccagtttatttaaatgcctataaatatccttgggaacaaatttttgtttaattccattggttccattggtaattcccaaaaattgggacacagaaaattcccaaatattttgtatactcttaaatcttactgtatgaacaaataaagtttatttttatttactttcattactgtttatatcgttgactgtaacaaagaagctgttttacctgctatcaaatatgctggtaactttaaatatgtatttatagatatagtgccttgaagattgctcaaatattatgaattatcatgcatagctgaacagacataaaaattacatttgagtcttcttttttcctgaactagatttgtcatttgacatatatgagggtcagattactgccttacttggccacagtggaacaggaaagagtacattgatgaatattctttgtggactctgcccaccttctgatggtgagttttctgtcttaaagaaaaaaaaacttcattatatatattctttaaatgtgtattgaataatttttgtcaatgggaccaacttctgtatctgtaaaggtgttttctttttttcttgattatacacatgtggttgtttttagtagaagataaaaatgattctatcatgtttaataaagtaaaaaggatctaattttgtacatatttctatacatatacacacgtagatgtgtatgtatgtgtttttattcatcattttcaagggaggataaatgagtaacttattggaaattaaatcagaactatagactatttgaggttgagaaaataaacacaaatatctaaatatacagcaatagttcagcaggaaataattgtaaatgttcatactatcttctaaaatagaattttaaaggcatacctcaaaagtataattttgatatgtgattgtttggtaggtgagaattcattatagtagctccatattatgacagtaaccaaatagagtggcagtacaataaatattttactttacaaaagggctgaattgtattgaatctgcatttcaactctttaaatgttatttaacttttaaaattagtttgattttgttctttgtccttagttgtatcactctttgatggtagtcataatatcttacatttgtataagaatttatgatttttcctcatgattcttcataatgtatgattgttttaattttcactattaaaacaatgaatatattagtgttcactgtataaaaaaggaaagctggaatttaaagagattaagtaatttggccatgaccacacagctagttaggataaaatttatagttctttaatccctccactattgcacagtgtctagaaaattgttactggaatacaagtgtaaatagtgtatcaatagatatttatgtttagtgtcaagcttttactttcttgcttttcccactatgttatatgacctgtaagtgatggaaaatgagattgaaatataagtggatgcggatcaccaataatattgaagggtgtgttgtgccttgtaaatttatattaatttttaccttatatgtctgttataaccaaataactaagttatcaggatacttgaaaacatacacattataaaataattaatgtacatttaaatatatattttgcttttagggtttgcatctatatatggacacagagtctcagaaatagatgaaatgtttgaagcaagaaaaatgattggcatttgtccacagttagatatacactttgatgttttgacagtagaagaaaatttatcaattttggcttcaatcaaagggataccagccaacaatataatacaagaagtatgctattcatatagaaatctttacttttatttcctgtaatcaataaccttttgtaatgacttgtgcaataaaaatatgcttgaaaatctaaatataacacttgttctgagccagcaaacagaaagctattacaaagaattagacagaatttggagtaaatgttttagcacacataaaagtttgtttcatctggaggatgcttgcctgccttattcctgccttctcttgctctcatctcctctaccccctcccacttccacacatacattaagagccatcacagtgatctcttattccttccctaccacccaagaaggcacaaaattaaaacctttccctcaagaatcttgttacctgttgttttcataattatatatgagtatatgtcaaaggcagttccatgctaaaggatcatttttaaagttgatattaaaattatttaaaaacctatgttacttaaatatctaacacattaaaacttaaaatatttaaaaagtaatattgataattatataaatggtatgatttttaaaataacattgttcatgctttacttttacaggtgcagaaggttttactagatttagacatgcagactatcaaagataaccaagctaaaaaattaagtggtggtcaaaaaagaaagctgtcattaggaattgctgttcttgggaacccaaaggtaaataaatattacttttacagatgagctcattttaaattatgtcgaattaaaaagcaggttgtagaaagatataatacattatgtaaaggttaagtgtacataaaatgctgtatgttattatggatataatcatagtaatgagattttaaaagtgaagtcagaaagatgtataactttttttaattttagtagctgtcaaggtactaaaggtttttggttacatggatgaattatatagtggtaaattctgaggttttagtgcacccatctcctgagtactgtacatggtactcaatatgtagttttttttattcctcacccccttccaccctttcctttctgagttataacatctttatgataactggttacttttaggaaggagaatggaagaatagactttagttatgactgccatgttttctttctttctttctttctttctttctttcttctttttttttttaatttgtagagacgagaccttgctatgttgcccaggctggtcttgaactggcctcaagcgatcctcccgcctttgccttccaaagtgttgggattacaggcatgagccaccacgcctggcctccatgttttatttctttaaaaaatgatctgaagaaaatgtggccaaaaaataacattgctgaattggaatggtagctataatagtattactctcttgttctctatagtttaaaaaatatttgttatagttaataacaaaagttaagaaatagaacaaaatcaaaggagtgattcagtttatcactgtcctgctttgattttgtatgtatttgttttatgctgttctctgtcatagaaacagagaaacaactgatgtaccactttacacagggcatcaaaactgacaggtgcatgcatgcagctaggatgatctcctattgatccccaccatcctgccacattcccccttgctgttgcagctggggaatgattctggatcctggctttatgttcattagtcttcctctcagccaccaccaccatgttcttttttatattaaaaatagtcttgaaacaaattgcttcccttgaactactataaaaccatatattcttctccaaaaaagcaagtgttacatctacaaatttaattgttaaggataatagcaatatacttaatgttttgtttttagtttgtttgtctgactgttgttatacttttgtcttgtgtattacaggcagtcttttagaattaaacctgggaaaatattcacatgtcaaatttataattttaaaaatttatgtgaactcaattatgaatgaaaaaatctgatctaatatatttctgattgaaaataataatttgaaatggggcagttttttagtgtccacatgcctgtttaatatttagtttttctgaggattccctgcccttcttcacctcttttcacacagatactgctgctagatgaaccaacagctggaatggacccctgttctcgacatattgtatggaatcttttaaaatacagaaaagccaatcgggtgacagtgttcagtactcatttcatggatgaagctgacattcttgcaggtgagatttttgttttattttcgaaggctgagatcatgggccaaaaggaagatggatatagagatgctaattcctgaggtataaatagagaagcttttacctagtggtatgtttccttcacaaaaaaagttctaaaaaattttaaaatgatacatttttgtgttgagaatctccaagaccatcccaggtttagtgatgtcctagaagaactcatatgactcagcacatagtcatactcatgactatgatttattacagcaaaaggatacaaagctaagttagcaaagggaaaaggtatatgaggcaaagtctcgaggaaaccaggtagaagcttccaagagtcctactcccagtggagtagacagatgtgctttaatttcttcagcattgagttgtaacaacatgtgtgaaatatctacttgggaaagttagtatatactcagtgttcaagattcttattgggtgctgatcacataaacatcttctgcctagcacataccaaagttccagattctcagaaggaaagaagttgtttggcataaaccacattgtttgtacagtttaggcactgagccactcttacctgttttgagaatagtaggaaccctcccaaatccaagttctcaactaacagccaagggccaaccttgtaagcaggcctttctaaggatagaagcctctgacctgctatgttaactcttttctgcacaattttatacacatacatacatataaagaatccaagttgaagtcaacacatgacttttaatagctatgacagatatagaagtttgaaattcttgagcaacttctgtctgcttataatataatctaataaaattgggcaagtcattcatgtcttcagtagtacctttatttttaaaaacccaacaaactaacatttgttcttcttattacttttgttgatttttggagttgtttctacatttggttataaaggaaattgtgaaagtgcttgtattggtaagccttttaggaaaaatatatttggaataacatatggtaagtagactctagagtcagactccttgagtagagttcctggctttgttacttaatagctgtatgaaacatatataaggaatgtattttctttttaccttagtattcatatctgaaaaatagttgatgataatctagtaccatcctcataagactttttgtgatgattaatgatatcataatgtggatgactctcatatgagaaaccataaaatgtaaatgccaattattaatgctgttgatactttagaaattgaaatgtaaatatttatctgcagataggaaagctgtgatatcacaaggaatgctgaaatgtgttggttcttcaatgttcctcaaaagtaaatgggggatcggctaccgcctgaggtatcattcatttttattgacattattctatattatactcttgctatactgttattatgttggaggcttgctgttatatgctttgaccatcatttatggtactaaatttaatttaaagccttcataatttacttttggctgtttattgtataatcattaattgtgatttttggtattctctagcatgtacatagacaaatattgtgccacagaatctctttcttcactggttaaacaacatatacctggagctactttattacaacagaatgaccaacaacttgtgtatagcttgcctttcaaggacatggacaaattttcaggtattacttactttaagtctcttggtgtttgaactgggatcctatattgggaataggtttcattgatttcctttttgtttccttctccatgtagtattgccatgctcccaggtggccagagttaatattctgtttctgctttattttgtttttgaaagccagaaaaaacacagcaaaatttttttttttacaaacaccatgcaagaaactgtaactaatatattaaatacttaagaaaatgttaaaaaacgtaaaaataattgtgtttactttgttgtcaagaaaaaaaagaaattgcttgtaggcctcctgagagtaaggcatatatgtatatagtttatatacattctcaggttcttttatagtttcatgatttcataatgaattatatgataaatccttgaattcttttaattgaggcattattttttaattttttaatgaggaactcaaactcagtctccttcctctgtttaggaattgcttgatagacaaaaggatgttattgatgtaagtacattgtgcagaattttcatagcatttatctcataatcagaaaaatacttgttttttttttaaaaagaaatcacaaattaagtggactgaagtacacttgccaacttaatgcactctgcctatcattctatctacttatacccacctatctcctattctttagtaacatttatatgtgcttattttctaccagatgctggtctgtgccttttgcaattattagtttatttcattatcccaatatttcaagaaatacatgagataaatactattattgctttcattttacaaatgaagaaactgagacataaaaagatttaaggaacttgcccaaggtaacacaggtagaaagtggtggagctgagttttgaacccaggcaaatcagttccagaactcatggttttcaccaccatactttgttgttgactcttacatttctttgaaaaattgtcacggtatttcactggatttcacagtgtcttctgggatctcctgtaggatggaccgtaagacctcttaagggaattcataatgtcagcactttttctaataataccaaaatgttatttgccttattgaccctcagcttctcatgattatacagtgttttccagagactgcataatatgtgctatcacaacagattgaatacagaaacaaatatgagaacccatctgtcttctgttaagacagacattaaagagatttgcagaaatgtaaaacaatattctcttctcattatttttgttttaaaagatgcagtttttaaaaataaaattgtgttaacccgtaataggtttacttttttattttttaaaagatgaataagtatttaaatgattactgtatgttttctaatgtacatatttattttattattcaatatagtaacattctcagttttaatttcaaatactgtaaaatttttgttagtttataatatgatatagatataatatggtaatagatatgataatagatatattcccatatataaaatttctttgaggtccttaatttataagaatgttaagcctgttacttaggctggagttcagtgccacaatcacagctcactgcagcctcaaactcctgggctcaagtgatcctcccacctgagtctcctgagtagctaagactacaggcttgcatcagtatttatgcctagctaatttatttttattttttgtagagatgggtcatgatatgtttcacaggctgttcatgaacttatttttaaaggatattttacaataatttatgataatatgcttaaagatatactattctttcatttttttcttttaggtttgttttctgccctagacagtcattcaaatttgggtgtcatttcttatggtgtttccatgacgactttggaagacgtatttttaaagctagaagttgaagcagaaattgaccaagcaggtaaaaacagaactaacaaaacattttaggcaatgaatcagacagatggtgaataagacaaaaattatataaatgtaattttatattttttttagaataaagggtagaaataagtaaataagtaatgagatactgatagtgataggagtaatgcaggaaataatggggtggtcttagaaggcagcgaacttagattatatcatcaggaaggactttgttgagatgatacttgacctgaggcctgtataatgagaaaaatcaagtaggtgaagattttagggcagaaattttcagataaagaactgcaactgcaaaggtattaactgaggaatgagttggatgtctttgagggataaaaaaaggctaccatggccggagccatagtgaagctattacacagcaaagtcaggaggatactcaaagggatagatcatgttctgcctttgaacgtctggaaaacaatttcatttgttttcctattgtagtgtggaagctatcagagagttttaaagcaaataggtaccatgatctgatttgaatttttaaaaaaacacgttctggttgttgaatgataagagtattataaaggaagtgtggaagtaggaagaccagttaggaaactgctatagttaatactatcttgaactagggtgtcagtgaaaatagggaggccgggcgcagtggttcatgcctataatcccagcactttgggaggccaaggcagggagatcgcttgagcccaggagttccagaccagtcttggcaacatggcaaaaccttgtcacaaaaaacacaaaaattagccaggtatggtagtgtgtgcctatagtcccaactactctagaggctgcggtgggagaatcacctgaggccaggaggtcaaggctgcagtgagccatgattgcaccactgcactctagcctgggcatcagaaggagaccctgtttaaaaaaaaaaaaaaaaaaaaaaaaagggaaagaacagatatttgggttatactggtggtagtggtgatgagttgctgatagattgagtgttagaggctcaggagaagttggaatgaagaataattcctaagcttttgataactgggaatgagattgccatttcctgaaaataggggaagaataggtttgtggaaagaaggaatgcaggcatgagttttttccttttttttttttttttttgagtcttgctctgtcacccaggctggagtgcagtggcaccatcccggctcactgcaacctccgcctcccaagtccaagtgattctcctgctgcctcagcctcccaaacagctgggattacaggcgcccaccaccacgcccagctagttgttgtattttttagtagagacagggttttgccatgttggccaggctggtcttgaactgacctcaggtgatccgcccgccttggcctcccaaagtgctaggattacaggtgtaagccactgcgcccggccgaggcatgaattttgagtatattgtttgagatgcatctggagttaaatgaagatgttacggctgaagatacagatttggaagttactcacaggtagatggtgctatggaattggatgaaatctcttagttgggtaaggagtgtagataagaattgaggggcaagcctcctgggtgagcagtggagaaggagccaagagggctgaccgtgaatgagcaattattactctactttttcatgaaagagtggaaatggaaaaacctagaaaaatggtgtttaggaaagaggaagtggtcagttatttgtcaattgctgtgaagaataagatgaggacaaaaaaggtagttttggtaacagaggacggtgagggatttggtagactgtaagagtggtgatcttgacagatcaatttcatgatgcagtaaggagcaaggtggatctattcagtttacggtaagaacatgagttgaggaaactttcttatgatcgaaggttagcaaaatgtttgtagtggcaggtgaggagagcaaaggaaaccaggatgttagttcacagttgttaaaagagttgagatgctgcaaatacacattttgcatgaatgccgagtgggtgatgattaaaatcattgtgataccaaagtcaagaatcaagctgaatatatcatcatgaagtaaacttgcttatattatgctaaaataaatctggaacttaaaatattactagaatttaattattcatggtttggtagtcaaattttaaaagattggccttattgtgtgggaacaataatttgtcagcattgctaactgtaaagttgctcctgtagtcctacgtttatgataccagatgcccactttcaaatgcagtgaggagaagccatatatttttgagttcttaatttttcttttgttattatgtctggatcaaagaagatttatctgaaaattaatgtatgtgattttgtagtttctccttcttttgaaatttttaaatgatgaagtgggcattctgcttttagttcaccctcacaaattgtggaagaatccacaataaaacttttatattgaaagtgcgtggccttaatggaattaaataactaaaaaaagaagcaagtctcccaaatttgttttaatatcttgagtactaatatactgaaccactacataaaattaatattatataatctgatttctttttatattattatctaaattaaaaaatacatgtattggcccaaaagttataatgttcttcctaaagttatctcactagtacattctctttaatatttgcattaactgttaatatttttctgtgttgaaagttctgaatgtttttgagtttaaaataaacctcaattgtgtagtattttattcttgccattaaataaatatatgtttatggtttaattggtagaattttatttttttatttatttatttttatttttttttattattatactttaagttttagagtacatgtgcacattgtgcaggttagttacatacatatacatgtgccatgctggtgtgctgcacccactaactcatcatctagcattaggtatatctcccaatgctatccctccccgctcccccaaccccacaatagtgcccagtgtgatgttccccttcctgtgtccatgtgatctcattgttcagttcccacctatgagtgagaatatgcggtgtttggttttttgttcttgcaatagtttactgagaatgatgatttccaatttcatccatgtccctacaaaggacatgaactcatcattttttatggctgcatagtattccatggtgtatatgtgccacattttcttaatccagtctatcattgttggacatttgggttggttccaagtctttgctattgtgaatagtgccacaataaacatatgtgtgcatgtgtctttatagcagcatgatttatagtcctttgggtatatacccagtaatgggatggctgggtcaaatggtatttctagttctagatccctgaggaatcgccacactgacttccacaatggttgaactagtttacagtgccaccaacagtgtaaaagtgttcctgtttctccatatcctctccagcacctgttgtttcctgactttttaatgattgccattctaactggtgtgagatggtatctcattatggttttgatttgcatttccctaatggccagtgatggtgagcgttttttcatgtgtcttttggctgcataaatgtcttcttttgagaagtgtctgtttatgtcctttgcccactttttgatggggttgtttgtttttttcttgtaaatttgtttgagttcattgtagattctggatattagccctttgtcagatgagtaggttgcgaacattttctcccattttgtaggttgcctgttcactctgatggtagtttcttttgctgtgcagaagctctttagtttaattagatcccatttgtcaattttgtcttttgttgctattgcttttggtgttttagacaggaagtccttccccatgcctatgtcctgaatggtaatgcctaggttttcttctagggtttttatggttttaggtctaacgtttaagtctttaatccatcttgaattgatttttgtacaaggtgtaaggaagggatccagtttcagctttctacatatggctagctagttttcccagcaccatttattaaatagggaatcctttccccattgctcgtttttctcaggtttgtcaaagatcagatagttgtagatatgcggcattatttctgagggctctgttctgttccattgatctatatctctgttttggtaccagtaccatgctgttttggttactgtggccttgtagtatagtttgaagtcaggtagcgtgatgcctccagctttgttcttttggcttaggattgacttggcgatgcgggctcttttttggttccatatgaactttaaagtagttttttccaattctgtgaagaaaggcattggtagcttgatggggatggcattgaatctgtaaattaccttgggcagtatggccattttcacgatattggttcttcctacccatgagcatggaatgttcttccatttgtttgtatcctcttttatttccttgagcagcagtttgtagttctccttgaagaggtccttcacatccctcgtaagttggattcctaggtattttattctctttgaagcaattgtgaatgggagttcactcatgatttggctctctgtctgttgttggtgtataggaatgcttgtgatttttgcacattgattttgtatcctgagactttgctgaagttgcctatcagctgaaggagattttgggctgagacgatggggttttctagatatacaatcatgtcatctgcaaacagggacaatttgacttcctcttttcctaattgaataccctttatttccttctcctgcctaattgccctggccagaacttccaacactatgttgaataggagtggtgagagagggcatccctgtcttgtgccagttttcaaagggaatgcttccagtttttgcccattcagtatgatattggctgtgggtttgtcatagatagctcttattattttgagatatgtcccatcaatacctaatttattgagagtttttagcatgaagggttgttgaattttgtcaaaggccttttctgcatctgttgagataatcatgtggtttttgtctttggctctgtttatatgctagaattttaacataaagtacgtaaataaatttttattccaaatacatttggaatgtttaactgtaatttaaatgaatattaaatattaaaatgaaatctgaatgacataccttattcacactactgaatttgttataccttttaagtgttgtgctaataatctgtatgatcacactgtcattgatcatgtacaacctcagtaatcccaggaaattatattgaagtaggcattggctcttaaaccttccaaagactaaagatgaagttgaagggcagaatttggctgaaaactgagcctgaggctaaattttaattgagaagtaatgtaaagccaggagaggactctcaaacatggtgataagagagaagtctcgtgtatgatcaggatatgatgctaagttgtggtcagagaggaaaagttcacataaaagttggatattatacagatacagagataataagatcttaaatatggatatgtatccagtttgattttgaactagtggaattataccatgtgtctcctttgcatctgtcctctttcactcaaaatgacatttgtgaagttcagccatgttgttatgggtacagtagtttgttcattttcattggtttacactattccatagaatagtgttcttgttcttagtagaacaagaacattctcatgttcttgtacatgtgttttggtgaaacctgtattcatatctctgttgggtttatacctgttggggatctcttgggtcataagatatacatatgttcagctttaatagatactgccagaatataagagagttccatttgttccacataactgccagaccaatgcttctttaaatgttcctgcttcagaaagtttgtatcttttttaatgaacatactgaaatgtttgttttgttttggcaaatagattatagtgtatttactcagcagccactggaggaagaaatggattcaaaatcttttgatgaaatggaacagagcttacttattctttctgaaaccaaggctgctctagtgagcaccatgagcctttggaaacaacagatgtatacaatagcaaagtttcatttctttaccttgaaacgtgaaagtaaatcagtgagatcagtgtaagtataattatcacccttatacctgatggattgctttttaaggatacacattggttttaccatcttaatttttaaaatgttaacatatgtaaataatttatatagtttcgaaagattaccactgtaatttcacaatgttagagaaaaaaattacaataatttcatcgaataccctgtcttacactttttaaactagcatttattgtctcatctataaagtgaggaaataacaaatattccctaattgtataattttttaattactgtcattgtatctttttctttctttcacctgggagcacagattcaagtttccttgaatatattaatacactccccattgtatcttaaattttgttttgcgtttctattttttcgctattttttgcgtctattagttagtttttataaccactttttgtaagtagcaggaaaaatgagttttacctctatttatcctatgaggaaactgaaaaataaagaaggctacatagctagtagatctgggatcaaaatgacatctcaagttagctttagcccttctcagttaggttctcctagggtactaggaactgaataatttggaaataacattaaccactttcatataccacacacctatcttgttaagtccaaaatgtcagtagtaataaggcttaatcattaagattaagaatattgttatatgtttggaatatgctaaatttatatgctcttctttgaccaaattcagtgtcaaacaaatgtcaatcacgtatctgatttattccctggtcggcattactgaaagaaaaatgtttatttaaatcagcatgtttcaatttattttattatttttttatactttaagttctgggatatatgtgcagaacttgcaggtttgttacataggtatgcatgtgccatggtggtttgctacactcatcaacctatcactacgttaggtatttatcctaatgctatccctccccagtcccaaccctccaacaggccccggtgtgtgatgttcccctccttgtgtccatgtgttctcgttgttcagctcccacttatgagtgagaacatgtggtgtttggttttctgttcctgtgttagtttgctgagaatgatggtttccagcttcatccatgtaccttcaaaggacatgaactcatccttttttatggctgcatagtattccatggtgtatatgtgccacattttctaaacaccactctcataaaatacactcagaaaaataattaaaataccatctgggctcggtggctcaagcttgtaatcccagcactttgggaggccaaggcaggcggatcacaaggtcaggagatcaaggccatcctggccaacatggtgaaactccgtctctactaaaaatataaaaaaattagctgggtgtggtggtgggcgcctgtagtctcagctacttgagaggctgaggcaggagaattgcctgaactcgggaagcggaggttgcagtgagccaagatcgtgccactgcactccagcctggcaacagagtgagactccgtccctgcccccccgcccccccaaaaaaagaaaattaaaataccttagtcagctttgactgccatgacaaaataccatttactgggtgacttaaacagagtattattttctcacaattctgatggctgcagttctgagatcagggtgccagcatggtgatggctgtcttcctggcttgcagaaggccaccatctcactgtgtgctcatatgacctcttcatgtacactggcatgcaccctctggtgtctctttataaatgtactaatcccatcatggggaccccaccctcatgatgccatctgatgcagattacctttccgaagtcccatttccaaataccatcatatgggagttagggcttcaacatacaaatttggggaggcacaaacattcaatccataacaaaatgtgttccatggtcaaatacatttagaaaatattactcttatattccctatattaaagagttattcattagcataaaaaacatgagatgttctctggtaaagaaattccttcaactttgtttaacctcatgtttccaaatattatttaattgtgaatattttttaacctaaatcacttcttaacttattatggaacttgatcaatgccatatgcttttgaaatcttagatataacaatttaagaatttttttaaaaaaattacggggtatgtgaaatttataaattgctgaagtatgataatctaagctctccaactgcttgttaggacacttattacatgtgatatatagatattttatcagataagtagctgctcttcagataaaagggcattgtagtataccttgctttgcctcctgagagcagcagtggcaattaatatgataaaattgcgattaggatgagatttcaaagatatcagccattcagagtttaattgtatttttatttgcttctctatatctaaaatatttttcttgttacgtgaaaagtaaatggggctgggtgcagtggctcacacctgaaatcccagcactttggaaggctgcagcagctggatcacttgaggccaggagtttgagaccagtctggccaacatggcaaaaccctgtctctactaaaaatacaaaaattagccgggtacagtggcacatgccagtcgtcccacctacttgggaggctgaggcatgacaatcgtttgaacctgggaggcagaggttgcagtgagccgagatcacaccactgcactccagcctgggtgacagagcaagactccatctcaaaaaaaaaaaaaaaaaaaaaagtaaatggttaagatagagacaggacaggaagtaattccttcaggagtagagacaaatatttgagacataatgtcttgtgttttaacagttataactacgtgtttacatactcttagaaaaatttaagggcatcactgatctaaaatacacttttataacttttaattttgtcgtacagtattggctttctctccagtattgtcataagatcattttggggaatacgatttcttatttttttttttcagttttttttctttgtttttttcagtgattatcttttaactatctagagtttaaatctataccaatgtaggctggtcaaggtggctcacacctgcaatcccagcactttgggaggctgaggcaggcaagctccttgtttgagctcaggagtttgagaccagccttggcaacatggcgaaaccccatctctataaaaaataacaaaaattagttgtgtatggtggcgtgtgcctgtagtctcagctatttgggatggtgaggggagaagattgcttgagcctgggaggtggaggttacagtgagctgagatcatgccattacactccagcctgggtgacagaaccagaccctgtctcaaataaaaacaaaaaaagtccatatcaatgtgaagggagagttttaattgattttcatattaatgtacctttgtaccctgagctgtgttgttttttttttcttttcaggttgcttctgcttttaatttttttcacagttcagatttttatgtttttggttcatcactcttttaaaaatgctgtggttcccatcaaacttgttccagacttatattttctaaaacctggagacaaaccacataaatacaaaacaagtctgcttcttc

SEQ ID NO: 15293 - DNA, 57373 bp, Homo sapiens
ctgcccgccgctgggtccgaccgcgctcgccttccttgcagccgcgcctcggccccatggacgccctgtgcggttccggggagctcggctccaagttctgggtaaggcgcggggctccggggtcactgcgcgggggccagggtcggccggcttcgcccggtccccgccgcctgccttcccgcggggccggcaggtatcccgggacggagcccctgagacggcctgggcgcccgggagggggcgatgggctcgggagggaggttggctgcgccgcccggagccgggtcccacgcggtgtcggggacctgccctgctctgcccttcccggctgcagcactggggagcccgggaaagtgaggaagagtgcgcggctggggcgcaaaggcacagtgcgtggctgggtgagtcggctccatcccagcccctccgtcgggtgcggaaggggcgtttcgcaatcagccgcgggttcctgatggagggtcttccctcagcatctgcctcaggttaggactcggttgcccacctgggcatggattgcccccagggcatccagagcacctgctcaaccaggtgttttgggaggccggctgtgcagtgtcccacccttcttaggaaggtttcctgccaccttcttttctctaggtaagactgaggtctgagagcaggccatccccaccactccggactcagaagggagaagcagaccccagtctggagacaggtgcagggtgtcaggattcctgtagtccaactcccttctcacagatggagaaagggaggcccagagagaggaagggacttgcccaaagttacccagttcaatgaaggcagagctgggatagaaaaacaggctacaggccaggtgcagtggttcacgcctgtaatcccaccctttgggaggcagaggtgggaggatcacttcagcccaggagttttagattactgtgagctatgatcgcaccactgcactgtggcctgggcgaaagagtgagaccctgtctctaaaaaaataaataaataagaaaagaaaatcaagcctttggtgactctcactccaaatctctttctaagacaggctgctcttcagcctgctgactccagcctccagcacagttcaggtgagctaagtgcatacagcctaggagctttcttaccaacttgcaaaacttacttgcctctatgaggcaagtgatcatgtggtctccgttttacagagggagctcagattaaaggtgcttctctgtggtcattaaaggggtgtccagggcttgtgaatcccaatctctaagtcttttcctattttgagtatttgtacatatatgccctttgtgtgtgtacgcacacacgcaggcacgtggggtgttacccaagagttcgtgctgtgcacgtgtgtgcacaggtgtataagtctggagctatgctcttgggctgtgtttagaatgggctgaaggcgttatatggattttttgaaacttggggcaatggaggtaaaaaaaaaaactgtaaaaaggcatatttgggattctctctttttctgtgggtgacccaaaggttaatccgagatggtgcaacttctctgccactgcccttctttcccagtcccacaggaacttcatgtattattcagcatggacaggccacttgccaccagggtccagaggttgtgcctttgcctcatgagcacacttcctttcactgccctttgggccaggctggtatgaccgtggcaggtttgtggtgcctgggatgccaaacagaaaatcaagagggtagttgtgcccaagcttcaggcacaagggctcattgttcctgggtagcctcctgaaccctgagagcttaggactctacagagacaggtctcctggaccccagagttgggaaattcaggactccctttttgtcccatgttcagacatcctctggctctaccttaacatgggattgtggaatccaagaaagtgggagcttgggagtttgaagcagcgagtccaacccctcagtgtagagctggggaaactgaggccaagggagtgaaggtcacaggacaatcaaagacagagtgctgggctgggaaaccggaccccggggctgtggttacagggttgccattgcctggctgtgagcctttgagcctctgggccctctggcccgcgcacttctccttgatgctcgtgagctatacacacctcctctgaggatgcaggctcagtgggagtcagctcatctacattatgaagccctcgtgagatctctgcttggataccttaaatggcaaactgaccaccccccttcccaccccaatctctaaacatctttcacattctcttctggctcctgaaagctgttccaggctgcacccagtgtggctggtgactggggaaggagcgtggagagagaaaggaggctcccagctcatcctctgagggaatgacagggtttgtacagctgaaaggagagagagtctacactggaagctggatcctctgccacagcctaattacaaaaaaggcctggagttctgggctgttcatttgtgatgtgctgtgttgcatctcatttgcatggtgtattattaaggcacaactccccctgaacctttaccttaggggcctgtgggtgacccactttgtgggaagtggttcagggcagcccggaagtacctgaactaggagtgaaaatgcaaggagggggtggggtgttcaggcccctctgggccgctcatttaatctaccaagatgctcagtagctcatccttatagcttcagtttctccaccagtggaatgggaaataacccaacccctacccacctcacaagatttttctgatcaaatgagacagggaatgtggaatgattttaagaactaagaagttttctatgggtggcaagttctgacattccccggaagagggaggagaaagaaaaatggggttagaagaaaatgtcagacgtgggaagacctgcagggaaagagctggtagggctgtcgggccagtggctcccatttcagctgtttgctggggagctgggagctgttcctggctcagtctgagggtaggagactggagaggaccatgccccttgggacatgtgtacacacatctgtgtactcacacaccacctgccaggtgaatgatttgtgtgaatccttctctctctcacccatatcgactttgaagcaggttaccaacttccctgaatgtgccttgggagtttttgtggaaataaattccaaaagagtgaactgtgtaattaaaccacctcactactcaggaggccagaggtgcctcagaacaagggaggaggtgggatcctctgcctgcaggattcctctctgttctgaaccacagaggttgggagcacctgggtggtgaagggagtatgtggaggaagggcctggaggtatttaccccccgccagataaacacctgttggcagaattagccttgatctgacagccccaggaagcttagaaatctgaagatcctgaccatgaaagccatccaaagatggcaaggaccgcctgagaagtagtgagctccctgtcactggggggtatgtaaggacatggttagtgactgcttggcggagatgctggagagaggattcaagccaggaaagaaggtggggtcctgagattctgtgactgggtagagggaagatgcggccagtggggattcattagttcctcctctgagatttctggactcctccttccctggctctctccctgctctacatacggaatttgcctagaagcagctcttggtagaggcctctgggtctccccttggttaggcccacatgggaaaggtgacctcattgttcccttagctgtttacccatcctagggaggggcagatccctggtcccttggaggctcagctccctgtgtctcctgctctgttttagctagccccaattctgctattcaccagctgtgtgactttgggcaaatgactcaccttctctgggctccagcagggctgaggtgggctctggggcctgcttcaggtctggagttgcccaattttggaaggatgagccttgggcttgggggcgaaggctatgcatgattagggcccttcaaagcttagagctcctgggtatcagggtctcctctgccttcttagtaggcagccacaaaaatgtatgagtaatgggcaaggctcctatgccaatgtattttgactcacaaatgaagacagtgtcctgcacatccatggggaagctgagtgggaggtagacactcctccgcttagcagacaccatagctcaccctcccctcaggaacccagtcctccctgcaaggccagagctcccggggctcctttcctccatctcagctgctgcaagcaaacccagtgctggatggctttgacctctgagctcttggcttctggctacggcatttcattgcttgtggcctcaggctggcttctcctcaatcctgctgttcccccacttcacctgggccttaggtccctgagggccagagagatacggggaaggaagtgagtcagggaagtggcattcaggagggagctttgccaagcccgcctgtagtccccagacagggaaatggtcttgaaacactgggcaggcttccagggaggaaggacttggcagggatgaccagctgagccaccccggagtagggccagagcacccggactgtattcagtcctctccattggggcaggatccctggggagttgggggtgaaatgagacctggtatgccattgctggggtggctgggcccctccccttcccgaactgaagttgtttctgtttctggtactgcggtgcagtggttggggctggcagggggcagggtgggatagtgaatgagagcctaactctaggcttggattttggatttctccttttttttttttttgtgacagagtcttgctctgtcgcccaggctgaagtgcagtagcacaatctcaactcactgcaacctccacctcccaggttcaagcaatcctcctgcctcagcctcccaagtagctgggattacaggtgcacaccaccatgcccggctaatttttgtatttttagtagagacggggtttcaccatgatggccaggctggtctcaaattcctgacctcaagtcatctgcccacctcagcctcctaaagtgctgggattacaggcgtgagccaccgcattcagccagatttctcctaactggatattcaggtttctagtcaggggctcccagaaccccagctaggccactacccaggtgttagccgctctgctccctcagctctgtgagaataattgcaaaaagcaggtgatatgagaatgggctgcatggctgaaaggtgatctgggtgcaagtgctctatccccagggtgggacatcatgccggagtcctaccaggtgtacaggaaacactaatcctgtgggaaggagctgggccctggaacaaaactctctgggtctaatcccagcatcagccctgggtgtcagctgtcatgagcgtgaaatgatcatcctggcccacagcaggagctcagtgaaccaaagccccttccagaagcacattggccagttgagcccgtgagccatccctgcaaggggccagcaggcgcagcacaaccagtttttgtttgtttgtttgttgtgttgtgttgtgtttttgagaaggagtctcgctctgccaccctggctggagtgcagtggcgtgatctcagctcactgcaacctccgcctcccaggttcaaacaattatcctgcctcagcctcctgagtagctgggattacaggcatgcgccaccatgcctagataatttttttaaatatttttagtagagacagcgtttcgtcatgttggccaggctggtcgcagactcctgacctcaggggacccaccctcctcggcctcccaaagtgctgggattacagcacagccagtttttgacccctgcccccaggccttccaaaggctgagggagggtgagtggggatcagcacgtgtccttgctctctccacgccttcattgctgctgagtcaatggtcttgtctgttcatcccttccctatctgggacttcaggagctgccctgcagtggtggcttccttctccagtaccacacaggaatagggaagtaatgactcttctcatgacagagactgtcaacaggcctggggcccccagggcttgggaagtccctggcaaagctggggcagagggctccggggtcctcaccccccgcccccatcgcctgtatgagtctgcagtgatttcagcttcagtgaccatgaagtctgccatgagggggcctctgccacgtggtccattctggatgtgggaccttaccccttatcagccccatccagctgtttaatcgcattattaaggaagctgttgttgctgtggaaactgtgtgggtgatggtgggggagggggctgtgggctcagctctcacctcccagcagtgctcttcagagcgggaatgagaggagagccttgagtagggatcgtcatcctgccctgcagggattcagggagtgttacagggtccagggaataaccttcactggccctgtcctcaccttcattttacacataactgagttggagacccttctgggtgccaagaactgtggccttggtaccagggagagaacactgtgttcctgggcatgaagctgcagaggctgcggctggagttggcaccctccatttatctattcatttgtttattcattcttttgttcaatagatggttattgagtaccttctctgtgccaggccctgctctaagcaacaggaaataccatcaactgcagaatacagagctaaagaatctgtcttcgtggagcatatactctagtgggaagaggcagtaaaacaagaatcataaaggccaggtgcagtggctcatgcctgtaatcccagcactttgggaggccgaagcaggaggatcacttgagcccagaagttcgagaccagtctgggccacatagtgggaccccatctctacaaaaaaattaaaaaattagctgggcgtggtggcacatgcctgtagtcccagctactcaggaggctgaggcaggaggatcgcttgagcccaagaggtcaagattacagtggggaaaaaaaaaaaaaaagaacagttgaatgtggcactgtcatgccgttcaacctgtaatttgaaggtagaatggacagggtttgctgagagaccggatgtgggatgtgagagaaagagaagaatcaggggcaactccaaggactctggtctgggaagagagacaggaggaaggaactgccatccccgggccaggcaggctagaaaggcagggacggccaagagctcagttctggacgtgttttgtatgacgtgtcccatagttgatgtcctagctcagggtctggagtgaaccaaatagggagttaggggtgagggcctgtgtgggcgggtaccccctgcctcctagggagggccctgcccaggtgggacatgcttatctcaaggaaaggagcccaggctgaatgcccttgagggtcaaagcagccacccagttctcacagccccaaagtcccctggttgttgccacagagcaggtgtctgcgaaaccaaaacacgggcctgacagctggaggctccatcacccgcttccctgagtgttgtcccgttgccatcgaagtgctttgctgttcattctccctcaccttctccccgctgtggggaggtgaccagatgctgtcatcactcccattactcacaggtggagactgaggttcaagggcacgaaggggctcaccaacagttgcatggctcaaaagtggcagaagccatcctggattctccgcatcggggttgggttcttcctgtggccactccccacccgccttacagagccatgccaccggcctgcaagtgcacacagcgattcccaccatgtccccacgcctgggctcctgtcctcaacatgcacactcccttgtgagtcaatggccccgtgtggcatcacaaagcctgggtgcctgtcccggccacacactgctgggtgtccttgaacctgttgccaaagtgggtgtagtttctcttttgtacactgggcctaacagtgcccctcctatatacccctggaagttgttctgagacaacatccagataacaactaggtaagtgcagtaataaaatgcgggagaaacattaggggcctttattttcctcacttaactggctgccagggaaaagcaaggaaaggtcagaggctggggtgccccagagaggccccatgtagatgaggctctggctgggcccagagaaatgggatgtacactccggcccagagacctgaagatctgggttcagggcagctttgggacaggctatctggatggcaactaactggagtacctgatcaggcctagaggtgtgtcctgtgacccagtgtccaggcctgggccagcatgtcagagactcagcaagagtatgtgggtccttggctcacattgtttgagcaactactgaatactgaataggactactgaatactgaatactgaataggacaagatgtacatggtacaacttctgcccacctgggccttcaatgaaatgcccccaggcagcatgtccctgactgcatgcttcacagagcagggataggcctgcccaacgtgccactgtatctgcagaacccagcccactgcctgactcaccaaggccctcaccaaacattgtcaaggccaagagtgacgctccagggaaggggatctctctaggaggaagggtgctcaagatgaagaaggtgggttttcagccaggcctgtcacccctccctggagtggttaggttaggattttgacaagtggtaaaaagagggactaggttgagcaagggggtaggagcaagaatctcagagcagatttaggatgaagtgagttggctgtgggggaagggagcaatgggaaaggaggtgggaggagatgccatggggggggtcttgaggaccaggttgggtgctaggatgtggcttcatgagcagcaggagtcactgcaggtttgtgggcatgaggcaagaggcacaaagctgtattttgggaagagccatctcgcaggtgggcaggggcactggagggcagagggctgccccagatgggattaagaagggaaggcaggccaggcacagtggctcacgcctgaaatcctggcactttgggaggctgaggcgggcggatcacaaggtcaggagttcgagaccagcctgaccaacacggtgaaaccccgtctctactaaaaatacaaaaattagctgggcgtggtggcgggcatctgtaatcccagctactcaggaggctgaggcaggagaatcatttgaacccgggaggtggaggttgcagtgagccaaggtcacaccactgcactccagcctgggtgacagagccagactccgtctcaaaaaaaaaaaaaaaaaaaaaaggaagaagggaaggcaggctggggaggttggggaaaggaagcagggagtgcagatcactccccttccatgagttgttttcttaagatgctagaacttggccaggcatggtggctcacccctgtaatcccagcactttgggaggctgaggctggcagatcacttgaggtcaggagttccagaccagcctggccaacatggtgaaaccccatctctactaataatacaaaatttagctgggtgtggtggtgtgcacctgtggtcctagctacttgggaggctgagacaggagaatcacttgaaccctggaggcacaggttgcagagagctgagatcgtgccactgcactccagccgaggtgacagagtgagactccgtctcaaaaccaaaacaaaacaaaaaccaaggccgggtgcagtggctcatgcctgtaatcccagcactttgggaggccgaggtgggcagatcacaaggtcaggagatcgagaccatcctcgctaacacggtaaaaccccgtctctactaaaaatacaaaaaattagacgggcatggtggcgggcgcctgtagtctcagccaatcaggaggctgaggcaggagaatggcgtgaacccgggaggcggagcttgcagtgagccgagatcacgccactgcactccagcctgggcgacagagcgagactccgtctcaaaaacaagcaaacaaaaaaacagaaaacaaaaattagcctggcgtagtggcatgtgcctgtaattccagctacccaggaggctgaggtgggagaatcgcttgaaccctggaggcagaggttgcagtgagccaaggtcgcaccactgcactccagcctgggtgacagagcgagacttggccttaaaaaaaaaaaaaaaagaaagaaattaaccagccgtggtggtgcacgcccgtaatcccagctactcagaaggctgaggcacgagaatcacttgaacacgggaggcagaggttgcagtaagccaagattgtgccactgccctccagcctgggcgacagagcaagattccatcaaaaaaaaaaaaaaaaaaaaaaaaaaaagatgggagaactcagaactcaagcatatagattattcaacagttcacatagccagatagttcaaggccagctgtgggctttgaatgccatagtaaaatgtttgaactttgccttctaggcagtagggagctactgaaagtttaaagggatggtatactattattctttcattcatttattcaataaacgtgtatgtgtgtgtgtgtattttttttttaagagtccaggtcttgctctgttgctcaggctagagtggagtggcataatcatggctcactgcagcaacaaactcccgggctcaagagatcctcccgccttagcctccatgtaactgggactacaggtgcctgtcaccagaccaggctaatgttttacatttttgtagagacagcgtcttgctatgttgcccaggctggtctcaaactcctggcctcaagtgatgctcctgccttggcctctcaaagcactgggcaatgtccctggtcttcaataaatatttgatttatttaagcaaatcttttttctgagcacctactatgtgctaggcaccattctaagtacttaggatacatagataaataaaataaaggttcttcccttcaaagagcttacatgtcagcaagtaaaggaaaagatgagagaaaatataataaatcagtaaattatatatcatgtcaaaaggtgataggtgttatagagaaaagaaaaagcggagaagggtgggagaattgggaatacaggggtgggacacaggtggcagtattaaacaggatggtcagggtaggcttcattgagaaagaaagacttcaggatgtctgggggaggagtgttccaggaagagagaagagcaagtgcaaaggccctgagacaggagcagcaagtgcatttagaaacagcaaggaggccagtggctggagtgaagcaggaaaggcggggagagggtcatgggttgggggaagggacattgtgcaggtctatgcaggctattgtagggtgtatggagtgaagatgtcaagtcagcagttagatatggagctggagatttggggagcaatgagctggagagatagacttgaaagtcattggcatatagatggtacatcatatcatcatatgagactgcatgggattgccaagaggttgagtgcagataggaaggaggcagagaagaggaaaggactgagctccaggaccctcttgcaccaggcaggggaatcagcaaagagactgtgatggcatggccagaaaggaaggggaaaaccatgcaggatctgggaccccagggaatctgaagggaagagaccagaagtctatggcaattgctcatgaagagatgagggtctggccaaggggccaggtgggaggaaccaggtaagagatattatcatcccaatgttacccttaaagaaaccaaggcccagagaggggagaggttaagaacctgggtcaagatcacacagcttaagtgtgacttcttctttttattttttatttttttgagacggagtctccctctgtcaccaggctggagtgcagtggcacaatctcagctcactgcaacctccgcctcccgggttcaaacagttcacctgcctcagcctcccgagtagctgggattacaggtgcctgccaccacgcccagctaatttttgtatttttagtagagacgggatttcaccatgttggtcaggctggtctcgaactcctgacctcgtgatcttcccacctcagcctcccaaagagctgggattacaggtgtaagccattgtgcccggccaagtgtgagttcttttaagctgtgtgaccttggccaaggtgcttaacctttccctgccaagtctcaaacacctctttgtccagctactatgcttccatcaagaatcaataggacctatgtccctacaggtgtcagggtagctggcagaatggtgatgcccttggcagaggcaggcaaggccaaaggaagggctggttctggcagggagtgaaggatcttactttgagaggtattgaatatgaggtggctgcagacagatggtgacgccatctgagaggcagcaggaagtaggcgctgaggctcaggaggtgatttgagctgttgatctggatttgggactcctcaggacaatctgtgaacaatgatgagagagagcaccaaggaccaaggtctgaacttgggagctagggcccatgtccacagggtgaactggaaggaagataaggagacagcaaggaatgcttgccaagaaaccaggagaccaggaaagagtagtttccaagagatgggggaagcccacactgttgcagggaggtcctgcataaagtctgaaacgggtctatttaattcgcccttggaggctgggcatggtgtctcacacctgtaatcccagcactttgggaggccaaggcgggtggatgacctgaggtcaagagtttgagaaccagcctggtcaacatggcaaaaccccgtctgtactaaaaatacaaaaattggccgggcgtggtggtggaagcctgtaatcccagctactcgggaggctgaggcaggagaatcacctgaatcccagaggcggaggttgctgtgagctgagatcacaccactgcacaccagcctgggagacagagcaagactctgcccaaaagaaaaaaaaaaattgtagttggaaggacttctggttctatagggtggattgaacacaagactttatctccagtccttcctgattttccatcaaagtgacagtaaggaataaagaatgtaaacctacaaggacaaagagaagaggagacaacagcagacaagatattaacacctttttggaaagtgagaaacaggttgaggagtgatcactgacacagcagagaacaactgaaaccaaaggccatttggagtctgtaaaagctcggggattggagggctgaaggaggcaaggggaagagcagggctgaaagcagcggctgctaggagaatgcataaggagagatgaaacacccaagatacttatccatctcctctcaaagccaggcaaattccagccacctcacagaagaccagcagtttattctgtggaattaagtaaaagtctgcatactgaaggatagaaccctcagccctcactcctaaattggtcccagagaaaagacctccagattcttccagttgttgggggagtcttccctaaaggaccaggttcctacttgatcactctgcagtgaagcccaacagccaataagcttggtcctcggtactctgtcttcagtagctgtttcttggtccttggtccttggtactctcactcatcattgttcacagattgccctgaggagtcccagatccagtcccaaatccacctgcccccaacacacagagcagccaactctttagtgtcttactccaaaatattgagacagccaagccgcaagaatcaccacaggtcgggtgcagtgactcacgcctgtaatcccagcactttgggaggccgaggcaggcggatcacttgaagtcaggagttcgagaccagcctggccaacatggcaaaacccctctactaaaaatacaaaaattagctgggcattgtgacacgtgcctgtaatcccagctactcgggaggctgaggcaggagaatttcttgaacctcagaggcagaggttgcagtgagctgagatcgtactaccacactccagcctgggcgacagagggagactccatctcaaaaaaaaaaaaaaaaagtcaccacacatttgaggaaaaattctgttaaaataaaaactttagacaaattaaatttagcagagtttatctgagcaaagaacaattcatgaatcagccagcatcctgaaccagtagaggttcacagagttttaccacccagcagtatgggcaggcagtattaatggacagagaaaggaattgatgtatagaaacagcttgattggcgacagatcagtatttgccttatttgggcatggtgcaatgaggtgtttgccttatgtggacatgttctgatgatctggcagcttgtgattggctgaaaattctgctatatttggctgagacttggctgcttattgtaagaatatactctcaagttacgttgcagtttgtttacatattgaattatgctacagtccactatgtatggagtcagctttatacctgggtgacagagtgagactttgtcaaaaaaagaaggagaggagaggagagagaggagagagatgaggggtggggaggggaagggaggaaaggagaaaggaaggaaggaaagaaggaagggagggagggaagggaaggagggagggaagaagggaaagaaagaaggaaggaaggaaggaagaaagagagagagagaaaggaaggaaggaaggaaataggcaacacataaaataaatttttttaataggatcacaggtcactgtgaacaatagccgttcattaaatgacttcggaggcatatacaaaaagttacatagttgtagaaaaagcttagctgttttaatagcgagttctcagttttcttaagtgatcaaaaacctaacaaagacagcatgaagcacaggaaattatctgggtagaacacagaatctttgttttctaggccaactacctaaagagaaagaaaaacattttacaatttcctattatgatcagaccaataatctaagaacaccatgttgttttaatggagagaaccaaattctagttttgcatcagtgtaattttgatattaatgctagctcttatcgcccaggctggagtgcaatggtgcaatctctgcttactgcaacctccgcctcccgggttcaagtgattctcctgcctcagcctctcaagtagctgggattacaggcgcctgccaccacacccggcttattttttgtatttttagtagagatggggtttcaccatgttggccaggctgggctcgaactcctgacctcaagtgatccacccgcctctgcctcccaaagtcctgggattacaggcgtgagccactgcacccggtcgctaacttttattcttaaaaaacttgtaaataattacctcctaatcttaaccagcttgatcacccataaaatttctttcacaagattcatcttccacaaacctcctacaactcttatatccattcactttttgtcctatactttcctcttctcattttcgaaaaatcagtcatttcactttaggacaaaatttattctctttttccgttatcaaaacaaaacatcctcacgtcttatagcttttccttagcttcctttgtatatttctttttcatatattcctttttcttaccttccttgtatattttcatatagattttcccccttattgtttctagtaattgtagctacatatattaattagaattcttaaccccggccaggtacagtggctcatgcctgtaatcccagcactttggagtccgaggtaggcagatcacttgagggcagaagttcaagaccggcctggctgacatgctgaaaccctgtctctattaaaaatacaaaaattggctgggcgtggtggcgggcacctgtaatcccagctactggggaggctcaggcaggagaattacctgaacccaggaggtggaggttgcagtgagtcaagattgagccactgcactccagcctgggtgacagcgcgagactccatctcagaaaaaaaaaaaaaaaaaaagaattcttaacccttagtgaccttaatttccatggacattagaaagtaagcatttgtgaattgtgtgtcacaccagctgtagattggtaaatctatgaaccataatgtctagaagcatgagctttctcatagtacaatttgtcagtgtggcacagaacatgtttctcaatggtccaaaatgtctttaagtctctctgtaaaaataaactgtaaaggaggcaaaatttcatttgtatccctttaggttttttgtttgtttgttttgtgaggcctgaaaactaaattgttgtttgtacagatttccctcctcctcaactttctattcttgatgctaagagtgttaaaaccttctggtggctgagcgtggtggctcacgcctgtaatcctagcactttgggaggctgaggcaggtggaacacttgacctcaggatttcgagaccagcctgggcaacatggtgaaaccccatctctacaaaaaatacaaaaattagctggatgtggtagcttgtgtctgtagtcccagatactttggcggggctgaggcgggaggattgcttgagcccaggaggcagaggttgcagtgagccgagatcttgccacttgcactccagagtaggcgatagagaccctatttcaaaaaagtaataataaaaccttctggtataggaaggacatcttttacatgggaattttatcttacattcatttaactcacttattttcaacacttatgcttggattgcctataaagatgagataataaacaactagtcatcattttgtttttcttgctgacaaattttataatataaagacaacataagcttgttttaccagtaaacctagataggaaatcatgcatctttatgatatttaatccccaaaactatgaaaacatgtctgtttcagtcaaaccaacaatattcttatttgccaaagattacccaagtcagatgagctgcaaaagtatttgaggtagttcttaattttctgagagaatacttcatttatacaagcacttatttttcttaaagccaacaaaatagagctctttcataatttaattttggagcattaaaaggagataagaaactatgatacctgtatcatacatacagacttatataaacataaacagcaacagatcttacagctttcatttaaatatcttagccatgttccaggtacagtaatataaaactcctgaatttattaaagactatctggatccaaattgttcttctggccaatggaacaagatttcttgcccagatgactaaagcttttgaataagattcgtgaaggagcttttaagatttttttgtttgatttctgtaaggaacctattataaagaggcaattttttattcatttaatcttttagatgcctctgtgtatcaattaaagaatgcatcccattgcttttgtggcatttttgaacctttcttttctaatgcaccttgcaagtgaacagttttatctaggtcaaaactttcccactgtggccactgtaactcttaagttgtcctcagcaaagttaacccatttttccaaaaatacacatgttcctcataattgttgttcatgaagttagccaccgtcccagaaagtggcgtctcagactctggagtcccagactccttagatttggaggaactcactttcaaaaggcacctgcctgaggcttttaactggatccatttcagttaattatcagatctgatttgctcctggacccagtcctacttgacccagtctaagaattgttcaaataaacttggagaacacaaaacacaaattcctgaagcttggaatctgagatagaactcacccatgacctccagttgctacaagagaacaattggcacagtgtgccctgtcaggtacccttacttggtcactaaatgctcctgagggtcactggagttctacttccgatcccacttctgacaccaatctgttaaaagaaaagctttaggccgggcacggtggctcacgcctgttatcccagcactttgggaggccgaggtgggtggatcacctgaggtcaggagttcaagaccagcctggcctacatggtgaaaccccatctctactaaaaatacaaaaattagtcaggcatggtggtgggcgcctgtagtccaagctactcaggaggctaaggcaggagaattgcttgaagctgggaggtggtggttgcagtgaaccgagatcacgccattacactccagcgtgggggccaagagcgagactgtctcaaaaaaaaaaaaaaaaaaagaaaaagaaaaagaaaaaggaaaagctttagacaaatttagcagagcttatttgaaaaaataagcaattcatgaattcagcagcatgctaaactagtaaagactcggctgggcgtggtggctcacacctgtaatcccagcactttgggaggctgaggcaggcagatcacctgaggtcaggagttcaagaccaccctggctaatatgatgaaaccccatttctactaaaaatacaaaaaaattagctgggcgtggaggcacacacctgtaatcccagctactcaggaggctgaggcaggagaatggcttgaacctgggaggcagaggttgcagtgagccaagatcacaccattgcactccagcctgggcaacaagagtgaaacgccatctcaaaagaaaaaaaaaaaaaacctaaaccagtaaaggctcaaagaactccacctaaccatgtggtcaagtagtacttacagagagaaaaaaagtgacacatagaaatagcctatttagaactcggcatttgctttatctggacaggtctaagcactttgcagtctgcgattggctgaaagctcagttgcaatgattggctgagactcagctacttgttacaagaaactctcatgttaggtttgtttacatattaagttgggtttcagttcactatgtaaggaggcagcttaaggccaaatttaatctaatttaacacctccagcttgaaagacaaaaccaaaccaaatcaaccaagaaacagaaaaaagaaaattcaaagatgtatgagcatgcataactttgataaaaataaaaataataattatttgaattggcaattagaaaatagttatatcctcaggtaacagatgtctctaggtggatgagattgtgggtggtttttcttgttgttgatattttctgtgcatctctaaaaaacatctaatgctttgcaaagaacataagaaacagattagtacattagtggccttggaggaaacaatctcagtaaaacatgtgtttattaatgaatgtattcccccatccctttccaaaaaagttcataggtgtagttatagtcaaaggtaagaggcagtcttgtcagagccagtaaagtaaccaaccatcctggtttgcccaagaccaagcagcttcccaagacactagactttcagtgctaaaaccagagaagtcccatccatactaggagagttgatcactctagtctgtgtaatttgcaaagactctccatatcctttggttcctgtgagtctcaaatccacccagtgaggtacaggtgggccggtggatggtcacctccatttcagaagagaggcagctaaggctcagggaatctccctatccctgacccgggaaaggccttaagagaaagtggtcttttaaactgtgtgtatatatcactttgataaaattaaaaattagttttaaagaagagagagggccaggcgcagtggctcacgcctgtaatcccagcactttcggaggccgaggcgggcaggtcgtaaggtcaagagatcgagaccatcctggctaacacaggtgaaactccatctctattaaaaatacaaaaaaaaaaaaattagccgggcgtagtggtgggcacctgtagtcccagctactccagaggctgaggcaggagaatggcgtgaacctgggaggcggagttttcagtgagccgagattgcgccactgcactccagcctgggcgacagagtgagactccatctcaaaaaaaaaaaaaaaaaaaagagtgagggccaggcgcagccgtcacgcctgtaatcccagcactttcggaggccgatgcgggcagatcacgaggtcaagagatcgagaccatcctggccaacatggtgaaaccccgtctctactaaaaatacaaaaattagccaggcgtggtggtgggcgcctgtagtcccagctactcaggaggctgaggcaggagaatcgcttgaacccgggaggcagaggttgcagtgagccaagatggcaacactgcactccagcctggcaacagagtgagactctgtctcaaaaaaaaaaaaaaaaacaaaaacaaaaaaaaaagagtgggaatccagaatgatagaaagaaaatgagcctgggagggatgaactgcagaggaccataaggtaacatgggagcagttttgcaggtgtatacaactgtcaaaactcactgattgtacactttaattgggtgcagtttttgttgcccttaaattatgcctcaattagagagaaagagagagaatataaggaaatgggggcagccatggcgtccttggagaattcacacttgggacgacaactgctcatttgtgtactctctcctcctcacctgtcttccactccacccctgtctctgatggaacatctctccagctaagccatcttcctcaaggcagcccaattctctgtggggctgccacagcactaaactgttctctgtgtccccaggactccaacctgtctgtgcacacagaaaacccggacctcactccctgcttccagaactccctgctggcctgggtgccctgcatctacctgtgggtcgccctgccctgctacttgctctacctgcggcaccattgtcgtggctacatcatcctctcccacctgtccaagctcaagatggtcagtggctcagggatctcctaccgatggggctgggccctggggattctgcttttattttttaatttaattaaattaattaattaattaatttagagacagagtctcactctgtcgcccaggctggagtgcagtggcatgatcttggctcactgcaacctctgccttctgggttcaagcgattctcctgcctcagcctcctgagtagctgggattacaggcatgcgccaccacacccagctaatttttgtatttttagtagagatggggttttgccattttggcaggctggtctccaactcctgacctcaggtgatcagcctcccaaagtgctgggattagaggcatgagccactgtgcccagccagcattctggttttaatgaggccctctcccacctcctcggctggactgggttccccagtctcacctgacctgcttggggtcatgggaatctgacaactgagaatatatacagccagctgacatattccccacttgggaaagtttaagtaagttcagcaacactctccccacctccagcaagcttctggtcagctccattcccagacctcagtgccagtcccaggcaggtctagtggattctggtggcttcaggtacaaagaccccttcccagtgaggactgtccttgcctctggggatgcggattccaacctgtgctctcttcgcaggtcctgggtgtcctgctgtggtgcgtctcctgggcggaccttttttactccttccatggcctggtccatggccgggcccctgcccctgttttctttgtcacccccttggtggtgggggtcaccatggtcagtgtggggccctgggaaagtggatgggggaggtctccattgggttgtggactgtgatagggaaactgtgggctctgaggagagggctggacatattgggaatgggaagaagaagggggtggccccagaaacttctggccatgtgggatggggagaaatggaggcaggtccagatgtgtgtgttctgcccgggcctccctgccctccctgcacagctgctggccaccctgctgatacagtatgagcggctgcagggcgtacagtcttcgggggtcctcattatcttctggttcctgtgtgtggtctgcgccatcgtcccattccgctccaagatccttttagccaaggcagaggtaaggttgggggagaggggaacctgccaggtttagccctgataggagggtgacctcagggttcaaagtcactgctgggtcccaggtccctccctcgaggcttcaagtacaaacacaattgtgttgttctccacttgctacatttctacctggaagcaggctgaggagggggcaccagtgtaacacaggaatgagccaagatgccaccactgttggaccatcatgtgagggtagggggctgttccacagcacccacccaccaagtgcaatatctgacgtgggtgtcagtcagtgcctgtgtaatgaacacatgtatgcagacaagtgtgaagagttctggcttacctagaggtcccattagcatgttcccttcctttcttcccacctccctcagttcctggccttcctcttgatcttcagtggctgtgatgttgggctggtgggatggaacactgcaggccaacctagtgcctcccatttctccatctcagcgggaagcaggcaaggagagtagcaaagaacataggctgtgaacaacccacttactccccatgtgggctcgggcgggtcgctgaaacctttggagcctcatttccttaattgcagaaagggcgtcatgagctgtcctgcctgtaggctgatgtcccagttagacaaggtcatgtaggtaaggtgatggcaccacacctggcacaggtgccacacctggtcctcgctgaaccagagctcccttgtgatccttcctcatctctcagagtcctctgagtggggacctggaggcccccaggtgctgcctcctgccccagaggagactgatgccccaagggactccgcagggcaggggctgcaggcccaggcttttccagtgcttctgacgcccctccactctcccacccagggtgagatctcagaccccttccgcttcaccaccttctacatccactttgccctggtactctctgccctcatcttggcctgcttcagggagaaacctccatttttctccgcaaagaatgtcgaccctgtgagtttcccatggagggtgcgggggctccacagctgagtcctcagcccaactctgaccagcagcccccaacccctccagttcctttcaaagtgggagagaggtcatccccacaatctgtaaactggggcttggagcaggaacaagggtcccctccatttccctactctgctttgagagggtggtgggcactcctgattcccccgtcctattctctcgccttctagaacccctaccctgagaccagcgctggctttctctcccgcctgtttttctggtggttcacaaagtgagttggctcttccaccagccaggccagagggaggggagggatggaaggtgagatggagaaaggggagcagggcagcagtttagggaccgggctggccacctatcccaccccccaccgcagtgggcacagggcagatgagggtagggaagtggtctgggagggggaccaaatgcagaggcctggcctggcccagtgccgcccccaggctacaggccagccctgcatctggcaggctgtggggacaggcccaggaggctggaagaagactgtcattagttctgagctcctctgtttgtgataaacttgcagcctgtcatctccttggctgcgcctcagagcggcttgagcaggataactgtgtctgtgacctgggtgacagctcattaaccccacagcactgaggaagcacccgaggctggggccaaattgcccaggcctcgtcctcacccagggccccaggcagcgtggattccatcaccagggcctggggtggggaggagatgggacacctggggaggaggaggagaagggggtagtggtaggaacttcggagggagagccagtgacctcaagcctattcactgaggaaatgaaggagacacctttcatggtcacagtgcccgagggagaccctcctttctggagaccctggggccctggagacactgacccttggctccaggctgctaaaccctgaccctctgcggggctgcctgccgggcttcacctccccccaggatggccatctatggctaccggcatcccctggaggagaaggacctctggtccctaaaggaagaggacagatcccagatggtggtgcagcagctgctggaggcatggaggaagcaggaaaagcagacggcacggtgaggccctccccttgccccaacacccagccccttcgcttaccccagatctcctgcagaggacgctggtagaccttggagggcggcattgctggggtggcaagcagagcaggaccaggtgatttcttggcagcctcgggaccattctatgggaagcttaggcctggatggcgctagttctcccagctctggtgggggcaggagaatggctggcactttggagcaactactccatcccaggtcccatcctaaggatataaataaactcacttaatttttcaacagccctaaagggtaggttcaagtgtccctgtgttacagatggggacactggggccgggtgtggtggctcacagctgtaatcctaacactttgagatgccaaggcaggaggattgcttgagtccaagagttcaagaccagcctgggcaatatagtgagaccttgtctctacaaaaaataaacaagatgagccgggcatggtggtgtgcacctgtagtcccagctacttgagaggctgaggtgggaggatcatttgagcccaagaggtcaaggctatagtgagctgagattgtgccactgtactccagtctgggcaatagagtgagaccttttctcaacaacaacaaaaacagatggagacaccgaagcacagaaatttaacagagggcctcccagggtccccaagttggtggtggcagagctggaatccacatggagccggctggccccagaggttctcctcatatcactgcaccaccctgcctgactgagagggctgattccagggccaggagccagcacacccctgccaattctgcctcctcctgtctggaggcggcggctgaatgagatgatcttcccctgaggggtcttcccactgtcagcctcttatcaaggaccacaaacctgtctctggccaactgcctcaccaagagagctgacgctgagcatcatctttctccacccaattctgaccccaggattgaaccctccctcctcccatccacaatccaggcctaggagttcaatgtttgctcagcccggagcttccggttgtcaccagctgttggaggagcctggggctgggcatggttagcagtatcctggctttcatggcttggagcctccacgaagacctatgggcccccagtctgcctgctgcaccccctctcagtccctccatgccactccaccccctccctgttcagctgcccggtggctgtaccaacagccatccttgatcttatctaccttccctcttggcgtcctccctggagccagcactggggaggcggggagagggccagactggggggatagctgggttttagagtccttgtggtagcagtctggccaccccttcagatgccctctggcagctgaggacagagtcgcttgtgcaattcttatgctgtctgttcccctcccagctctgagagccaagaaaacagctccttcctcctcctcactcctagccagcccagcctagcccttggcttcctggagcccctgtccccattcctaacccactgctccttcctccctggaccagacacaaggcttcagcagcacctgggaaaaatgcctccggcgaggacgaggtgctgctgggtgcccggcccaggccccggaagccctccttcctgaaggccctgctggccaccttcggctccagcttcctcatcagtgcctgcttcaagcttatccaggacctgctctccttcatcaatccacagctgctcaggtctctccacactccggctcactatagccctgccctgggcagcagggctggctggctagcccagaggaaggaacaacgtacagtgaaaagaaccccagaccaggaaccagggaggctagctccactttctgtgtgacctttggcaagtggcattgcctgacttgtttcctcactcacattcaacttagaattgctgtgcatatactatgtgccgggcaccgtggtgtgtacgttaacaagcattgggtctttaaatcttcccaacaatcctatgcggaattgccccattcccatgtcacagatgagaaagcaggaactcagagaggtgaagtgacttggccaagggcacacagcaaagaaggaatcaggtctgagtccaggactctgagctccgactgaggtgctctgtccccaccatcaggctctaacatctgtctcaggaatggcttggactagaacgagctctcaaatgagagggtgggaaggagagctgcctagtagctaagtccccacctccttgcccctccgtgcatgcattaatttgttcagcaaacatttattgaacctccagggtaccagaatggtgctcgatactagggatacagagttcaataagacagggtcttgatgtcttatgggagaaaccagcgtgtaaatcaattagaattcagtgggggcagaagtgttctcgggtgtctggaaaaccccgggaggggcaaagaagccagcctgggatgcagcaggaagcacccactggcttgggaggtcaacgaatttggagagacaagtaggtgaagaaacaggggaaagttcagcctcagcttagtcacaaagccctgaaacagcatgactcaggtgtttctgagtggcagaggaaatggcaacgagagggaggggcaggaaaacagagagagggagagctaaggatatccttgaaagatctgagccagggaggggcatctggcttcaaggatctcctgccaggagtgtgggggatgtagggcagggtggctggatggaagtgggccaacccggtcagatggagtccaggccaggaatgagacaagtattcaggagcaatttgggagatgggcgtgtgcgccagagagacagaggagtgccaggcaacctgggtgctggcctgggtaactggaggacgatggatcttttgctgagctgatgggctcggtgggaggaggaggctgggtggggggcaaggtggtggatggagtctggtcatgtggggccagtggtgctggtgggtcctccaaggggagattcccagctagctggaagtcaaactctcgagcccaagagtttgagaccagcctgagcaacatagcaagaccctgtctctacaaaaaagttaagatattagccaggcctggtggcatacgcctagagtcctagctactcaagaggctgaggtgggaagactgcctgagcctgagaggttgaggctgccgtgagctgtgatggcaccaccgcactccagtctaggtgacagagagagaccctgtctcaaaaaaaaaaaaaaaaaaaaagagagagagagacaccagtcactgggctggggccactggggcccaccctactccaatatgacctcaccaaatgaggccacgttcacaggtaccaggtgttgggagctgaacatatctttctgggagacacaacttaagctatcacagaaggggaggcctggctatgattatggctggagggctccatgtagtcgagaggagagtgtcccaacaatgaagagactcggtcatgtcaataggtgaaggtgtagagcttccagcagaggtggccagggtgaagctcagcggcaaagggggcaacagcgcagcaagttcctgaggaggcagaggaaggccagggctcgggggcaggggcagcctccgacagcctgagcaccagaaaaaggaggacaagccactggagggcagtttgtgagtggcaaggagtttgtgggtggcagggagttctcaatgggtggctaagcaagaaggcaggtagctgctgagaggggtggggggctgggatgggcctgaagggaagagaagagaggtgaagaaggccccaagagcgggggcggattagggacctagagaaggttgctaggcagtgctgggggccactgagtttggaaaggtggatttgagcggcaagagtctttgtggtcatgtggcggaatctagagcccccagcagcctaggagaaggagcagggaagtccagtcaatggaaacgtggcatttcttcccgccatatgtcaggaggtaagaaggcaggcaggtgaggctggtggtgagagcgtcatcgatagggcgtgcagcagggtccatggtggatagagaacgaggtgaaggcagagtggagccaggaggtcgtggtcttgaggcagtactgggttgaccctccctggcccaagaggttggagggggtggaggtttcagaggccaggggtgcagtggagactgcgggtaaaagcaaagggcagcagaggagggagcagccatgggggcagcactgcccacctcactcctctctcctccccacagcatcctgatcaggtttatctccaaccccatggccccctcctggtggggcttcctggtggctgggctgatgttcctgtgctccatgatgcagtcgctgatcttacaacactattaccactacatctttgtgactggggtgaagtttcgtactgggatcatgggtgtcatctacaggaaggtcagctggagcagggcccaggggaaaggctggccctgggcagcttgcaagaggctcgcagccaagtccacccactactgtctacctgcaggctctggttatcaccaactcagtcaaacgtgcgtccactgtgggggaaattgtcaacctcatgtcagtggatgcccagcgcttcatggaccttgcccccttcctcaatctgctgtggtcagcacccctgcagatcatcctggcgatctacttcctctggcaggtgactctccaaccctgacctctgcctccttcctctgacatgctgcagaagtggcaagagaggattattctggaactgggagcatggcacatgcttgtagtcccagctgctcaggcggctgaggcaagaggatcacttgagcccaagagttctggctgcagtgcgccacgattgtgcctgcgaatagccaccacactccagcctgggcaacatagcaagaccttgtctctaaaaagaaacaaagaaaacagaaaaaaagaaggagggttattctgggttagcagaggggatatagaattgacacaagagctggctgggcacggtggctcacgcctgtaatcccagcattttgggagaccaaggcgggtggatcacgaggtcaggagttcgagaccagcccggccaggatggtgaaaccccatctctactaaaaatacaaaaattagccagacgtggtggcgggtgcctgtagtcacagctactcaggaggctgaggcaggagaatcgcttgaacccaggaggcagaggttgcagtgagccgagatcataccactgcactctagcctgggtgacagagcaagactctgtctcaaaaaaaaaaaaaaaaaaaaaaaaagaattgacacaagagcttccctaggcattggtggggatggagggataggacttcgaggatgctgatgtctgcaaaggaatcttcccaacatctgttgctatccttcctgcagaagccagggaggaaagaaagtcttggagggaggtgggtgtgactctggctgtcatcgtctatatttgccttcctgtgtgtctggacacccttctatatctgctgtctgtccctgtcgtcgttatctaatggctggctgcttctacaaatgttgtggtcattctgactttctatctgtttggccaaccaccatcttttgcttcctgcccatctacacatttcaagttaacaggcctctgtttgcctgttgggttctctctgtagactttggtaatctgtccctatgtgtcatctatccaccggtgcctcctcagaacctaggtccctctgtcctggctggagtcgctttcatggtcttgctgattccactcaacggagctgtggccgtgaagatgcgcgccttccaggtaggtgctgtcagaggtgcatcctcctgcctgcagcacccggccggctgcctgggggaaggtgtccactaaccttggggcctcccaactaccttgcttcctgagtatggatggctactagccatttgcagaaaccatagctcactcttccctcacagctctcagagggttttactgacattctcattttgtagcagaagaccaacgcttagagaaataatggcagtccagaatcaggcagggctgggactcaaacctgactatcctggtctaacaaggagttttcccgctgcactgtgctaagcatgaatagccagtcactcagtctactatttgcaaacatttcttgaagtgttttttttctttttttttttttttgagacagggtctcgttctgtcacccatgctggaatgcagtggcatgatctcggctcactgcaacctctgcctcccgggttcaagcgatcttcctgcctcagcctccctagtagctgggactacaggcacatgccaccacacccggcttatttttgtatttttttttttagtagagatggggtttcaccatgttggccaggctggtctcaaactcctgacctcaggtgatccgttcatcttagcctcccaaagtgctgggattacaggtgtgagccatcacacctggcctattgaagtctactagcttcccactgcccataggaaaaatgacaaaccccctaagaagactcagcaggcttctgcttaccttgcaagtcctcaccccctgcggactggccaagtttcagccagtctggtcttctttcttttctccacagcaccaagctcagggtacctctaggggccaccacatatactattccctctgcctggaatgcttgtcatccccctcttgcctgcctaactcctttccttcccttacctctcggcattgaagtcacttcctcggctgggcacggtggctcatgcctgtaatcccagagctttgggaggccgaggcaggtggatcacctgaggttgggagatcgagaccagccagaccaacatggagaaaccccgtctctactaaaaatacaaaattagccgggcatggtggcacatgcctgtaatcccagctactctggagtctgaggcaggagaatcccttgaatccaggaggcagaggttgcggtgagccaagatcgcgccattgcactcccacctgggcaacaagagcgaaactccgtctcaaaaaaaaaagtcacttcctccagaagtccaccctgactgcccagtctcagtctaagttagtttccctgccatcacctcattactttcttacaggatcctgtgatttcccatcagaacacacataatgattaataattaagcatttattcagatcattgtttgcttattgtatgcctcccccatcagatcgtcagctgtatcatggcaggggccttgtctgaattcatcgtgacaaattctacacgtagcccatggcctggcacatagtaggcactccataaataggggttgaatgaatacattaatctggtgtgccacaccttgggctaaggtcttggagaacaaagagaaataaatagtccatcccctcaggaagctcacagtctgattagagaaacatatatgtaaaggaatggttatggaacaaaaggaaagtgcaatgtgctttagaaacccagggaaggggaccaggtgtggtggctcacacctgtaatcccagcacttggggaggccaaggtgggaggatcacatgaggccaggagtttgaaatcagcctgggcaacagagtgagacctcgtccctacaaaaaaatttaaaaattagctgggcatggttgttcatgcctgtagttccagctagtcaggaggctgagacaggaggatcaaaggagcccaggagtttgaggctgcagtgagctatgattgtaccactgcagtccagcctgggcaacacagtgaggcaccatctctaaaataaataatactagcaataataataagaagaagaaaaagaagtagtaggagaagaaacccagggcaggggacagaggatgctgcctggggaggccggtgcagtggcactgagggtggagatggatcttgtcaggcagaggacacagggaggcaggggctgtgcattccaggccaaggcacagcacaggcccagcaaggagttgtgagaaggaatggtgggcagcgtggaatggctgcaatggatgagaatggatggaaggtaggaccctgtgagcaggaggtcaggggagggagcaggtgtgccactgacactctttctgcctgcacaggtaaagcaaatgaaattgaaggactcgcgcatcaagctgatgagtgagatcctgaacggcatcaaggtgctgaagctgtacgcctgggagcccagcttcctgaagcaggtggagggcatcaggcagggtgagctccagctgctgcgcacggcggcctacctccacaccacaaccaccttcacctggatgtgcagccccttcctggtgaggcttggcacagggctgggtccctgcctccagggctctgggtgcccaggcatggccagggctcattggactctaccctgacaccacctccacgctgctcaggtgaccctgatcaccctctgggtgtacgtgtacgtggacccaaacaatgtgctggacgccgagaaggcctttgtgtctgtgtccttgtttaatatcttaagacttcccctcaacatgctgccccagttaatcagcaacctgactcaggtaaccctgggtagggctgggggctctactggagttggaacaggttgttggggtcagggaagggtcacttagggcaagggataatcagggggagttattggattcagggaaggttgctagcattatgaagagctattcaaggttgaatgaggtcattaaggtcaggggtcatttggagtcacaggtggtcaggtcgggtgtctggaaacctgagttctgtagatagcctcctcttaccaacctggactttctctttgggcagtgggagccatggaagactcagtcgtgggagggaccccagtgctagtgtctgggccctcagggggtcctgcctagcccaggatgctggggatggggcgagggtaggggttgggggttgggaaagtacagtctctagggctgactcacatcctcccgtaggccagtgtgtctctgaaacggatccagcaattcctgagccaagaggaacttgacccccagagtgtggaaagaaagaccatctccccaggtctagagagcccctacctgggctgcctgccccagtccttgctccagaaaaacctctgtttcaagcttttcctttgttctctcctgaccccttttcttcttcctctgttcacatctgcttcgactctgacctcctccctcttccgggttctctgctctcctccgccctcctccacagggctccccacatccctttcttcctcccttttcccaaggatcccctccccatggcccaggctcctcccctgtcctcctttcccctgccccccagcctccctgcaggctaccccatcccttgagctccctccctgaccctgcccaccttggtcctctcaggctatgccatcaccatacacagtggcaccttcacctgggcccaggacctgccccccactctgcacaggtaccagcttctcccactcccttcccagctgcccacggtgggctggaagttcagatcaatagcagcaccctgcaaagcctttgaccaagaatgcaggaagagcttcagcctgccaggggggtgtctggaagggcggagggcttggttctgcaggtggagggttggagaccaaaaccctgatccctgcctctaactggactcctggggtccttgcccccagcctagacatccaggtcccgaaaggggcactggtggccgtggtggggcctgtgggctgtgggaagtcctccctggtgtctgccctgctgggagagatggagaagctagaaggcaaagtgcacatgaaggtgagagaggcaggggctcctgggcagggtgtggggctcagccaggccttgggcaagccccgaggtaaatttctcctgtggccagggctccgtggcctatgtgccccagcaggcatggatccagaactgcactcttcaggaaaacgtgcttttcggcaaagccctgaaccccaagcgctaccagcagactctggaggcctgtgccttgctagctgacctggagatgctgcctggtggggatcagacagagattggagagaaggtacagagtcctcttccatccctaagaggctagggcatagagctgcccacctcaacccagcccaggtccatatattcatcccttcattcacacattggtgtaacgttatgcccaactctgtgccaggcactggggaaacagatctattagcagatctgtttagtgaacaagtaggaactattgaatattctaggagccaggctgaaggcctgtgcagggtacagggagggcacagcagggagcctacataaggaagagcatcactttttttttttctttctttctgagataaggcctcactctgttgcccaggatggagtgccatggtgacatcatgggacgctgcagcttggaactcctgggctcaagtgatcctctcgcctcagcctcctgagtatctgggaccacaggcacatgccaccatacccagctaaatttttaattttttttagagacagcgtcttgccatgtcgcccaggctggctcaggagatcctcccaccctggcctcccagagtactgggattacaggcatgagctgctgcacctggctgagcatcactttttttttttagacagagccttgctctgtcacccaggctggagtgcagtggcgcagatcatggctcactgcaacctccacctcccgggttcaagcaattctcgtgtctcagccacccgagtagctgggattacgggtgcgcaccaccacacttggctaatttttgtgtttttagtacagacggggttttgccatgttggcccatctggtcttgaactcctggcttcaagtgatccccccgcctcagcctctcaaagtgctgggattacaggcatgagcaccgtgcctagccttaagcatcacttttgacctcagttttaacaactgaggaggaggagctcatcatgtatctgttcattcatttaccatatatttattaagcacccactctattctgggaaatagtatacagtagtgaatactaaaatgccgggctaatatctctaccttcatatagctcacattctagtggcaggaagagataataagtaagataaataagtacaatatataatatgttagataaatgctcagtggaaaaaataaagcggggaaggaatacaggaatgcctgcagagttgaatggttaaggtagcttgggaaatcctcactgagaatcagagaactcaacaaagagaccgagtgagccttgtctggagccagaaagctctgtctggggccatggaaccctgtatggggtcttggagttctctggcatgactaggagttgggaaatggagggaaaagatagagagaggcagaaccctgattaccttggttaagattttggcctttactctaaaaaacatggaacactggggaaaatttggggctttgctttttaacaatttttaactgtggtaaaaaccacacataacataaaatatatcatcttgcccggcatggtggctcccagcactctgggaggctgaggcaggtgtatcatttgaggtaaggagttcaaggccagccttgctaacatgataaaaccccatctctactagaaatacaaacaaattagccgagtgtgatggcgtgtgcctgtagtcccagctactcaggaggctgaggcaggagcattgcgtaagcccaggaggcggaggttgcaatgaactgagattgattgtatcactgcattccagcctgggcgacagagcaagactctgtcttaaaaaaaaaaaaaagaaaaaaaaacttaatcatttcttagtgtacagttcagcaatgttaagtacatttacattgctgtgcaaccgatctccagaaccttttcatcttgcaaaactaaaattgtgcctattaagcaactcctcattccccactgcccctaggccccagtaaccaccattctattttctgttcctaggaatttgactacttagtatcttagtccattttctattgcttataagagaatgcctgaaactaggtaatttataaagaaaagaaatgtattttgtacagttacggaggctgaagagtccacggtccaggggctgcatctggagagggcctccttgttggcggggagtctgcagagtcccaaggccatacagggcatcccatggcaaggggaccgagcatgctagctcaggtctctcttccttccttccttttttttttttttttttttttttttttttgagacaaggcttcactctgttgcccagactgtagattggagtacagcggcgtgatcttggctcactgcaacctccgcctcccaggttcaaacgattctccttcctcagcctcccgaatagctgggattacaggcgcacgcaactacagcccgactaatttttgtatttttagtagagatgggtttcaccatattggccatgctggtcttgaactcctgacttcaaatgatccacccacctcgacctcccaaattgctgggattacaggcatgagccaccacgcgcgacctcaggtttctctttctttcttataaagccaccggtcccactcccccagtaacccattcacgcatcaacctattaatccataaatggatcaaccattcatgagggctctgttttcatgacctaatcacctggtaaatgccacccctcaatcctgccacactggggggtaagtttcaacatgcactttggaaggaacaaatatttcaaccatatcacctaggtacctcacgtaagtggaatcatccagcatttgtcttttcgtgacgggcttatttcacttagcataatgtcctcaaggcatatccatgttgtagcatgtgtcagaatttccctccttgtaaggctgaatgatatttcattataggtatatacacatttgtgtgcccatttatccgtagatgggttgggcaggacaccaagctgggcagggtggtgaccaatggagcagaatggcctcacctgccccaggaggacttaccctttacctctgtccctcacagcattgcagggacagactaggccccatgtgaaatatagattcagaagactgctgttctggtcaggcacagtggctcacacctgtaatcccagcactttactttgggaggctgacgtgggccaattgcttgagctcaggagttggagaccaggctgggcaacatatggagattctgtctctataaaaaataaaacattttagtcagtagccaggcatggtggtcctgcaatcaatcctagctactcgggaggctgaggcatgagaattgctcaaacgcgagaggcagaggttgcagtgagccaagatcgcaccactgcactccagcctgggtgagtgagaccccatctcaggaaaaaaaaaaaaaaatctgccatcccaaataacagtggacaggccgttgtctccctgtgcctgtctgaccccatttttcccaccccccgcctccctccagggcattaacctgtctgggggccagcggcagcgggtcagtctggctcgagctgtttacagtgatgccgatattttcttgctggatgacccactgtccgcggtggactctcatgtggccaagcacatctttgaccacgtcatcgggccagaaggcgtgctggcaggcaaggtgaggcctgccagaggctaagggggctaaggtgagatctgaggcccgaagagagagctggtgagaggctgaggggtttggatgagacttggaggtgtggggggcgcaagaagtgggcatgtgggttgggcatcaggagaaacctgtggggacaactcccccacctgcgaggttctgagcaggctgtggcgagcacagggtgagtcacccatgtgcctgtccaagctccctggcacatgggcacacttcacactcactctgtggctccgtgcctgtgccaggggtgtgctggagggtggtaggggtgagagcctgctgccttctccccagacgcgagtgctggtgacgcacggcattagcttcctgccccagacagacttcatcattgtgctagctgatggacaggtgtctgagatgggcccgtacccagccctgctgcagcgcaacggctcctttgccaactttctctgcaactatgcccccgatgaggaccaagggcacctggaggacagctggaccggtatctgccatcctgggccctctgattcccatgccttcccagcattccccctgtctggggtctctgagtgtgtctagactggcctagtgttgtgccaggcaggttctgggaaacttgggccatctgtgtgacagtcaccagaggtaaagtaaactggacatagtcgggtcccactgcctcctccatcctactctaccctaactgtgggaactcagatcctccgccccggtctcagagcctgttttctttctttctttctttctttctttctttctttctttctttctttctttctttctttctttctttctttctttctttctctctctctctctctctctctctctctctctctctctctctctctctctctctctctttctttctttctttctttctttctttctttctttcttttttttcttttgaggcagagtctggctctgtcgccgggctggagtgcagtggtacaatctcagctcactgcaacctctgcctcccaggttcaagtgattctcctgcctcaggctcccgagtagctgggactacaggcatgcgccaccacgcctggctaatttttgtatttttagtacagacatggtttcaccatgttggccaggatggtctcgatctcttgacctcgtgatctgcctgcctcggcctcccaaagtgctgggattacaggtgtgagccaccttgcccgatctcagagcctgttttccatctgttgaaagcataggagggcccaggcccagcttgtgtggcaaggctgcttcatggataaatagtttggcaagtatgcaagtgcttagcaaagccgcttatttatcaaccaaaatttattggacaatcactatatacaggcactgttccagacactaagctatagcagtgagcaaacaaaaaaattatagtcctcatggagcttgttgacgtctctgggctcacaacatgcccctggctccttgttgcccagacccagctccccagcccccaattctggattggctcacagaccttttcctgggctttcttgcctatggctatacatacagccaacgtgccttgagcatttaccaagtgctgtgcccctcgctcacacactggacacattttcttttaagcctacagtcatgcagattttttttttttttttttggggacagtttctcactctgttgcccaggctggagtgcaacggtgcgatcttggctcactgcaacctttgcctcctgggttcaagcgattctcctgcctcagcctcccgagtagccaggattataggtgcccgccaccacgcccggctaatttttgtatttttagtagagacggggtttcaccatgttggccaggctggtctcgatctcctgacctcgtgagctgcctgcctcagcctcccaaagtgctgggattacaggcgtgagccaccatgcccgaccaaggacgtgagttttaagctcagccagtctaactccagagcccaagttcctaacccttgtatttgagtccgtttctccataatttgtgaagagagtttttcttgttgcttaacccaagtctttcttgttgccctttcaatccccctcattttattttcatgcttgtccattgaacccctttcattagagtggggaatgggagataccaggggcttgcagggagaactagctgaaccctatctccttcctcccaccctactgcagcgttggaaggtgcagaggataaggaggcactgctgattgaagacacactcagcaaccacacggatctgacagacaatgatccagtcacctatgtggtccagaagcagtttatgaggtgagttcctgagagctcccagccctcccggaggctgtatcaggcctccccaggccctgccagatggggtgcaggtttctccctgacactcccagcctctgtcctggggggtgcttgaggccccctccctgggcctgaccagctgcctccacagacagctgagtgccctgtcctcagatggggagggacagggtcggcctgtaccccggaggcacctgggtccatcagagaaggtgcaggtgacagaggcgaaggcagatggggcactgacccaggaggagaaagcagccattggcactgtgagtcggtggggcaagaggggctggaggggatggacaggcaggccccagcagccccagggtttatggagtcccctgtccctgactgccatggctgctccctacaggtggagctcagtgtgttctgggattatgccaaggccgtggggctctgtaccacgctggccatctgtctcctgtatgtgggtcaaagtgcggctgccattggagccaatgtgtggctcagtgcctggacaaatgatgccatggcagacagtagacagaacaacacttccctgaggctgggcgtctatgctgctttaggaattctgcaaggtgagcttgtgggggtgtccagaaggggctccaatatcccttcttctctgggctgccaggccccccaaaccgtgcccttgcatccaagcctccctaacccactctggtcaacccgtgtctctgattctgcccctttgtgcccgctcactagtccaggtgagccagcgccctctgccttctccaacagggttcttggtgatgctggcagccatggccatggcagcgggtggcatccaggctgcccgtgtgttgcaccaggcactgctgcacaacaagatacgctcgccacagtccttctttgacaccacaccatcaggccgcatcctgaactgcttctccaaggacatctatgtcgttgatgaggttctggcccctgtcatcctcatgctgctcaattccttcttcaacgccatctccactcttgtggtcatcatggccagcacgccgctcttcactgtggtcatcctgcccctggctgtgctctacaccttagtgcaggtgtggggtgggcgtgattccagtgtgggcgtggtgttattggggcggggcaacacatgggcgggggcagcaggggtgggacacttcaggccaccaacattacagagttttgttaggggcagtcgttgcttaacatttatgttaggggagccattacttaacctctttgaaactcatttgcctcacctgtaaaatagaatgactcatagaccttcctcatggagttggtgagagaataaaatgaaatagttatacattgtagctggcactgggactttcctgttggctttttttttttggggggggggggacggaatctcgagtctcgctctgtcgctcaggctggagtgcagctgcacgatctcagctcactgtaacctccgcctcccaggttcaagcaattctgtttcagcctcccaggtagctgggattacaggcatgcgccaccacgcccagctaatttttgtagttttagtagagatggggtttcactatgttggccaggctgctcttgaactcctgacctcaagtgatccgcccacctcggcctcccaaagtgctgggattacaggtgggaaccaccatacccggccttcctgttggctgttttttgataaaacattgtcaacagtttgggacacattatcctttccttccttttatacatatctaaacatacgtgtatgcatgcgtttaacatagatgagttgataaccttcagatacagctaactgtaaaaggcctttgcagacactgaactcctgttctgtaatgaattagtcagttcccggggatagatgctcaacacctgggtatagcgaccatgatctaggctgtgctctgtgctgggctaggggagaatcagatagacatcctgtatagcctggatatctgaggccacagaggagaggatggaaactggaggcagagccgtgttgttgtggggttgaagcagagatgatcagagggagggagtgaatgacacatcaaggccccaagtcttgggtccttggaggtgggggaaggcagcgatgtctcgtggtgggagtgaggctggctgggaggactcatctgaaaatggatgagttcagagacaggcaggactgagttgggggttccatggccctgaccccaaactccttctccctccatcagcgcttctatgcagccacatcacggcaactgaagcggctggaatcagtcagccgctcacctatctactcccacttttcggagacagtgactggtgccagtgtcatccgggcctacaaccgcagccgggattttgagatcatcagtgatactaaggtggatgccaaccagagaagctgctacccctacatcatctccaaccggtcagaagccgcctccctcgctccctgctcctccaggaattcccagcaggctctctggtgttcagggtccttgtccctcctttcccctaagcagaaaactggccctgccctgcccctgccccatttcctcctcatctgatcccccataggtggctgagcatcggagtggagttcgtggggaactgcgtggtgctctttgctgcactatttgccgtcatcgggaggagcagcctgaacccggggctggtgggcctttctgtgtcctactccttgcaggtatgaagggcctggaccccagggcagggccaccactgggacagaaaccacacaggtgttccaggcatctcccgagtgcccctccctgctcagtatgggcaccagccacagggtctgttctcaaggactgtgagaaaaaaaaaaaaagaaaaaaatcattgagttgacaagtttataaccacacaccatggctggatgttcctactttccttccccaagaagcccatgttctcacattcagaaagaattctgttgaataatctctgtcctcaaaccccacatctctctcctgctcagccgtcgaccttgcctgacacctcacagttcaactggagagacccccatcagcaggagattgtgctgcaggctgagcaggtctttgtggctggagaaacaaaatgttttaaaagcccagaagagggactgggtgcagtggctcacacctaatcccagcactttgggaggcggaggtgggcggatcacctgaggccaggagctccagaacagcctggccaacatggtgaaaccctatctctacttaaatacaaaaattagccagccgtggtggcgggcatctgtaatcccagctactcaggaggctgaggcaggagaatagcttgaacctgggaggcagaggttgcagtgagccaagatcacgccactgcactccagcctgggtgacagagcgagactccatctcaagagagaaaaaaaaaaagtccagaggagttttcttgctttggggtgttgtagaaatgatcttggagcttagccccaaaggacaaacagaatttctcttgtctctgggcaagttgtaggctcatgtgacaggtcaggacagtgtagggctggcataccgctcgctcacgttcacatgcttgcagagaacgtacacagacgaggtgactgaagcctggtctgcaggtcaggcaggtcatcctgatgccagcttgtactgtcaaagagtcacctaactgcaaacggaatttttgtaaagcagatcacattgttaatacctcaggtggctcaaaccttgaacgcgttggcaaacaaaaaacaatccagaaaggtcaattttcacaaaggtcagtgtgcacatgaatctacttgttaaaatgtacattttgattcagtagacctaggatggggctcaggactctgcactttgatcaagactccttggtacgcaaagtgtggcccatgggccagttgcatcaccatcctctgggagcttgttagaaatgaagaatctcaggttccaagtcccacctcagactacagaatccggcgttgcattttaacaagattctctgggaagtcttatacatattaaagttggagaaacagaaaccaaggcgaggtggtccttggttaagtctgcactgtcactgcccaagggagtcattcgtgattacagccccagctggcatgcctgtgggcttgatccaggcccacctgggtcatccatgggctaggatcccatggatgggcacatgatccaggagtctgaactcctcccaaagccattacggtggggaggggagatcgccatacgtataacccagtccctttggccaggtgacatttgctctgaactggatgatacgaatgatgtcagatttggaatctaacatcgtggctgtggagagggtcaaggagtactccaagacagagacagaggtgggtactggcatgagcccgggacagggggaatctgaagtagctggggaagaaagcttggtggctctctctccctcaacatcagggcctgccacgtatggggctcttcattcatttacccattcactccttactgagcatcaaccaatgctctatgctaggaggtgtagagagatcagagttgagcaagacggtgtttgcccttaggtgattctgatttggtgggaggggtaagacctattgcagggctttgcagtggatgaccagatctctggcgtggtgcacctggagagggcagatgagggagatccttcagctggggtgaccaggggagacgagcttagatgagaaggatggacaggctttgatagactaagtaagatggtggggtgggcagtgggaaggtgagcattccagccaaagagaccagcctgggcaaaggagtggaggtggggcagcatgccctttgttggggaaaaggagttgttccctactgggggttccagacttttctccaccgccccctctcatggtcacaccttagccctcttcatgcccagaagctgcagcatcagtgtcaagcatcccatctttggcccacgctcctatcctgctcgctctcatgctccaagtcccccactgtcacagcagtctgccttcactgggactcccaatcccatgacccccctttgtgtctctgtccatcagcttctctgccttcacctccctccccggccagcctagagtctatgctccaccaacacaaacgctctcacctgccttgcccttctctttcttctctctcagttgtactcacctccaaaacccaccccagctgagcccaccaatctgccttcttcatgcctgcactgagcacttaaaaccttgcaggaggcggggcacagtgactcatgcctgtaatcccagcactttgggaggccaaggtgggtggatctcttgaggtcgggagttcaaaaccagcctggccaacatggtgaaaccccatctctactaaaaatacaaaaaaatagctgggcgtggtggtgcacacctgtattcccagctacttgggagtccaaggcaggagaatcgcttgaacccaggcggtggaggttgcagtgagccgagattgcgccactgcaccccagcctggataacagagtgagactctgtctaaaaaaaaaaaaagcttgcaggagaaaaatcactgagttgacaagtttataaccacacaccacggctgcatgttcctgctttgcttccccaagaagcccatgttctcacgttcagaaagaattctgttgaataatctctgtcctcaaaccccacatctccctcctgctcagccatcgaccttgcctgacacctccataaaaagtaggttctaagacgtgaactccctcaaccttcctgcctctcagtctttaaacccgcctgtgtctccttcaccgttgtctccttttcacttttagcaggaatcatccctttctgtttcaaagcccagcccctccatttcttctcatggccgcttgaggacctggcttcctcagtcccgccctccatctcctgtcattcttgctccctctgttggacgcttcccatccacatgcaaaaatattccatcacatcttccattccagacacacacgcaaaccctcccccctgcactccactgccccatttctctgctctcctctgtcatgaagcatggtttaaagtatggtctctacaagctgcatccgcttcctcatcagccttgatgtcatctgcctcctgcagtcctctttctggccctcgctccacggagacagctcaccagtgaccttcctggttccaaatccaggggacgcttttctgttctcgtctaattcaacctcttagcaacgtcccaataaaatgacctctcccttcttcttggagtcctcgtggattccgtggcctgcattgcacccgccagtccacctgcctgaccccagcctggcttccccaggcatcaccctctggcccctcacccctcactgtctgggagcttccagttcccctgcttcatgtctagcagcccagttcctgcatggatacccatgctcctgtctctgtatcctataaatgtctgccctcaaccccacggcccgttctctgacgcctccttgagagaccaatctgtgcctgctgctctgctttttcacctctggccgcgtggtttctcctgcctcgaagcagggctggctccacaggaatagtcacagcgtccccactcccggaagaactgcgcgtttagagtaatgctctgccgtcagtgccttgacattctccatcattcttcaacaagaagcctcaggttttcattttgcactgggcctcccaaattatgtagccaatcctatctcaaagccaccatcatcttatgccctgccagtctattctgcttgtagctgccaagagatttaaaaaaaaaaaaaaaaaaaatcaaatcacgtcattcctctgtgtacagccctctaatggctttgcatcttaatcagagttaaaaaaaaaaaaagtccttaaaatggcctgcaaggccctacatgatggagccaccattacctcagcctcttacctcttgcctttgccagtgtgctccagaacacacctagagccatttatgcctgctgttccctctgcctggcatgccctccctccagatatccacttggcttgttccctcacctccttcgggtctttactaaagtctgcctcctccaggaagccttccctgaccaccctgtataaagcagcaacactaagcacttcttggccccagcactcatcacttcttgcgttgtatagatttgcttatctgttgattatatgcctccctctactagaacataaatctcacgagggtgaggactgtttcaatggggtaccattgtgtccccactgcctggcactgggctgccacccagtaacaatgaatgggtaaaggtaatgagagggggagttagggcaggcagggagggcacttcaaggaatataaggtgtggcacagtggctcacacctgtattcccaggactttgggaatcctcctaggcaggaggatccctggaggctaggagttcgagaccagcctggtcaacacagcgagacacagtctcttcagagtttttctttaaaaaattagccaggtgtggtgacacaggcctgtagtcctagctaatcaggaggctgaggcaggaggatggcttgagcccaggaattcaaggttgcattgagctatgattgcaccactgcactccagcctgagtgacagaacaagaacttgtcacagaacaaaacaagttagccaggcatggtggcatgtgcctgttgtagtcctagctactagggaggctgagggaggagaatcgctggaacccaggagttcaaggctgcaatgagccatgattgagaccctgtctctcaaaaattaaaaaaaaaaaaaaaaaggaacatgggcaagcagggagactgggaggggaaggacaggggagtgttggagtaggtctgtggggaataaagtcagagggataaaggagtcattgaacacaaggctgagccacaggggtgccaaggaccctcccagggaccatagttggggaggattgaggggccttgggggagagagaccgaaaggtgaaagagggcttcactgggcagctgatgtgaccccatctgcccctcctgccaggcgccctgggtggtggaaggcagccgccctcccgaaggttggcccccacgtggggaggtggagttccggaattattctgtgcgctaccggccgggcctagacctggtgctgagagacctgagtctgcatgtgcacggtggcgagaaggtacgcgtggggtaggcgggcctgcgtgtgtgttcatgcctgcagacatggccacagcccttgtggggagcttgggtcttttgagagcacaagtgctccagccacatgtttgttcggcctccaggagagtcctggagatgcgcctttgacctctcagcttccccctcagagccccttcccttctccgcccaggtggggatcgtgggccgcactggggctggcaagtcttccatgaccctttgcctgttccgcatcctggaggcggcaaagggtgaaatccgcattgatggcctcaatgtggcagacatcggcctccatgacctgcgctctcagctgaccatcatcccgcaggtaggagcctggcatgggctggccacactcaccaacggccctggaggcaggccccaccttgttctgtagctttaggatggagactgggaccccagtctcagaggcttgggcaggtggggagggacagacagcaggaagcagagccatcagtgagccacccgtcatggatctggaaagctcagacttaccctgcccagtcaggccctgtcctttgacctcctgggccagcacatggggaaggacccctccaagaaccccttcccccgagacattctgccctggtctttttgcgcagctctaattacatttcactttttctgtctcctccggggtattttttgtttctgccgagtggacactttggagtcagattagtggctctggttcctgcttcaacagaggtcttcgtgattggcaaagctgaggtttatcactcccctacaggcaattttctatctctttggccattgtgtcctctggggagctggaaacagagtgggaatgctgccaccttaatccctctcttcttccctggacctggggcctatggctcctcatagggcctaagctgcctccctctgaggccacgttgtatccccaggaccccatcctgttctcggggaccctgcgcatgaacctggaccccttcggcagctactcagaggaggacatttggtgggctttggagctgtcccacctgcacacgtttgtgagctcccagccggcaggcctggacttccagtgctcagagggcggggagaatctcaggtaaacactgggagtgcagaggtcaggaactgcaaccctccctgggaaaccctggcgggtgctgggaaacctgacaccaatgacacagagatgaggccagcccggatgtgcacagggctgtcctttcgtattgagcatattccgtgtgccaggcatggtgtactgccccgccgactcctcacacaagccccagcggtggtccatgatcccacttcaccggtcagggaactgaggctcagagatggtaaagggcttgacctaagttgcacagctgggagaaggcaggtctgggatttgaaccagctctgggagattccaaaaccctttgaggaagccctctcccctccagagctttcttacagccccagattttatgtcctcagccactgggctatgcactggaggggccagtagtcacctcttactgagtctaaaggttggagatacctatacctgtgctagctgtgtgatttggggctagttgcttaacctctctgtgcctacttttctttcactctaaaaggcagataataacagtccaaacctctttgcattatgctgcccaataaaaaacaaagcaagtcatgcatatgaagctaatgtttttttcttatagccacactttttaaaaaggaaaaacaagcaaaataaactgtaatactataacttatttagcccaatatatctaaaatattatttcaacacatcattgatataagtattagaaatattttgcgtttcttcctacaagtttgaaatccagtgtatatttcacatttacagaatgtctcaatttggactagtcacatttcaagtgctaatagccacatggggccagtggctaccacctggacagagcagtgttagggtcagtgtgatgacaggaaaagcgcttcgcttggatgctcctgtaaaatgtcagcttttcccctcctcccttccctccatcttctcctcctcctcctcctcttccctattttcatttttatattcagtccatactcatgcaccctccccagacctcaaaaactaaaacaaggccaggcacagtggctcacgcctgtaatcccagcactttaggaggccaaggcaggtggatcacttgagggcaggagttcaagaccagcctggccaacatggtgaaaccctgtctctgctaaacacaaaaattagctaggcgtgatggcgggcgcctgtaatcccagctattcgagaagccaaggcaggagaatcgcttgaaccctggaggcggaggttgcagtgagccaagatctcaccactgcactctagcctgggtgaccgagcgagacttcgtctcaagaaaaaaaactttacatttgcccagcacttaacaatattcaaagcactctggcctccactttctcctttaatctttaccatggtcctgtgggccagaaacgagcctccacggtttgaaatgatttcctcgcagcagttcagctggtaaggggcagagcggggactctggctctgtcccaaacctttccttgctgtatcacagccacctccctcacctggacaacattccccaaggcccctcattatcccaagggtgggactcccttgccacccacgcagcccttaagactaaatatgcatcttaagtggctctcacttacataaccacgtgggggtggctggcggacaaacatggtctctccagaccctgtgccccatgactgtctcttgcttgatccattcttctcacctgcttgctctcaacacttcccccagagcatgccccaccccgacacatgccgtgatcagagacagaaatcagctcccctcctccctcactgagcttgtagccactttaagtataacctgtgtcctgtgccagttccaccataaatcagccctgagttctatccggcggcttattctgctgccaaaaccttcattagttgcgggaatgggccagggagagagcccggactttactccggctgtggtgactcacgcctttgggaagggctgaggtatttgtccttggatgtggggatgctgtggcctctggttgggaacacagcctcgttttgtctgctggctctggcttccagagcaggaggctgaaggcgtgtgtcctgctcctcctttacctcctcagtgaccagacacaaagagtccccgggtgttcctctgccctgccattttcttgtcccagaagcagagccctggcctgtattccctatggggtgggaggtgactgcctgaattgtgtgatattaggctcagcaagatggcatcgtgtggcctatttgcaaatatccaagaagagccatgcaagtatgttcttactaaggtgtaaatggctgatagagtgaagcagagaaacatcacggcactagctgaaaagcaaggatggggaagaaagcaccgagagaggaggccaagggtgccaagagcagaccagggatttcacaatgccttttagcactggctcattccccaaggcccctcattatcccaatggtgtccagacctctgctccgttctggagggctgggctgtggcagaaatgggagaagtcagacagaaaaccagtcctgggccactgaggagtgaaacaggtctgggaatgaggcccagaggcaggtgggaggcccccagctggaaatgcctgccttctccactcccagcgtgggccagaggcagctcgtgtgcctggcccgagccctgctccgcaagagccgcatcctggttttagacgaggccacagctgccatcgacctggagactgacaacctcatccaggctaccatccgcacccagtttgatacctgcactgtcctgaccatcgcacaccggcttaacactatcatggactacaccaggtgggacacggaaacctgagcaatggggaacctggtggggccacctggggcatcaggaatgggcagggcagattagggttatctgaacaaggcaatgttcctgggattgctagggcatggcaggcagagcagagtttcccaagatctggataaggggcagaccagagtggggtggcctgggctcaggggtggggtatacaatgacattttcatttttcttcttcttcttcttttttttttttgagacagagttttgctctgttgcctaggctggagtgcagtggctcactgcagcctcagcctctcgaagtactgggattacaggcgtgcaccaccacatccggctaatttttgtatttttagtagagacggtttcaccatgttggccaggctggtctcgaactcctgacctcaagtgatccacctgtctcggcctcccaaagtgctgggattacaggcgtgagccactgcgcccagcttcaacaatgacattttctaacacatggggaagggcacactgggctccacaggcactgtctttgtgcacaggccacttgcatcctgcctcctccatgaggcaatgtaaggggaactggaggcttcatgctgagtcccatcacttcctaagaaacctgctggcagagtgcctgcatgtccctcaccttattggtgtctcacagccactctggtcacagatgaagaagcaactcaagtggcagctggaccgtgacagcaccatgaggagctgagccttgtggggagagcactgtgtctggagtcccaggctgctgtgtgaccctgggcaatttgcaaaacctttctgagcctgtttcaaatgaaaatgatgcttcgtgggattgtcgtagtcaatgagggctgggcacagtggctcacacctgtaatctcagcactttgggaggccaaggagggcggatgacttgaggtgaggagttcaagaccagcctggccaacatggagaaaccctgtctctactaaaaacaaaacaaaacaaaacaaaaacaaaaatttgccggatgtggtggtgcatgcctgtaatctcagctactcgggaggctgacagagaattgcttgaactcaggaagcaaagattgcagtgagccaagattacgccaggacactccagtctgagtgacagagtgagacgttgtctcaaaaaaaaaaaaaaatggtggccaacgcggtggctcacacctgtaatcccaggactttgggaggccgaggcaggcagatcatttgaggtcagaagttagagaccagcctggccaacatggtgaaaccctgtctctactaaaaatacaaaaattagcctctcatgtggcaggcacctgtagtcccagctgctcaggaggctgaggcaggagaatcacttgaacccaggaggcagagtttgcgccactgcactctagcctgggtgcagagcgagactctgcctcaaaaaaaagaaaaaagtcaatgaaagatatttaaactgcaggtgatcctgggaaatgacagtgtcctccccagccccttgctctaattcttgcgctaggccctccaaggatgaggggaggggccatgccctcagaagcttgtggcttccttggagaggcagaccactccctcattgtgccagatgtcaaagtgtggtgctggaggtcgaggagagagggctgggtgactcagaagcctcacgggagtgaactggccctggcctggcaggctgtgctccctagaaactagaggggaggaggaggcaggaggctcagacaagtcttctttgaaggagtatagtgggaataccccaacaggccttcactcactcaagaaacacttgcaggacgatggagtgggaagggtgccatggacagggcaatgggtcagaccttgctctcttggaagtgcccccatgcagccagcagtgtcttgggagccaagctgagaatgcctgatgctaccctctgtctgttccatccctctcctaccctcaccccccactcccatttaggaccccactgggagaagggagggtgggcaggaagtgctgagccctgggtttggaggagggacagggctgggctgagaggacctgttcccaggcctaaccaaaactgtttcattcaccagcagccctagggtgaggggcttggatggaccttggaggttgggagttcattcattctagtggaacaggcagaaattaatcaaataatcatgtgtaaatagggcccataggaaggacgcaaaggcctgtgtgtgcaggccagaaaaaggctatccacacagggtggccaggacactttctcctgtaaggaagggatgcaccagccaggcctgaaagaatgagtaagagttggaggatggaggtggggcaataaggtagggagcgagctgaaaattgcaggcaaaggatataacacatgccccaaggcaggagggtacaggaggctggagtgcgtgggagggaggcagtagaaccaagatgggggtggagaacaggccgcactctgctgcactttgaggaccatgggagagcattcagtccttacccaagagcaatcaaaagccgctgaagaccttgattttggagtcagggttgggatcggcgggaggggagggggggcggtggccaggcagtgatgtcacagacacagtccttcccaggacacatctgggagcccagtaggctgagaaccagaatgcagtcagccccctcccatggaggagcacttctccaggctggggagagccccttcccctcctgccgtaccctggtggagccagcccactggccttgtaccaggtgcactcggtgagtggttggtgggagattctaaccctgggctcaggcctagctgtttgtgtgtgagctggagacccaccgagcagcagcagcagcagcagcagccgcagcagccgccaccagatttgcagcccaagccccagattccagtgtcagcctcgctgcagctggtttcctgccgtgtgcttttgtgagccgacacaaagcagatggatgtgcacagagcccagcgcacaggcccatggctccctgcgcacagcctgctgaagtcctgtgaccccggcaaggggaagggctcattagggaaggttttcagagccctgactagcagagatgaataggaccttgtgtttgatcccagaaactgcttcacttgccagaactaacagaatggctaaaataaccagccttgcaagtgtgcacatgtggtgcggtggctgtgttgggtgggttggcatgtcactgtgggcctgagcaagtacccagaagagcaggattagacgatgtgaccaggtcagggctgatggaaacctgaccacttctctcttttttgactagggtcctggtcctggacaaaggagtagtagctgaatttgattctccagccaacctcattgcagctagaggcatcttctacgggatggccagagatgctggacttgcctaaaatatattcctgagatttcctcctggcctttcctggttttcatcaggaaggaaatgacaccaaatatgtccgcagaatggacttgatagcaaacactgggggcaccttaagattttgcacctgtaaagtgccttacagggtaactgtgctgaatgctttagatgaggaaatgatccccaagtggtgaatgacacgcctaaggtcacagctagtttgagccagttagactagtccccggtctcccgattcccaactgagtgttatttgcacactgcactgttttcaaataacgattttatgaaatgacctctgtcctccctctgatttttcatattttctaaagtttcgtttctgttttttaataaaaagctttttcctcctggaacagaagacagctgctgggtcaggccacccctaggaactcagtcctgtactctggggtgctgcctgaatccattaaaaatgggagtactgatgaaataaaactacatggtcaacagtatatacacagtagtctttttgcacttgttcacaaggtttggggattaggatctttggaggaggccaagaggaagactttctacacatgtacatggttgtagttacctgaacttcagacccaagagctcttggctgcaaatattgccttcacagccaaaattccctgggtaattgccagtagctcctgctctgctgtgcagatattgtaaaacggtgagaaaggccctgaaatctgacctggggcctcttgggaaagctgctgtgaacacctccacgttaatgtcatccctcagccctctatgcctgtttctctagggactgagaagtgcatgatgcttttacttccttgctcatttcgaagtctgttccagacagttcctataaccagtgaggcctccaagtcattcattttcctcagtctagccaaagctgaatgtgtgagcacaaagaagccgagaggccacctcctgcccagagagaagccacccacactcccaggttggcagacaagatgtgaggggtgaattaaatttgttttcttgagcaagccaa

SEQ ID NO: 15294 - DNA, 33067 bp, Homo sapiens
gcggaggcggctccggcgcccgctctgcccgccgctgggtccgaccgcgctcgccttccttgcagccgcgcctcggccccatggacgccctgtgcggttccggggagctcggctccaagttctgggtaaggcgcggggctccggggtcactgcgcgggggccagggtcggccggcttcgcccggtccccgccgcctgccttcccgcggggccggcaggtatcccgggacggagcccctgagacggcctgggcgcccgggagggggcgatgggctcgggagggaggttggctgcgccgcccggagccgggtcccacgcggtgtcggggacctgccctgctctgcccttcccggctgcagcactggggagcccgggaaagtgaggaagagtgcgcggctggggcgcaaaggcacagtgcgtggctgggtgagtcggctccatcccagcccctccgtcgggtgcggaaggggcgtttcgcaatcagccgcgggttcctgatggagggtcttccctcagcatctgcctcaggttaggactcggttgcccacctgggcatggattgcccccagggcatccagagcacctgctcaaccaggtgttttgggaggccggctgtgcagtgtcccacccttcttaggaaggtttcctgccaccttcttttctctaggtaagactgaggtctgagagcaggccatccccaccactccggactcagaagggagaagcagaccccagtctggagacaggtgcagggtgtcaggattcctgtagtccaactcccttctcacagatggagaaagggaggcccagagagaggaagggacttgcccaaagttacccagttcaatgaaggcagagctgggatagaaaaacaggctacaggccaggtgcagtggttcacgcctgtaatcccaccctttgggaggcagaggtgggaggatcacttcagcccaggagttttagattactgtgagctatgatcgcaccactgcactgtggcctgggcgaaagagtgagaccctgtctctaaaaaaataaataaataagaaaagaaaatcaagcctttggtgactctcactccaaatctctttctaagacaggctgctcttcagcctgctgactccagcctccagcacagttcaggtgagctaagtgcatacagcctaggagctttcttaccaacttgcaaaacttacttgcctctatgaggcaagtgatcatgtggtctccgttttacagagggagctcagattaaaggtgcttctctgtggtcattaaaggggtgtccagggcttgtgaatcccaatctctaagtcttttcctattttgagtatttgtacatatatgccctttgtgtgtgtacgcacacacgcaggcacgtggggtgttacccaagagttcgtgctgtgcacgtgtgtgcacaggtgtataagtctggagctatgctcttgggctgtgtttagaatgggctgaaggcgttatatggattttttgaaacttggggcaatggaggtaaaaaaaaaaactgtaaaaaggcatatttgggattctctctttttctgtgggtgacccaaaggttaatccgagatggtgcaacttctctgccactgcccttctttcccagtcccacaggaacttcatgtattattcagcatggacaggccacttgccaccagggtccagaggttgtgcctttgcctcatgagcacacttcctttcactgccctttgggccaggctggtatgaccgtggcaggtttgtggtgcctgggatgccaaacagaaaatcaagagggtagttgtgcccaagcttcaggcacaagggctcattgttcctgggtagcctcctgaaccctgagagcttaggactctacagagacaggtctcctggaccccagagttgggaaattcaggactccctttttgtcccatgttcagacatcctctggctctaccttaacatgggattgtggaatccaagaaagtgggagcttgggagtttgaagcagcgagtccaacccctcagtgtagagctggggaaactgaggccaagggagtgaaggtcacaggacaatcaaagacagagtgctgggctgggaaaccggaccccggggctgtggttacagggttgccattgcctggctgtgagcctttgagcctctgggccctctggcccgcgcacttctccttgatgctcgtgagctatacacacctcctctgaggatgcaggctcagtgggagtcagctcatctacattatgaagccctcgtgagatctctgcttggataccttaaatggcaaactgaccaccccccttcccaccccaatctctaaacatctttcacattctcttctggctcctgaaagctgttccaggctgcacccagtgtggctggtgactggggaaggagcgtggagagagaaaggaggctcccagctcatcctctgagggaatgacagggtttgtacagctgaaaggagagagagtctacactggaagctggatcctctgccacagcctaattacaaaaaaggcctggagttctgggctgttcatttgtgatgtgctgtgttgcatctcatttgcatggtgtattattaaggcacaactccccctgaacctttaccttaggggcctgtgggtgacccactttgtgggaagtggttcagggcagcccggaagtacctgaactaggagtgaaaatgcaaggagggggtggggtgttcaggcccctctgggccgctcatttaatctaccaagatgctcagtagctcatccttatagcttcagtttctccaccagtggaatgggaaataacccaacccctacccacctcacaagatttttctgatcaaatgagacagggaatgtggaatgattttaagaactaagaagttttctatgggtggcaagttctgacattccccggaagagggaggagaaagaaaaatggggttagaagaaaatgtcagacgtgggaagacctgcagggaaagagctggtagggctgtcgggccagtggctcccatttcagctgtttgctggggagctgggagctgttcctggctcagtctgagggtaggagactggagaggaccatgccccttgggacatgtgtacacacatctgtgtactcacacaccacctgccaggtgaatgatttgtgtgaatccttctctctctcacccatatcgactttgaagcaggttaccaacttccctgaatgtgccttgggagtttttgtggaaataaattccaaaagagtgaactgtgtaattaaaccacctcactactcaggaggccagaggtgcctcagaacaagggaggaggtgggatcctctgcctgcaggattcctctctgttctgaaccacagaggttgggagcacctgggtggtgaagggagtatgtggaggaagggcctggaggtatttaccccccgccagataaacacctgttggcagaattagccttgatctgacagccccaggaagcttagaaatctgaagatcctgaccatgaaagccatccaaagatggcaaggaccgcctgagaagtagtgagctccctgtcactggggggtatgtaaggacatggttagtgactgcttggcggagatgctggagagaggattcaagccaggaaagaaggtggggtcctgagattctgtgactgggtagagggaagatgcggccagtggggattcattagttcctcctctgagatttctggactcctccttccctggctctctccctgctctacatacggaatttgcctagaagcagctcttggtagaggcctctgggtctccccttggttaggcccacatgggaaaggtgacctcattgttcccttagctgtttacccatcctagggaggggcagatccctggtcccttggaggctcagctccctgtgtctcctgctctgttttagctagccccaattctgctattcaccagctgtgtgactttgggcaaatgactcaccttctctgggctccagcagggctgaggtgggctctggggcctgcttcaggtctggagttgcccaattttggaaggatgagccttgggcttgggggcgaaggctatgcatgattagggcccttcaaagcttagagctcctgggtatcagggtctcctctgccttcttagtaggcagccacaaaaatgtatgagtaatgggcaaggctcctatgccaatgtattttgactcacaaatgaagacagtgtcctgcacatccatggggaagctgagtgggaggtagacactcctccgcttagcagacaccatagctcaccctcccctcaggaacccagtcctccctgcaaggccagagctcccggggctcctttcctccatctcagctgctgcaagcaaacccagtgctggatggctttgacctctgagctcttggcttctggctacggcatttcattgcttgtggcctcaggctggcttctcctcaatcctgctgttcccccacttcacctgggccttaggtccctgagggccagagagatacggggaaggaagtgagtcagggaagtggcattcaggagggagctttgccaagcccgcctgtagtccccagacagggaaatggtcttgaaacactgggcaggcttccagggaggaaggacttggcagggatgaccagctgagccaccccggagtagggccagagcacccggactgtattcagtcctctccattggggcaggatccctggggagttgggggtgaaatgagacctggtatgccattgctggggtggctgggcccctccccttcccgaactgaagttgtttctgtttctggtactgcggtgcagtggttggggctggcagggggcagggtgggatagtgaatgagagcctaactctaggcttggattttggatttctccttttttttttttttgtgacagagtcttgctctgtcgcccaggctgaagtgcagtagcacaatctcaactcactgcaacctccacctcccaggttcaagcaatcctcctgcctcagcctcccaagtagctgggattacaggtgcacaccaccatgcccggctaatttttgtatttttagtagagacggggtttcaccatgatggccaggctggtctcaaattcctgacctcaagtcatctgcccacctcagcctcctaaagtgctgggattacaggcgtgagccaccgcattcagccagatttctcctaactggatattcaggtttctagtcaggggctcccagaaccccagctaggccactacccaggtgttagccgctctgctccctcagctctgtgagaataattgcaaaaagcaggtgatatgagaatgggctgcatggctgaaaggtgatctgggtgcaagtgctctatccccagggtgggacatcatgccggagtcctaccaggtgtacaggaaacactaatcctgtgggaaggagctgggccctggaacaaaactctctgggtctaatcccagcatcagccctgggtgtcagctgtcatgagcgtgaaatgatcatcctggcccacagcaggagctcagtgaaccaaagccccttccagaagcacattggccagttgagcccgtgagccatccctgcaaggggccagcaggcgcagcacaaccagtttttgtttgtttgtttgttgtgttgtgttgtgtttttgagaaggagtctcgctctgccaccctggctggagtgcagtggcgtgatctcagctcactgcaacctccgcctcccaggttcaaacaattatcctgcctcagcctcctgagtagctgggattacaggcatgcgccaccatgcctagataatttttttaaatatttttagtagagacagcgtttcgtcatgttggccaggctggtcgcagactcctgacctcaggggacccaccctcctcggcctcccaaagtgctgggattacagcacagccagtttttgacccctgcccccaggccttccaaaggctgagggagggtgagtggggatcagcacgtgtccttgctctctccacgccttcattgctgctgagtcaatggtcttgtctgttcatcccttccctatctgggacttcaggagctgccctgcagtggtggcttccttctccagtaccacacaggaatagggaagtaatgactcttctcatgacagagactgtcaacaggcctggggcccccagggcttgggaagtccctggcaaagctggggcagagggctccggggtcctcaccccccgcccccatcgcctgtatgagtctgcagtgatttcagcttcagtgaccatgaagtctgccatgagggggcctctgccacgtggtccattctggatgtgggaccttaccccttatcagccccatccagctgtttaatcgcattattaaggaagctgttgttgctgtggaaactgtgtgggtgatggtgggggagggggctgtgggctcagctctcacctcccagcagtgctcttcagagcgggaatgagaggagagccttgagtagggatcgtcatcctgccctgcagggattcagggagtgttacagggtccagggaataaccttcactggccctgtcctcaccttcattttacacataactgagttggagacccttctgggtgccaagaactgtggccttggtaccagggagagaacactgtgttcctgggcatgaagctgcagaggctgcggctggagttggcaccctccatttatctattcatttgtttattcattcttttgttcaatagatggttattgagtaccttctctgtgccaggccctgctctaagcaacaggaaataccatcaactgcagaatacagagctaaagaatctgtcttcgtggagcatatactctagtgggaagaggcagtaaaacaagaatcataaaggccaggtgcagtggctcatgcctgtaatcccagcactttgggaggccgaagcaggaggatcacttgagcccagaagttcgagaccagtctgggccacatagtgggaccccatctctacaaaaaaattaaaaaattagctgggcgtggtggcacatgcctgtagtcccagctactcaggaggctgaggcaggaggatcgcttgagcccaagaggtcaagattacagtggggaaaaaaaaaaaaaaagaacagttgaatgtggcactgtcatgccgttcaacctgtaatttgaaggtagaatggacagggtttgctgagagaccggatgtgggatgtgagagaaagagaagaatcaggggcaactccaaggactctggtctgggaagagagacaggaggaaggaactgccatccccgggccaggcaggctagaaaggcagggacggccaagagctcagttctggacgtgttttgtatgacgtgtcccatagttgatgtcctagctcagggtctggagtgaaccaaatagggagttaggggtgagggcctgtgtgggcgggtaccccctgcctcctagggagggccctgcccaggtgggacatgcttatctcaaggaaaggagcccaggctgaatgcccttgagggtcaaagcagccacccagttctcacagccccaaagtcccctggttgttgccacagagcaggtgtctgcgaaaccaaaacacgggcctgacagctggaggctccatcacccgcttccctgagtgttgtcccgttgccatcgaagtgctttgctgttcattctccctcaccttctccccgctgtggggaggtgaccagatgctgtcatcactcccattactcacaggtggagactgaggttcaagggcacgaaggggctcaccaacagttgcatggctcaaaagtggcagaagccatcctggattctccgcatcggggttgggttcttcctgtggccactccccacccgccttacagagccatgccaccggcctgcaagtgcacacagcgattcccaccatgtccccacgcctgggctcctgtcctcaacatgcacactcccttgtgagtcaatggccccgtgtggcatcacaaagcctgggtgcctgtcccggccacacactgctgggtgtccttgaacctgttgccaaagtgggtgtagtttctcttttgtacactgggcctaacagtgcccctcctatatacccctggaagttgttctgagacaacatccagataacaactaggtaagtgcagtaataaaatgcgggagaaacattaggggcctttattttcctcacttaactggctgccagggaaaagcaaggaaaggtcagaggctggggtgccccagagaggccccatgtagatgaggctctggctgggcccagagaaatgggatgtacactccggcccagagacctgaagatctgggttcagggcagctttgggacaggctatctggatggcaactaactggagtacctgatcaggcctagaggtgtgtcctgtgacccagtgtccaggcctgggccagcatgtcagagactcagcaagagtatgtgggtccttggctcacattgtttgagcaactactgaatactgaataggactactgaatactgaatactgaataggacaagatgtacatggtacaacttctgcccacctgggccttcaatgaaatgcccccaggcagcatgtccctgactgcatgcttcacagagcagggataggcctgcccaacgtgccactgtatctgcagaacccagcccactgcctgactcaccaaggccctcaccaaacattgtcaaggccaagagtgacgctccagggaaggggatctctctaggaggaagggtgctcaagatgaagaaggtgggttttcagccaggcctgtcacccctccctggagtggttaggttaggattttgacaagtggtaaaaagagggactaggttgagcaagggggtaggagcaagaatctcagagcagatttaggatgaagtgagttggctgtgggggaagggagcaatgggaaaggaggtgggaggagatgccatggggggggtcttgaggaccaggttgggtgctaggatgtggcttcatgagcagcaggagtcactgcaggtttgtgggcatgaggcaagaggcacaaagctgtattttgggaagagccatctcgcaggtgggcaggggcactggagggcagagggctgccccagatgggattaagaagggaaggcaggccaggcacagtggctcacgcctgaaatcctggcactttgggaggctgaggcgggcggatcacaaggtcaggagttcgagaccagcctgaccaacacggtgaaaccccgtctctactaaaaatacaaaaattagctgggcgtggtggcgggcatctgtaatcccagctactcaggaggctgaggcaggagaatcatttgaacccgggaggtggaggttgcagtgagccaaggtcacaccactgcactccagcctgggtgacagagccagactccgtctcaaaaaaaaaaaaaaaaaaaaaaggaagaagggaaggcaggctggggaggttggggaaaggaagcagggagtgcagatcactccccttccatgagttgttttcttaagatgctagaacttggccaggcatggtggctcacccctgtaatcccagcactttgggaggctgaggctggcagatcacttgaggtcaggagttccagaccagcctggccaacatggtgaaaccccatctctactaataatacaaaatttagctgggtgtggtggtgtgcacctgtggtcctagctacttgggaggctgagacaggagaatcacttgaaccctggaggcacaggttgcagagagctgagatcgtgccactgcactccagccgaggtgacagagtgagactccgtctcaaaaccaaaacaaaacaaaaaccaaggccgggtgcagtggctcatgcctgtaatcccagcactttgggaggccgaggtgggcagatcacaaggtcaggagatcgagaccatcctcgctaacacggtaaaaccccgtctctactaaaaatacaaaaaattagacgggcatggtggcgggcgcctgtagtctcagccaatcaggaggctgaggcaggagaatggcgtgaacccgggaggcggagcttgcagtgagccgagatcacgccactgcactccagcctgggcgacagagcgagactccgtctcaaaaacaagcaaacaaaaaaacagaaaacaaaaattagcctggcgtagtggcatgtgcctgtaattccagctacccaggaggctgaggtgggagaatcgcttgaaccctggaggcagaggttgcagtgagccaaggtcgcaccactgcactccagcctgggtgacagagcgagacttggccttaaaaaaaaaaaaaaaagaaagaaattaaccagccgtggtggtgcacgcccgtaatcccagctactcagaaggctgaggcacgagaatcacttgaacacgggaggcagaggttgcagtaagccaagattgtgccactgccctccagcctgggcgacagagcaagattccatcaaaaaaaaaaaaaaaaaaaaaaaaaaaagatgggagaactcagaactcaagcatatagattattcaacagttcacatagccagatagttcaaggccagctgtgggctttgaatgccatagtaaaatgtttgaactttgccttctaggcagtagggagctactgaaagtttaaagggatggtatactattattctttcattcatttattcaataaacgtgtatgtgtgtgtgtgtattttttttttaagagtccaggtcttgctctgttgctcaggctagagtggagtggcataatcatggctcactgcagcaacaaactcccgggctcaagagatcctcccgccttagcctccatgtaactgggactacaggtgcctgtcaccagaccaggctaatgttttacatttttgtagagacagcgtcttgctatgttgcccaggctggtctcaaactcctggcctcaagtgatgctcctgccttggcctctcaaagcactgggcaatgtccctggtcttcaataaatatttgatttatttaagcaaatcttttttctgagcacctactatgtgctaggcaccattctaagtacttaggatacatagataaataaaataaaggttcttcccttcaaagagcttacatgtcagcaagtaaaggaaaagatgagagaaaatataataaatcagtaaattatatatcatgtcaaaaggtgataggtgttatagagaaaagaaaaagcggagaagggtgggagaattgggaatacaggggtgggacacaggtggcagtattaaacaggatggtcagggtaggcttcattgagaaagaaagacttcaggatgtctgggggaggagtgttccaggaagagagaagagcaagtgcaaaggccctgagacaggagcagcaagtgcatttagaaacagcaaggaggccagtggctggagtgaagcaggaaaggcggggagagggtcatgggttgggggaagggacattgtgcaggtctatgcaggctattgtagggtgtatggagtgaagatgtcaagtcagcagttagatatggagctggagatttggggagcaatgagctggagagatagacttgaaagtcattggcatatagatggtacatcatatcatcatatgagactgcatgggattgccaagaggttgagtgcagataggaaggaggcagagaagaggaaaggactgagctccaggaccctcttgcaccaggcaggggaatcagcaaagagactgtgatggcatggccagaaaggaaggggaaaaccatgcaggatctgggaccccagggaatctgaagggaagagaccagaagtctatggcaattgctcatgaagagatgagggtctggccaaggggccaggtgggaggaaccaggtaagagatattatcatcccaatgttacccttaaagaaaccaaggcccagagaggggagaggttaagaacctgggtcaagatcacacagcttaagtgtgacttcttctttttattttttatttttttgagacggagtctccctctgtcaccaggctggagtgcagtggcacaatctcagctcactgcaacctccgcctcccgggttcaaacagttcacctgcctcagcctcccgagtagctgggattacaggtgcctgccaccacgcccagctaatttttgtatttttagtagagacgggatttcaccatgttggtcaggctggtctcgaactcctgacctcgtgatcttcccacctcagcctcccaaagagctgggattacaggtgtaagccattgtgcccggccaagtgtgagttcttttaagctgtgtgaccttggccaaggtgcttaacctttccctgccaagtctcaaacacctctttgtccagctactatgcttccatcaagaatcaataggacctatgtccctacaggtgtcagggtagctggcagaatggtgatgcccttggcagaggcaggcaaggccaaaggaagggctggttctggcagggagtgaaggatcttactttgagaggtattgaatatgaggtggctgcagacagatggtgacgccatctgagaggcagcaggaagtaggcgctgaggctcaggaggtgatttgagctgttgatctggatttgggactcctcaggacaatctgtgaacaatgatgagagagagcaccaaggaccaaggtctgaacttgggagctagggcccatgtccacagggtgaactggaaggaagataaggagacagcaaggaatgcttgccaagaaaccaggagaccaggaaagagtagtttccaagagatgggggaagcccacactgttgcagggaggtcctgcataaagtctgaaacgggtctatttaattcgcccttggaggctgggcatggtgtctcacacctgtaatcccagcactttgggaggccaaggcgggtggatgacctgaggtcaagagtttgagaaccagcctggtcaacatggcaaaaccccgtctgtactaaaaatacaaaaattggccgggcgtggtggtggaagcctgtaatcccagctactcgggaggctgaggcaggagaatcacctgaatcccagaggcggaggttgctgtgagctgagatcacaccactgcacaccagcctgggagacagagcaagactctgcccaaaagaaaaaaaaaaattgtagttggaaggacttctggttctatagggtggattgaacacaagactttatctccagtccttcctgattttccatcaaagtgacagtaaggaataaagaatgtaaacctacaaggacaaagagaagaggagacaacagcagacaagatattaacacctttttggaaagtgagaaacaggttgaggagtgatcactgacacagcagagaacaactgaaaccaaaggccatttggagtctgtaaaagctcggggattggagggctgaaggaggcaaggggaagagcagggctgaaagcagcggctgctaggagaatgcataaggagagatgaaacacccaagatacttatccatctcctctcaaagccaggcaaattccagccacctcacagaagaccagcagtttattctgtggaattaagtaaaagtctgcatactgaaggatagaaccctcagccctcactcctaaattggtcccagagaaaagacctccagattcttccagttgttgggggagtcttccctaaaggaccaggttcctacttgatcactctgcagtgaagcccaacagccaataagcttggtcctcggtactctgtcttcagtagctgtttcttggtccttggtccttggtactctcactcatcattgttcacagattgccctgaggagtcccagatccagtcccaaatccacctgcccccaacacacagagcagccaactctttagtgtcttactccaaaatattgagacagccaagccgcaagaatcaccacaggtcgggtgcagtgactcacgcctgtaatcccagcactttgggaggccgaggcaggcggatcacttgaagtcaggagttcgagaccagcctggccaacatggcaaaacccctctactaaaaatacaaaaattagctgggcattgtgacacgtgcctgtaatcccagctactcgggaggctgaggcaggagaatttcttgaacctcagaggcagaggttgcagtgagctgagatcgtactaccacactccagcctgggcgacagagggagactccatctcaaaaaaaaaaaaaaaaagtcaccacacatttgaggaaaaattctgttaaaataaaaactttagacaaattaaatttagcagagtttatctgagcaaagaacaattcatgaatcagccagcatcctgaaccagtagaggttcacagagttttaccacccagcagtatgggcaggcagtattaatggacagagaaaggaattgatgtatagaaacagcttgattggcgacagatcagtatttgccttatttgggcatggtgcaatgaggtgtttgccttatgtggacatgttctgatgatctggcagcttgtgattggctgaaaattctgctatatttggctgagacttggctgcttattgtaagaatatactctcaagttacgttgcagtttgtttacatattgaattatgctacagtccactatgtatggagtcagctttatacctgggtgacagagtgagactttgtcaaaaaaagaaggagaggagaggagagagaggagagagatgaggggtggggaggggaagggaggaaaggagaaaggaaggaaggaaagaaggaagggagggagggaagggaaggagggagggaagaagggaaagaaagaaggaaggaaggaaggaagaaagagagagagagaaaggaaggaaggaaggaaataggcaacacataaaataaatttttttaataggatcacaggtcactgtgaacaatagccgttcattaaatgacttcggaggcatatacaaaaagttacatagttgtagaaaaagcttagctgttttaatagcgagttctcagttttcttaagtgatcaaaaacctaacaaagacagcatgaagcacaggaaattatctgggtagaacacagaatctttgttttctaggccaactacctaaagagaaagaaaaacattttacaatttcctattatgatcagaccaataatctaagaacaccatgttgttttaatggagagaaccaaattctagttttgcatcagtgtaattttgatattaatgctagctcttatcgcccaggctggagtgcaatggtgcaatctctgcttactgcaacctccgcctcccgggttcaagtgattctcctgcctcagcctctcaagtagctgggattacaggcgcctgccaccacacccggcttattttttgtatttttagtagagatggggtttcaccatgttggccaggctgggctcgaactcctgacctcaagtgatccacccgcctctgcctcccaaagtcctgggattacaggcgtgagccactgcacccggtcgctaacttttattcttaaaaaacttgtaaataattacctcctaatcttaaccagcttgatcacccataaaatttctttcacaagattcatcttccacaaacctcctacaactcttatatccattcactttttgtcctatactttcctcttctcattttcgaaaaatcagtcatttcactttaggacaaaatttattctctttttccgttatcaaaacaaaacatcctcacgtcttatagcttttccttagcttcctttgtatatttctttttcatatattcctttttcttaccttccttgtatattttcatatagattttcccccttattgtttctagtaattgtagctacatatattaattagaattcttaaccccggccaggtacagtggctcatgcctgtaatcccagcactttggagtccgaggtaggcagatcacttgagggcagaagttcaagaccggcctggctgacatgctgaaaccctgtctctattaaaaatacaaaaattggctgggcgtggtggcgggcacctgtaatcccagctactggggaggctcaggcaggagaattacctgaacccaggaggtggaggttgcagtgagtcaagattgagccactgcactccagcctgggtgacagcgcgagactccatctcagaaaaaaaaaaaaaaaaaaagaattcttaacccttagtgaccttaatttccatggacattagaaagtaagcatttgtgaattgtgtgtcacaccagctgtagattggtaaatctatgaaccataatgtctagaagcatgagctttctcatagtacaatttgtcagtgtggcacagaacatgtttctcaatggtccaaaatgtctttaagtctctctgtaaaaataaactgtaaaggaggcaaaatttcatttgtatccctttaggttttttgtttgtttgttttgtgaggcctgaaaactaaattgttgtttgtacagatttccctcctcctcaactttctattcttgatgctaagagtgttaaaaccttctggtggctgagcgtggtggctcacgcctgtaatcctagcactttgggaggctgaggcaggtggaacacttgacctcaggatttcgagaccagcctgggcaacatggtgaaaccccatctctacaaaaaatacaaaaattagctggatgtggtagcttgtgtctgtagtcccagatactttggcggggctgaggcgggaggattgcttgagcccaggaggcagaggttgcagtgagccgagatcttgccacttgcactccagagtaggcgatagagaccctatttcaaaaaagtaataataaaaccttctggtataggaaggacatcttttacatgggaattttatcttacattcatttaactcacttattttcaacacttatgcttggattgcctataaagatgagataataaacaactagtcatcattttgtttttcttgctgacaaattttataatataaagacaacataagcttgttttaccagtaaacctagataggaaatcatgcatctttatgatatttaatccccaaaactatgaaaacatgtctgtttcagtcaaaccaacaatattcttatttgccaaagattacccaagtcagatgagctgcaaaagtatttgaggtagttcttaattttctgagagaatacttcatttatacaagcacttatttttcttaaagccaacaaaatagagctctttcataatttaattttggagcattaaaaggagataagaaactatgatacctgtatcatacatacagacttatataaacataaacagcaacagatcttacagctttcatttaaatatcttagccatgttccaggtacagtaatataaaactcctgaatttattaaagactatctggatccaaattgttcttctggccaatggaacaagatttcttgcccagatgactaaagcttttgaataagattcgtgaaggagcttttaagatttttttgtttgatttctgtaaggaacctattataaagaggcaattttttattcatttaatcttttagatgcctctgtgtatcaattaaagaatgcatcccattgcttttgtggcatttttgaacctttcttttctaatgcaccttgcaagtgaacagttttatctaggtcaaaactttcccactgtggccactgtaactcttaagttgtcctcagcaaagttaacccatttttccaaaaatacacatgttcctcataattgttgttcatgaagttagccaccgtcccagaaagtggcgtctcagactctggagtcccagactccttagatttggaggaactcactttcaaaaggcacctgcctgaggcttttaactggatccatttcagttaattatcagatctgatttgctcctggacccagtcctacttgacccagtctaagaattgttcaaataaacttggagaacacaaaacacaaattcctgaagcttggaatctgagatagaactcacccatgacctccagttgctacaagagaacaattggcacagtgtgccctgtcaggtacccttacttggtcactaaatgctcctgagggtcactggagttctacttccgatcccacttctgacaccaatctgttaaaagaaaagctttaggccgggcacggtggctcacgcctgttatcccagcactttgggaggccgaggtgggtggatcacctgaggtcaggagttcaagaccagcctggcctacatggtgaaaccccatctctactaaaaatacaaaaattagtcaggcatggtggtgggcgcctgtagtccaagctactcaggaggctaaggcaggagaattgcttgaagctgggaggtggtggttgcagtgaaccgagatcacgccattacactccagcgtgggggccaagagcgagactgtctcaaaaaaaaaaaaaaaaaaagaaaaagaaaaagaaaaaggaaaagctttagacaaatttagcagagcttatttgaaaaaataagcaattcatgaattcagcagcatgctaaactagtaaagactcggctgggcgtggtggctcacacctgtaatcccagcactttgggaggctgaggcaggcagatcacctgaggtcaggagttcaagaccaccctggctaatatgatgaaaccccatttctactaaaaatacaaaaaaattagctgggcgtggaggcacacacctgtaatcccagctactcaggaggctgaggcaggagaatggcttgaacctgggaggcagaggttgcagtgagccaagatcacaccattgcactccagcctgggcaacaagagtgaaacgccatctcaaaagaaaaaaaaaaaaaacctaaaccagtaaaggctcaaagaactccacctaaccatgtggtcaagtagtacttacagagagaaaaaaagtgacacatagaaatagcctatttagaactcggcatttgctttatctggacaggtctaagcactttgcagtctgcgattggctgaaagctcagttgcaatgattggctgagactcagctacttgttacaagaaactctcatgttaggtttgtttacatattaagttgggtttcagttcactatgtaaggaggcagcttaaggccaaatttaatctaatttaacacctccagcttgaaagacaaaaccaaaccaaatcaaccaagaaacagaaaaaagaaaattcaaagatgtatgagcatgcataactttgataaaaataaaaataataattatttgaattggcaattagaaaatagttatatcctcaggtaacagatgtctctaggtggatgagattgtgggtggtttttcttgttgttgatattttctgtgcatctctaaaaaacatctaatgctttgcaaagaacataagaaacagattagtacattagtggccttggaggaaacaatctcagtaaaacatgtgtttattaatgaatgtattcccccatccctttccaaaaaagttcataggtgtagttatagtcaaaggtaagaggcagtcttgtcagagccagtaaagtaaccaaccatcctggtttgcccaagaccaagcagcttcccaagacactagactttcagtgctaaaaccagagaagtcccatccatactaggagagttgatcactctagtctgtgtaatttgcaaagactctccatatcctttggttcctgtgagtctcaaatccacccagtgaggtacaggtgggccggtggatggtcacctccatttcagaagagaggcagctaaggctcagggaatctccctatccctgacccgggaaaggccttaagagaaagtggtcttttaaactgtgtgtatatatcactttgataaaattaaaaattagttttaaagaagagagagggccaggcgcagtggctcacgcctgtaatcccagcactttcggaggccgaggcgggcaggtcgtaaggtcaagagatcgagaccatcctggctaacacaggtgaaactccatctctattaaaaatacaaaaaaaaaaaaattagccgggcgtagtggtgggcacctgtagtcccagctactccagaggctgaggcaggagaatggcgtgaacctgggaggcggagttttcagtgagccgagattgcgccactgcactccagcctgggcgacagagtgagactccatctcaaaaaaaaaaaaaaaaaaaagagtgagggccaggcgcagccgtcacgcctgtaatcccagcactttcggaggccgatgcgggcagatcacgaggtcaagagatcgagaccatcctggccaacatggtgaaaccccgtctctactaaaaatacaaaaattagccaggcgtggtggtgggcgcctgtagtcccagctactcaggaggctgaggcaggagaatcgcttgaacccgggaggcagaggttgcagtgagccaagatggcaacactgcactccagcctggcaacagagtgagactctgtctcaaaaaaaaaaaaaaaaacaaaaacaaaaaaaaaagagtgggaatccagaatgatagaaagaaaatgagcctgggagggatgaactgcagaggaccataaggtaacatgggagcagttttgcaggtgtatacaactgtcaaaactcactgattgtacactttaattgggtgcagtttttgttgcccttaaattatgcctcaattagagagaaagagagagaatataaggaaatgggggcagccatggcgtccttggagaattcacacttgggacgacaactgctcatttgtgtactctctcctcctcacctgtcttccactccacccctgtctctgatggaacatctctccagctaagccatcttcctcaaggcagcccaattctctgtggggctgccacagcactaaactgttctctgtgtccccaggactccaacctgtctgtgcacacagaaaacccggacctcactccctgcttccagaactccctgctggcctgggtgccctgcatctacctgtgggtcgccctgccctgctacttgctctacctgcggcaccattgtcgtggctacatcatcctctcccacctgtccaagctcaagatggtcagtggctcagggatctcctaccgatggggctgggccctggggattctgcttttattttttaatttaattaaattaattaattaattaatttagagacagagtctcactctgtcgcccaggctggagtgcagtggcatgatcttggctcactgcaacctctgccttctgggttcaagcgattctcctgcctcagcctcctgagtagctgggattacaggcatgcgccaccacacccagctaatttttgtatttttagtagagatggggttttgccattttggcaggctggtctccaactcctgacctcaggtgatcagcctcccaaagtgctgggattagaggcatgagccactgtgcccagccagcattctggttttaatgaggccctctcccacctcctcggctggactgggttccccagtctcacctgacctgcttggggtcatgggaatctgacaactgagaatatatacagccagctgacatattccccacttgggaaagtttaagtaagttcagcaacactctccccacctccagcaagcttctggtcagctccattcccagacctcagtgccagtcccaggcaggtctagtggattctggtggcttcaggtacaaagaccccttcccagtgaggactgtccttgcctctggggatgcggattccaacctgtgctctcttcgcaggtcctgggtgtcctgctgtggtgcgtctcctgggcggaccttttttactccttccatggcctggtccatggccgggcccctgcccctgttttctttgtcacccccttggtggtgggggtcaccatggtcagtgtggggccctgggaaagtggatgggggaggtctccattgggttgtggactgtgatagggaaactgtgggctctgaggagagggctggacatattgggaatgggaagaagaagggggtggccccagaaacttctggccatgtgggatggggagaaatggaggcaggtccagatgtgtgtgttctgcccgggcctccctgccctccctgcacagctgctggccaccctgctgatacagtatgagcggctgcagggcgtacagtcttcgggggtcctcattatcttctggttcctgtgtgtggtctgcgccatcgtcccattccgctccaagatccttttagccaaggcagaggtaaggttgggggagaggggaacctgccaggtttagccctgataggagggtgacctcagggttcaaagtcactgctgggtcccaggtccctccctcgaggcttcaagtacaaacacaattgtgttgttctccacttgctacatttctacctggaagcaggctgaggagggggcaccagtgtaacacaggaatgagccaagatgccaccactgttggaccatcatgtgagggtagggggctgttccacagcacccacccaccaagtgcaatatctgacgtgggtgtcagtcagtgcctgtgtaatgaacacatgtatgcagacaagtgtgaagagttctggcttacctagaggtcccattagcatgttcccttcctttcttcccacctccctcagttcctggccttcctcttgatcttcagtggctgtgatgttgggctggtgggatggaacactgcaggccaacctagtgcctcccatttctccatctcagcgggaagcaggcaaggagagtagcaaagaacataggctgtgaacaacccacttactccccatgtgggctcgggcgggtcgctgaaacctttggagcctcatttccttaattgcagaaagggcgtcatgagctgtcctgcctgtaggctgatgtcccagttagacaaggtcatgtaggtaaggtgatggcaccacacctggcacaggtgccacacctggtcctcgctgaaccagagctcccttgtgatccttcctcatctctcagagtcctctgagtggggacctggaggcccccaggtgctgcctcctgccccagaggagactgatgccccaagggactccgcagggcaggggctgcaggcccaggcttttccagtgcttctgacgcccctccactctcccacccagggtgagatctcagaccccttccgcttcaccaccttctacatccactttgccctggtactctctgccctcatcttggcctgcttcagggagaaacctccatttttctccgcaaagaatgtcgaccctgtgagtttcccatggagggtgcgggggctccacagctgagtcctcagcccaactctgaccagcagcccccaacccctccagttcctttcaaagtgggagagaggtcatccccacaatctgtaaactggggcttggagcaggaacaagggtcccctccatttccctactctgctttgagagggtggtgggcactcctgattcccccgtcctattctctcgccttctagaacccctaccctgagaccagcgctggctttctctcccgcctgtttttctggtggttcacaaagtgagttggctcttccaccagccaggccagagggaggggagggatggaaggtgagatggagaaaggggagcagggcagcagtttagggaccgggctggccacctatcccaccccccaccgcagtgggcacagggcagatgagggtagggaagtggtctgggagggggaccaaatgcagaggcctggcctggcccagtgccgcccccaggctacaggccagccctgcatctggcaggctgtggggacaggcccaggaggctggaagaagactgtcattagttctgagctcctctgtttgtgataaacttgcagcctgtcatctccttggctgcgcctcagagcggcttgagcaggataactgtgtctgtgacctgggtgacagctcattaaccccacagcactgaggaagcacccgaggctggggccaaattgcccaggcctcgtcctcacccagggccccaggcagcgtggattccatcaccagggcctggggtggggaggagatgggacacctggggaggaggaggagaagggggtagtggtaggaacttcggagggagagccagtgacctcaagcctattcactgaggaaatgaaggagacacctttcatggtcacagtgcccgagggagaccctcctttctggagaccctggggccctggagacactgacccttggctccaggctgctaaaccctgaccctctgcggggctgcctgccgggcttcacctccccccaggatggccatctatggctaccggcatcccctggaggagaaggacctctggtccctaaaggaagaggacagatcccagatggtggtgcagcagctgctggaggcatggaggaagcaggaaaagcagacggcacggtgaggccctccccttgccccaacacccagccccttcgcttaccccagatctcctgcagaggacgctggtagaccttggagggcggcattgctggggtggcaagcagagcaggaccaggtgatttcttggcagcctcgggaccattctatgggaagcttaggcctggatggcgctagttctcccagctctggtgggggcaggagaatggctggcactttggagcaactactccatcccaggtcccatcctaaggatataaataaactcacttaatttttcaacagccctaaagggtaggttcaagtgtccctgtgttacagatggggacactggggccgggtgtggtggctcacagctgtaatcctaacactttgagatgccaaggcaggaggattgcttgagtccaagagttcaagaccagcctgggcaatatagtgagaccttgtctctacaaaaaataaacaagatgagccgggcatggtggtgtgcacctgtagtcccagctacttgagaggctgaggtgggaggatcatttgagcccaagaggtcaaggctatagtgagctgagattgtgccactgtactccagtctgggcaatagagtgagaccttttctcaacaacaacaaaaacagatggagacaccgaagcacagaaatttaacagagggcctcccagggtccccaagttggtggtggcagagctggaatccacatggagccggctggccccagaggttctcctcatatcactgcaccaccctgcctgactgagagggctgattccagggccaggagccagcacacccctgccaattctgcctcctcctgtctggaggcggcggctgaatgagatgatcttcccctgaggggtcttcccactgtcagcctcttatcaaggaccacaaacctgtctctggccaactgcctcaccaagagagctgacgctgagcatcatctttctccacccaattctgaccccaggattgaaccctccctcctcccatccacaatccaggcctaggagttcaatgtttgctcagcccggagcttccggttgtcaccagctgttggaggagcctggggctgggcatggttagcagtatcctggctttcatggcttggagcctccacgaagacctatgggcccccagtctgcctgctgcaccccctctcagtccctccatgccactccaccccctccctgttcagctgcccggtggctgtaccaacagccatccttgatcttatctaccttccctcttggcgtcctccctggagccagcactggggaggcggggagagggccagactggggggatagctgggttttagagtccttgtggtagcagtctggccaccccttcagatgccctctggcagctgaggacagagtcgcttgtgcaattcttatgctgtctgttcccctcccagctctgagagccaagaaaacagctccttcctcctcctcactcctagccagcccagcctagcccttggcttcctggagcccctgtccccattcctaacccactgctccttcctccctggaccagacacaaggcttcagcagcacctgggaaaaatgcctccggcgaggacgaggtgctgctgggtgcccggcccaggccccggaagccctccttcctgaaggccctgctggccaccttcggctccagcttcctcatcagtgcctgcttcaagcttatccaggacctgctctccttcatcaatccacagctgctcaggtctctccacactccggctcactatagccctgccctgggcagcagggctggctggctagcccagaggaaggaacaacgtacagtgaaaagaaccccagaccaggaaccagggaggctagctccactttctgtgtgacctttggcaagtggcattgcctgacttgtttcctcactcacattcaacttagaattgctgtgcatatactatgtgccgggcaccgtggtgtgtacgttaacaagcattgggtctttaaatcttcccaacaatcctatgcggaattgccccattcccatgtcacagatgagaaagcaggaactcagagaggtgaagtgacttggccaagggcacacagcaaagaaggaatcaggtctgagtccaggactctgagctccgactgaggtgctctgtccccaccatcaggctctaacatctgtctcaggaatggcttggactagaacgagctctcaaatgagagggtgggaaggagagctgcctagtagctaagtccccacctccttgcccctccgtgcatgcattaatttgttcagcaaacatttattgaacctccagggtaccagaatggtgctcgatactagggatacagagttcaataagacagggtcttgatgtcttatgggagaaaccagcgtgtaaatcaattagaattcagtgggggcagaagtgttctcgggtgtctggaaaaccccgggaggggcaaagaagccagcctgggatgcagcaggaagcacccactggcttgggaggtcaacgaatttggagagacaagtaggtgaagaaacaggggaaagttcagcctcagcttagtcacaaagccctgaaacagcatgactcaggtgtttctgagtggcagaggaaatggcaacgagagggaggggcaggaaaacagagagagggagagctaaggatatccttgaaagatctgagccagggaggggcatctggcttcaaggatctcctgccaggagtgtgggggatgtagggcagggtggctggatggaagtgggccaacccggtcagatggagtccaggccaggaatgagacaagtattcaggagcaatttgggagatgggcgtgtgcgccagagagacagaggagtgccaggcaacctgggtgctggcctgggtaactggaggacgatggatcttttgctgagctgatgggctcggtgggaggaggaggctgggtggggggcaaggtggtggatggagtctggtcatgtggggccagtggtgctggtgggtcctccaaggggagattcccagctagctggaagtcaaactctcgagcccaagagtttgagaccagcctgagcaacatagcaagaccctgtctctacaaaaaagttaagatattagccaggcctggtggcatacgcctagagtcctagctactcaagaggctgaggtgggaagactgcctgagcctgagaggttgaggctgccgtgagctgtgatggcaccaccgcactccagtctaggtgacagagagagaccctgtctcaaaaaaaaaaaaaaaaaaaaagagagagagagacaccagtcactgggctggggccactggggcccaccctactccaatatgacctcaccaaatgaggccacgttcacaggtaccaggtgttgggagctgaacatatctttctgggagacacaacttaagctatcacagaaggggaggcctggctatgattatggctggagggctccatgtagtcgagaggagagtgtcccaacaatgaagagactcggtcatgtcaataggtgaaggtgtagagcttccagcagaggtggccagggtgaagctcagcggcaaagggggcaacagcgcagcaagttcctgaggaggcagaggaaggccagggctcgggggcaggggcagcctccgacagcctgagcaccagaaaaaggaggacaagccactggagggcagtttgtgagtggcaaggagtttgtgggtggcagggagttctcaatgggtggctaagcaagaaggcaggtagctgctgagaggggtggggggctgggatgggcctgaagggaagagaagagaggtgaagaaggccccaagagcgggggcggattagggacctagagaaggttgctaggcagtgctgggggccactgagtttggaaaggtggatttgagcggcaagagtctttgtggtcatgtggcggaatctagagcccccagcagcctaggagaaggagcagggaagtccagtcaatggaaacgtggcatttcttcccgccatatgtcaggaggtaagaaggcaggcaggtgaggctggtggtgagagcgtcatcgatagggcgtgcagcagggtccatggtggatagagaacgaggtgaaggcagagtggagccaggaggtcgtggtcttgaggcagtactgggttgaccctccctggcccaagaggttggagggggtggaggtttcagaggccaggggtgcagtggagactgcgggtaaaagcaaagggcagcagaggagggagcagccatgggggcagcactgcccacctcactcctctctcctccccacagcatcctgatcaggtttatctccaaccccatggccccctcctggtggggcttcctggtggctgggctgatgttcctgtgctccatgatgcagtcgctgatcttacaacactattaccactacatctttgtgactggggtgaagtttcgtactgggatcatgggtgtcatctacaggaaggtcagctggagcagggcccaggggaaaggctggccctgggcagcttgcaagaggctcgcagccaagtccacccactactgtctacctgcaggctctggttatcaccaactcagtcaaacgtgcgtccactgtgggggaaattgtcaacctcatgtcagtggatgcccagcgcttcatggaccttgcccccttcctcaatctgctgtggtcagcacccctgcagatcatcctggcgatctacttcctctggcaggtgactctccaaccctgacctctgcctccttcctctgacatgctgcagaagtggcaagagaggattattctggaactgggagcatggcacatgcttgtagtcccagctgctcaggcggctgaggcaagaggatcacttgagcccaagagttctggctgcagtgcgccacgattgtgcctgcgaatagccaccacactccagcctgggcaacatagcaagaccttgtctctaaaaagaaacaaagaaaacagaaaaaaagaaggagggttattctgggttagcagaggggatatagaattgacacaagagctggctgggcacggtggctcacgcctgtaatcccagcattttgggagaccaaggcgggtggatcacgaggtcaggagttcgagaccagcccggccaggatggtgaaaccccatctctactaaaaatacaaaaattagccagacgtggtggcgggtgcctgtagtcacagctactcaggaggctgaggcaggagaatcgcttgaacccaggaggcagaggttgcagtgagccgagatcataccactgcactctagcctgggtgacagagcaagactctgtctcaaaaaaaaaaaaaaaaaaaaaaaaagaattgacacaagagcttccctaggcattggtggggatggagggataggacttcgaggatgctgatgtctgcaaaggaatcttcccaacatctgttgctatccttcctgcagaagccagggaggaaagaaagtcttggagggaggtgggtgtgactctggctgtcatcgtctatatttgccttcctgtgtgtctggacacccttctatatctgctgtctgtccctgtcgtcgttatctaatggctggctgcttctacaaatgttgtggtcattctgactttctatctgtttggccaaccaccatcttttgcttcctgcccatctacacatttcaagttaacaggcctctgtttgcctgttgggttctctctgtagactttggtaatctgtccctatgtgtcatctatccaccggtgcctcctcagaacctaggtccctctgtcctggctggagtcgctttcatggtcttgctgattccactcaacggagctgtggccgtgaagatgcgcgccttccaggtaggtgctgtcagaggtgcatcctcctgcctgcagcacccggccggctgcctgggggaaggtgtccactaaccttggggcctcccaactaccttgcttcctgagtatggatggctactagccatttgcagaaaccatagctcactcttccctcacagctctcagagggttttactgacattctcattttgtagcagaagaccaacgcttagagaaataatggcagtccagaatcaggcagggctgggactcaaacctgactatcctggtctaacaaggagttttcccgctgcactgtgctaagcatgaatagccagtcactcagtctactatttgcaaacatttcttgaagtgttttttttctttttttttttttttgagacagggtctcgttctgtcacccatgctggaatgcagtggcatgatctcggctcactgcaacctctgcctcccgggttcaagcgatcttcctgcctcagcctccctagtagctgggactacaggcacatgccaccacacccggcttatttttgtatttttttttttagtagagatggggtttcaccatgttggccaggctggtctcaaactcctgacctcaggtgatccgttcatcttagcctcccaaagtgctgggattacaggtgtgagccatcacacctggcctattgaagtctactagcttcccactgcccataggaaaaatgacaaaccccctaagaagactcagcaggcttctgcttaccttgcaagtcctcaccccctgcggactggccaagtttcagccagtctggtcttctttcttttctccacagcaccaagctcagggtacctctaggggccaccacatatactattccctctgcctggaatgcttgtcatccccctcttgcctgcctaactcctttccttcccttacctctcggcattgaagtcacttcctcggctgggcacggtggctcatgcctgtaatcccagagctttgggaggccgaggcaggtggatcacctgaggttgggagatcgagaccagccagaccaacatggagaaaccccgtctctactaaaaatacaaaattagccgggcatggtggcacatgcctgtaatcccagctactctggagtctgaggcaggagaatcccttgaatccaggaggcagaggttgcggtgagccaagatcgcgccattgcactcccacctgggcaacaagagcgaaactccgtctcaaaaaaaaaagtcacttcctccagaagtccaccctgactgcccagtctcagtctaagttagtttccctgccatcacctcattactttcttacaggatcctgtgatttcccatcagaacacacataatgattaataattaagcatttattcagatcattgtttgcttattgtatgcctcccccatcagatcgtcagctgtatcatggcaggggccttgtctgaattcatcgtgacaaattctacacgtagcccatggcctggcacatagtaggcactccataaataggggttgaatgaatacattaatctggtgtgccacaccttgggctaaggtcttggagaacaaagagaaataaatagtccatcccctcaggaagctcacagtctgattagagaaacatatatgtaaaggaatggttatggaacaaaaggaaagtgcaatgtgctttagaaacccagggaaggggaccaggtgtggtggctcacacctgtaatcccagcacttggggaggccaaggtgggaggatcacatgaggccaggagtttgaaatcagcctgggcaacagagtgagacctcgtccctacaaaaaaatttaaaaattagctgggcatggttgttcatgcctgtagttccagctagtcaggaggctgagacaggaggatcaaaggagcccaggagtttgaggctgcagtgagctatgattgtaccactgcagtccagcctgggcaacacagtgaggcaccatctctaaaataaataatactagcaataataataagaagaagaaaaagaagtagtaggagaagaaacccagggcaggggacagaggatgctgcctggggaggccggtgcagtggcactgagggtggagatggatcttgtcaggcagaggacacagggaggcaggggctgtgcattccaggccaaggcacagcacaggcccagcaaggagttgtgagaaggaatggtgggcagcgtggaatggctgcaatggatgagaatggatggaaggtaggaccctgtgagcaggaggtcaggggagggagcaggtgtgccactgacactctttctgcctgcacaggtaaagcaaatgaaattgaaggactcgcgcatcaagctgatgagtgagatcctgaacggcatcaaggtgctgaagctgtacgcctgggagcccagcttcctgaagcaggtggagggcatcaggcagggtgagctccagctgctgcgcacggcggcctacctccacaccacaaccaccttcacctggatgtgcagccccttcctggtgaggcttggcacagggctgggtccctgcctccagggctctgggtgcccaggcatggccagggctcattggactctaccctgacaccacctccacgctgctcaggtgaccctgatcaccctctgggtgtacgtgtacgtggacccaaacaatgtgctggacgccg

SEQ ID NO: 15295 - DNA, 56802 bp, Homo sapiens
ccgcgctcgccttccttgcagccgcgcctcggccccatggacgccctgtgcggttccggggagctcggctccaagttctgggtaaggcgcggggctccggggtcactgcgcgggggccagggtcggccggcttcgcccggtccccgccgcctgccttcccgcggggccggcaggtatcccgggacggagcccctgagacggcctgggcgcccgggagggggcgatgggctcgggagggaggttggctgcgccgcccggagccgggtcccacgcggtgtcggggacctgccctgctctgcccttcccggctgcagcactggggagcccgggaaagtgaggaagagtgcgcggctggggcgcaaaggcacagtgcgtggctgggtgagtcggctccatcccagcccctccgtcgggtgcggaaggggcgtttcgcaatcagccgcgggttcctgatggagggtcttccctcagcatctgcctcaggttaggactcggttgcccacctgggcatggattgcccccagggcatccagagcacctgctcaaccaggtgttttgggaggccggctgtgcagtgtcccacccttcttaggaaggtttcctgccaccttcttttctctaggtaagactgaggtctgagagcaggccatccccaccactccggactcagaagggagaagcagaccccagtctggagacaggtgcagggtgtcaggattcctgtagtccaactcccttctcacagatggagaaagggaggcccagagagaggaagggacttgcccaaagttacccagttcaatgaaggcagagctgggatagaaaaacaggctacaggccaggtgcagtggttcacgcctgtaatcccaccctttgggaggcagaggtgggaggatcacttcagcccaggagttttagattactgtgagctatgatcgcaccactgcactgtggcctgggcgaaagagtgagaccctgtctctaaaaaaataaataaataagaaaagaaaatcaagcctttggtgactctcactccaaatctctttctaagacaggctgctcttcagcctgctgactccagcctccagcacagttcaggtgagctaagtgcatacagcctaggagctttcttaccaacttgcaaaacttacttgcctctatgaggcaagtgatcatgtggtctccgttttacagagggagctcagattaaaggtgcttctctgtggtcattaaaggggtgtccagggcttgtgaatcccaatctctaagtcttttcctattttgagtatttgtacatatatgccctttgtgtgtgtacgcacacacgcaggcacgtggggtgttacccaagagttcgtgctgtgcacgtgtgtgcacaggtgtataagtctggagctatgctcttgggctgtgtttagaatgggctgaaggcgttatatggattttttgaaacttggggcaatggaggtaaaaaaaaaaactgtaaaaaggcatatttgggattctctctttttctgtgggtgacccaaaggttaatccgagatggtgcaacttctctgccactgcccttctttcccagtcccacaggaacttcatgtattattcagcatggacaggccacttgccaccagggtccagaggttgtgcctttgcctcatgagcacacttcctttcactgccctttgggccaggctggtatgaccgtggcaggtttgtggtgcctgggatgccaaacagaaaatcaagagggtagttgtgcccaagcttcaggcacaagggctcattgttcctgggtagcctcctgaaccctgagagcttaggactctacagagacaggtctcctggaccccagagttgggaaattcaggactccctttttgtcccatgttcagacatcctctggctctaccttaacatgggattgtggaatccaagaaagtgggagcttgggagtttgaagcagcgagtccaacccctcagtgtagagctggggaaactgaggccaagggagtgaaggtcacaggacaatcaaagacagagtgctgggctgggaaaccggaccccggggctgtggttacagggttgccattgcctggctgtgagcctttgagcctctgggccctctggcccgcgcacttctccttgatgctcgtgagctatacacacctcctctgaggatgcaggctcagtgggagtcagctcatctacattatgaagccctcgtgagatctctgcttggataccttaaatggcaaactgaccaccccccttcccaccccaatctctaaacatctttcacattctcttctggctcctgaaagctgttccaggctgcacccagtgtggctggtgactggggaaggagcgtggagagagaaaggaggctcccagctcatcctctgagggaatgacagggtttgtacagctgaaaggagagagagtctacactggaagctggatcctctgccacagcctaattacaaaaaaggcctggagttctgggctgttcatttgtgatgtgctgtgttgcatctcatttgcatggtgtattattaaggcacaactccccctgaacctttaccttaggggcctgtgggtgacccactttgtgggaagtggttcagggcagcccggaagtacctgaactaggagtgaaaatgcaaggagggggtggggtgttcaggcccctctgggccgctcatttaatctaccaagatgctcagtagctcatccttatagcttcagtttctccaccagtggaatgggaaataacccaacccctacccacctcacaagatttttctgatcaaatgagacagggaatgtggaatgattttaagaactaagaagttttctatgggtggcaagttctgacattccccggaagagggaggagaaagaaaaatggggttagaagaaaatgtcagacgtgggaagacctgcagggaaagagctggtagggctgtcgggccagtggctcccatttcagctgtttgctggggagctgggagctgttcctggctcagtctgagggtaggagactggagaggaccatgccccttgggacatgtgtacacacatctgtgtactcacacaccacctgccaggtgaatgatttgtgtgaatccttctctctctcacccatatcgactttgaagcaggttaccaacttccctgaatgtgccttgggagtttttgtggaaataaattccaaaagagtgaactgtgtaattaaaccacctcactactcaggaggccagaggtgcctcagaacaagggaggaggtgggatcctctgcctgcaggattcctctctgttctgaaccacagaggttgggagcacctgggtggtgaagggagtatgtggaggaagggcctggaggtatttaccccccgccagataaacacctgttggcagaattagccttgatctgacagccccaggaagcttagaaatctgaagatcctgaccatgaaagccatccaaagatggcaaggaccgcctgagaagtagtgagctccctgtcactggggggtatgtaaggacatggttagtgactgcttggcggagatgctggagagaggattcaagccaggaaagaaggtggggtcctgagattctgtgactgggtagagggaagatgcggccagtggggattcattagttcctcctctgagatttctggactcctccttccctggctctctccctgctctacatacggaatttgcctagaagcagctcttggtagaggcctctgggtctccccttggttaggcccacatgggaaaggtgacctcattgttcccttagctgtttacccatcctagggaggggcagatccctggtcccttggaggctcagctccctgtgtctcctgctctgttttagctagccccaattctgctattcaccagctgtgtgactttgggcaaatgactcaccttctctgggctccagcagggctgaggtgggctctggggcctgcttcaggtctggagttgcccaattttggaaggatgagccttgggcttgggggcgaaggctatgcatgattagggcccttcaaagcttagagctcctgggtatcagggtctcctctgccttcttagtaggcagccacaaaaatgtatgagtaatgggcaaggctcctatgccaatgtattttgactcacaaatgaagacagtgtcctgcacatccatggggaagctgagtgggaggtagacactcctccgcttagcagacaccatagctcaccctcccctcaggaacccagtcctccctgcaaggccagagctcccggggctcctttcctccatctcagctgctgcaagcaaacccagtgctggatggctttgacctctgagctcttggcttctggctacggcatttcattgcttgtggcctcaggctggcttctcctcaatcctgctgttcccccacttcacctgggccttaggtccctgagggccagagagatacggggaaggaagtgagtcagggaagtggcattcaggagggagctttgccaagcccgcctgtagtccccagacagggaaatggtcttgaaacactgggcaggcttccagggaggaaggacttggcagggatgaccagctgagccaccccggagtagggccagagcacccggactgtattcagtcctctccattggggcaggatccctggggagttgggggtgaaatgagacctggtatgccattgctggggtggctgggcccctccccttcccgaactgaagttgtttctgtttctggtactgcggtgcagtggttggggctggcagggggcagggtgggatagtgaatgagagcctaactctaggcttggattttggatttctccttttttttttttttgtgacagagtcttgctctgtcgcccaggctgaagtgcagtagcacaatctcaactcactgcaacctccacctcccaggttcaagcaatcctcctgcctcagcctcccaagtagctgggattacaggtgcacaccaccatgcccggctaatttttgtatttttagtagagacggggtttcaccatgatggccaggctggtctcaaattcctgacctcaagtcatctgcccacctcagcctcctaaagtgctgggattacaggcgtgagccaccgcattcagccagatttctcctaactggatattcaggtttctagtcaggggctcccagaaccccagctaggccactacccaggtgttagccgctctgctccctcagctctgtgagaataattgcaaaaagcaggtgatatgagaatgggctgcatggctgaaaggtgatctgggtgcaagtgctctatccccagggtgggacatcatgccggagtcctaccaggtgtacaggaaacactaatcctgtgggaaggagctgggccctggaacaaaactctctgggtctaatcccagcatcagccctgggtgtcagctgtcatgagcgtgaaatgatcatcctggcccacagcaggagctcagtgaaccaaagccccttccagaagcacattggccagttgagcccgtgagccatccctgcaaggggccagcaggcgcagcacaaccagtttttgtttgtttgtttgttgtgttgtgttgtgtttttgagaaggagtctcgctctgccaccctggctggagtgcagtggcgtgatctcagctcactgcaacctccgcctcccaggttcaaacaattatcctgcctcagcctcctgagtagctgggattacaggcatgcgccaccatgcctagataatttttttaaatatttttagtagagacagcgtttcgtcatgttggccaggctggtcgcagactcctgacctcaggggacccaccctcctcggcctcccaaagtgctgggattacagcacagccagtttttgacccctgcccccaggccttccaaaggctgagggagggtgagtggggatcagcacgtgtccttgctctctccacgccttcattgctgctgagtcaatggtcttgtctgttcatcccttccctatctgggacttcaggagctgccctgcagtggtggcttccttctccagtaccacacaggaatagggaagtaatgactcttctcatgacagagactgtcaacaggcctggggcccccagggcttgggaagtccctggcaaagctggggcagagggctccggggtcctcaccccccgcccccatcgcctgtatgagtctgcagtgatttcagcttcagtgaccatgaagtctgccatgagggggcctctgccacgtggtccattctggatgtgggaccttaccccttatcagccccatccagctgtttaatcgcattattaaggaagctgttgttgctgtggaaactgtgtgggtgatggtgggggagggggctgtgggctcagctctcacctcccagcagtgctcttcagagcgggaatgagaggagagccttgagtagggatcgtcatcctgccctgcagggattcagggagtgttacagggtccagggaataaccttcactggccctgtcctcaccttcattttacacataactgagttggagacccttctgggtgccaagaactgtggccttggtaccagggagagaacactgtgttcctgggcatgaagctgcagaggctgcggctggagttggcaccctccatttatctattcatttgtttattcattcttttgttcaatagatggttattgagtaccttctctgtgccaggccctgctctaagcaacaggaaataccatcaactgcagaatacagagctaaagaatctgtcttcgtggagcatatactctagtgggaagaggcagtaaaacaagaatcataaaggccaggtgcagtggctcatgcctgtaatcccagcactttgggaggccgaagcaggaggatcacttgagcccagaagttcgagaccagtctgggccacatagtgggaccccatctctacaaaaaaattaaaaaattagctgggcgtggtggcacatgcctgtagtcccagctactcaggaggctgaggcaggaggatcgcttgagcccaagaggtcaagattacagtggggaaaaaaaaaaaaaaagaacagttgaatgtggcactgtcatgccgttcaacctgtaatttgaaggtagaatggacagggtttgctgagagaccggatgtgggatgtgagagaaagagaagaatcaggggcaactccaaggactctggtctgggaagagagacaggaggaaggaactgccatccccgggccaggcaggctagaaaggcagggacggccaagagctcagttctggacgtgttttgtatgacgtgtcccatagttgatgtcctagctcagggtctggagtgaaccaaatagggagttaggggtgagggcctgtgtgggcgggtaccccctgcctcctagggagggccctgcccaggtgggacatgcttatctcaaggaaaggagcccaggctgaatgcccttgagggtcaaagcagccacccagttctcacagccccaaagtcccctggttgttgccacagagcaggtgtctgcgaaaccaaaacacgggcctgacagctggaggctccatcacccgcttccctgagtgttgtcccgttgccatcgaagtgctttgctgttcattctccctcaccttctccccgctgtggggaggtgaccagatgctgtcatcactcccattactcacaggtggagactgaggttcaagggcacgaaggggctcaccaacagttgcatggctcaaaagtggcagaagccatcctggattctccgcatcggggttgggttcttcctgtggccactccccacccgccttacagagccatgccaccggcctgcaagtgcacacagcgattcccaccatgtccccacgcctgggctcctgtcctcaacatgcacactcccttgtgagtcaatggccccgtgtggcatcacaaagcctgggtgcctgtcccggccacacactgctgggtgtccttgaacctgttgccaaagtgggtgtagtttctcttttgtacactgggcctaacagtgcccctcctatatacccctggaagttgttctgagacaacatccagataacaactaggtaagtgcagtaataaaatgcgggagaaacattaggggcctttattttcctcacttaactggctgccagggaaaagcaaggaaaggtcagaggctggggtgccccagagaggccccatgtagatgaggctctggctgggcccagagaaatgggatgtacactccggcccagagacctgaagatctgggttcagggcagctttgggacaggctatctggatggcaactaactggagtacctgatcaggcctagaggtgtgtcctgtgacccagtgtccaggcctgggccagcatgtcagagactcagcaagagtatgtgggtccttggctcacattgtttgagcaactactgaatactgaataggactactgaatactgaatactgaataggacaagatgtacatggtacaacttctgcccacctgggccttcaatgaaatgcccccaggcagcatgtccctgactgcatgcttcacagagcagggataggcctgcccaacgtgccactgtatctgcagaacccagcccactgcctgactcaccaaggccctcaccaaacattgtcaaggccaagagtgacgctccagggaaggggatctctctaggaggaagggtgctcaagatgaagaaggtgggttttcagccaggcctgtcacccctccctggagtggttaggttaggattttgacaagtggtaaaaagagggactaggttgagcaagggggtaggagcaagaatctcagagcagatttaggatgaagtgagttggctgtgggggaagggagcaatgggaaaggaggtgggaggagatgccatggggggggtcttgaggaccaggttgggtgctaggatgtggcttcatgagcagcaggagtcactgcaggtttgtgggcatgaggcaagaggcacaaagctgtattttgggaagagccatctcgcaggtgggcaggggcactggagggcagagggctgccccagatgggattaagaagggaaggcaggccaggcacagtggctcacgcctgaaatcctggcactttgggaggctgaggcgggcggatcacaaggtcaggagttcgagaccagcctgaccaacacggtgaaaccccgtctctactaaaaatacaaaaattagctgggcgtggtggcgggcatctgtaatcccagctactcaggaggctgaggcaggagaatcatttgaacccgggaggtggaggttgcagtgagccaaggtcacaccactgcactccagcctgggtgacagagccagactccgtctcaaaaaaaaaaaaaaaaaaaaaaggaagaagggaaggcaggctggggaggttggggaaaggaagcagggagtgcagatcactccccttccatgagttgttttcttaagatgctagaacttggccaggcatggtggctcacccctgtaatcccagcactttgggaggctgaggctggcagatcacttgaggtcaggagttccagaccagcctggccaacatggtgaaaccccatctctactaataatacaaaatttagctgggtgtggtggtgtgcacctgtggtcctagctacttgggaggctgagacaggagaatcacttgaaccctggaggcacaggttgcagagagctgagatcgtgccactgcactccagccgaggtgacagagtgagactccgtctcaaaaccaaaacaaaacaaaaaccaaggccgggtgcagtggctcatgcctgtaatcccagcactttgggaggccgaggtgggcagatcacaaggtcaggagatcgagaccatcctcgctaacacggtaaaaccccgtctctactaaaaatacaaaaaattagacgggcatggtggcgggcgcctgtagtctcagccaatcaggaggctgaggcaggagaatggcgtgaacccgggaggcggagcttgcagtgagccgagatcacgccactgcactccagcctgggcgacagagcgagactccgtctcaaaaacaagcaaacaaaaaaacagaaaacaaaaattagcctggcgtagtggcatgtgcctgtaattccagctacccaggaggctgaggtgggagaatcgcttgaaccctggaggcagaggttgcagtgagccaaggtcgcaccactgcactccagcctgggtgacagagcgagacttggccttaaaaaaaaaaaaaaaagaaagaaattaaccagccgtggtggtgcacgcccgtaatcccagctactcagaaggctgaggcacgagaatcacttgaacacgggaggcagaggttgcagtaagccaagattgtgccactgccctccagcctgggcgacagagcaagattccatcaaaaaaaaaaaaaaaaaaaaaaaaaaaagatgggagaactcagaactcaagcatatagattattcaacagttcacatagccagatagttcaaggccagctgtgggctttgaatgccatagtaaaatgtttgaactttgccttctaggcagtagggagctactgaaagtttaaagggatggtatactattattctttcattcatttattcaataaacgtgtatgtgtgtgtgtgtattttttttttaagagtccaggtcttgctctgttgctcaggctagagtggagtggcataatcatggctcactgcagcaacaaactcccgggctcaagagatcctcccgccttagcctccatgtaactgggactacaggtgcctgtcaccagaccaggctaatgttttacatttttgtagagacagcgtcttgctatgttgcccaggctggtctcaaactcctggcctcaagtgatgctcctgccttggcctctcaaagcactgggcaatgtccctggtcttcaataaatatttgatttatttaagcaaatcttttttctgagcacctactatgtgctaggcaccattctaagtacttaggatacatagataaataaaataaaggttcttcccttcaaagagcttacatgtcagcaagtaaaggaaaagatgagagaaaatataataaatcagtaaattatatatcatgtcaaaaggtgataggtgttatagagaaaagaaaaagcggagaagggtgggagaattgggaatacaggggtgggacacaggtggcagtattaaacaggatggtcagggtaggcttcattgagaaagaaagacttcaggatgtctgggggaggagtgttccaggaagagagaagagcaagtgcaaaggccctgagacaggagcagcaagtgcatttagaaacagcaaggaggccagtggctggagtgaagcaggaaaggcggggagagggtcatgggttgggggaagggacattgtgcaggtctatgcaggctattgtagggtgtatggagtgaagatgtcaagtcagcagttagatatggagctggagatttggggagcaatgagctggagagatagacttgaaagtcattggcatatagatggtacatcatatcatcatatgagactgcatgggattgccaagaggttgagtgcagataggaaggaggcagagaagaggaaaggactgagctccaggaccctcttgcaccaggcaggggaatcagcaaagagactgtgatggcatggccagaaaggaaggggaaaaccatgcaggatctgggaccccagggaatctgaagggaagagaccagaagtctatggcaattgctcatgaagagatgagggtctggccaaggggccaggtgggaggaaccaggtaagagatattatcatcccaatgttacccttaaagaaaccaaggcccagagaggggagaggttaagaacctgggtcaagatcacacagcttaagtgtgacttcttctttttattttttatttttttgagacggagtctccctctgtcaccaggctggagtgcagtggcacaatctcagctcactgcaacctccgcctcccgggttcaaacagttcacctgcctcagcctcccgagtagctgggattacaggtgcctgccaccacgcccagctaatttttgtatttttagtagagacgggatttcaccatgttggtcaggctggtctcgaactcctgacctcgtgatcttcccacctcagcctcccaaagagctgggattacaggtgtaagccattgtgcccggccaagtgtgagttcttttaagctgtgtgaccttggccaaggtgcttaacctttccctgccaagtctcaaacacctctttgtccagctactatgcttccatcaagaatcaataggacctatgtccctacaggtgtcagggtagctggcagaatggtgatgcccttggcagaggcaggcaaggccaaaggaagggctggttctggcagggagtgaaggatcttactttgagaggtattgaatatgaggtggctgcagacagatggtgacgccatctgagaggcagcaggaagtaggcgctgaggctcaggaggtgatttgagctgttgatctggatttgggactcctcaggacaatctgtgaacaatgatgagagagagcaccaaggaccaaggtctgaacttgggagctagggcccatgtccacagggtgaactggaaggaagataaggagacagcaaggaatgcttgccaagaaaccaggagaccaggaaagagtagtttccaagagatgggggaagcccacactgttgcagggaggtcctgcataaagtctgaaacgggtctatttaattcgcccttggaggctgggcatggtgtctcacacctgtaatcccagcactttgggaggccaaggcgggtggatgacctgaggtcaagagtttgagaaccagcctggtcaacatggcaaaaccccgtctgtactaaaaatacaaaaattggccgggcgtggtggtggaagcctgtaatcccagctactcgggaggctgaggcaggagaatcacctgaatcccagaggcggaggttgctgtgagctgagatcacaccactgcacaccagcctgggagacagagcaagactctgcccaaaagaaaaaaaaaaattgtagttggaaggacttctggttctatagggtggattgaacacaagactttatctccagtccttcctgattttccatcaaagtgacagtaaggaataaagaatgtaaacctacaaggacaaagagaagaggagacaacagcagacaagatattaacacctttttggaaagtgagaaacaggttgaggagtgatcactgacacagcagagaacaactgaaaccaaaggccatttggagtctgtaaaagctcggggattggagggctgaaggaggcaaggggaagagcagggctgaaagcagcggctgctaggagaatgcataaggagagatgaaacacccaagatacttatccatctcctctcaaagccaggcaaattccagccacctcacagaagaccagcagtttattctgtggaattaagtaaaagtctgcatactgaaggatagaaccctcagccctcactcctaaattggtcccagagaaaagacctccagattcttccagttgttgggggagtcttccctaaaggaccaggttcctacttgatcactctgcagtgaagcccaacagccaataagcttggtcctcggtactctgtcttcagtagctgtttcttggtccttggtccttggtactctcactcatcattgttcacagattgccctgaggagtcccagatccagtcccaaatccacctgcccccaacacacagagcagccaactctttagtgtcttactccaaaatattgagacagccaagccgcaagaatcaccacaggtcgggtgcagtgactcacgcctgtaatcccagcactttgggaggccgaggcaggcggatcacttgaagtcaggagttcgagaccagcctggccaacatggcaaaacccctctactaaaaatacaaaaattagctgggcattgtgacacgtgcctgtaatcccagctactcgggaggctgaggcaggagaatttcttgaacctcagaggcagaggttgcagtgagctgagatcgtactaccacactccagcctgggcgacagagggagactccatctcaaaaaaaaaaaaaaaaagtcaccacacatttgaggaaaaattctgttaaaataaaaactttagacaaattaaatttagcagagtttatctgagcaaagaacaattcatgaatcagccagcatcctgaaccagtagaggttcacagagttttaccacccagcagtatgggcaggcagtattaatggacagagaaaggaattgatgtatagaaacagcttgattggcgacagatcagtatttgccttatttgggcatggtgcaatgaggtgtttgccttatgtggacatgttctgatgatctggcagcttgtgattggctgaaaattctgctatatttggctgagacttggctgcttattgtaagaatatactctcaagttacgttgcagtttgtttacatattgaattatgctacagtccactatgtatggagtcagctttatacctgggtgacagagtgagactttgtcaaaaaaagaaggagaggagaggagagagaggagagagatgaggggtggggaggggaagggaggaaaggagaaaggaaggaaggaaagaaggaagggagggagggaagggaaggagggagggaagaagggaaagaaagaaggaaggaaggaaggaagaaagagagagagagaaaggaaggaaggaaggaaataggcaacacataaaataaatttttttaataggatcacaggtcactgtgaacaatagccgttcattaaatgacttcggaggcatatacaaaaagttacatagttgtagaaaaagcttagctgttttaatagcgagttctcagttttcttaagtgatcaaaaacctaacaaagacagcatgaagcacaggaaattatctgggtagaacacagaatctttgttttctaggccaactacctaaagagaaagaaaaacattttacaatttcctattatgatcagaccaataatctaagaacaccatgttgttttaatggagagaaccaaattctagttttgcatcagtgtaattttgatattaatgctagctcttatcgcccaggctggagtgcaatggtgcaatctctgcttactgcaacctccgcctcccgggttcaagtgattctcctgcctcagcctctcaagtagctgggattacaggcgcctgccaccacacccggcttattttttgtatttttagtagagatggggtttcaccatgttggccaggctgggctcgaactcctgacctcaagtgatccacccgcctctgcctcccaaagtcctgggattacaggcgtgagccactgcacccggtcgctaacttttattcttaaaaaacttgtaaataattacctcctaatcttaaccagcttgatcacccataaaatttctttcacaagattcatcttccacaaacctcctacaactcttatatccattcactttttgtcctatactttcctcttctcattttcgaaaaatcagtcatttcactttaggacaaaatttattctctttttccgttatcaaaacaaaacatcctcacgtcttatagcttttccttagcttcctttgtatatttctttttcatatattcctttttcttaccttccttgtatattttcatatagattttcccccttattgtttctagtaattgtagctacatatattaattagaattcttaaccccggccaggtacagtggctcatgcctgtaatcccagcactttggagtccgaggtaggcagatcacttgagggcagaagttcaagaccggcctggctgacatgctgaaaccctgtctctattaaaaatacaaaaattggctgggcgtggtggcgggcacctgtaatcccagctactggggaggctcaggcaggagaattacctgaacccaggaggtggaggttgcagtgagtcaagattgagccactgcactccagcctgggtgacagcgcgagactccatctcagaaaaaaaaaaaaaaaaaaagaattcttaacccttagtgaccttaatttccatggacattagaaagtaagcatttgtgaattgtgtgtcacaccagctgtagattggtaaatctatgaaccataatgtctagaagcatgagctttctcatagtacaatttgtcagtgtggcacagaacatgtttctcaatggtccaaaatgtctttaagtctctctgtaaaaataaactgtaaaggaggcaaaatttcatttgtatccctttaggttttttgtttgtttgttttgtgaggcctgaaaactaaattgttgtttgtacagatttccctcctcctcaactttctattcttgatgctaagagtgttaaaaccttctggtggctgagcgtggtggctcacgcctgtaatcctagcactttgggaggctgaggcaggtggaacacttgacctcaggatttcgagaccagcctgggcaacatggtgaaaccccatctctacaaaaaatacaaaaattagctggatgtggtagcttgtgtctgtagtcccagatactttggcggggctgaggcgggaggattgcttgagcccaggaggcagaggttgcagtgagccgagatcttgccacttgcactccagagtaggcgatagagaccctatttcaaaaaagtaataataaaaccttctggtataggaaggacatcttttacatgggaattttatcttacattcatttaactcacttattttcaacacttatgcttggattgcctataaagatgagataataaacaactagtcatcattttgtttttcttgctgacaaattttataatataaagacaacataagcttgttttaccagtaaacctagataggaaatcatgcatctttatgatatttaatccccaaaactatgaaaacatgtctgtttcagtcaaaccaacaatattcttatttgccaaagattacccaagtcagatgagctgcaaaagtatttgaggtagttcttaattttctgagagaatacttcatttatacaagcacttatttttcttaaagccaacaaaatagagctctttcataatttaattttggagcattaaaaggagataagaaactatgatacctgtatcatacatacagacttatataaacataaacagcaacagatcttacagctttcatttaaatatcttagccatgttccaggtacagtaatataaaactcctgaatttattaaagactatctggatccaaattgttcttctggccaatggaacaagatttcttgcccagatgactaaagcttttgaataagattcgtgaaggagcttttaagatttttttgtttgatttctgtaaggaacctattataaagaggcaattttttattcatttaatcttttagatgcctctgtgtatcaattaaagaatgcatcccattgcttttgtggcatttttgaacctttcttttctaatgcaccttgcaagtgaacagttttatctaggtcaaaactttcccactgtggccactgtaactcttaagttgtcctcagcaaagttaacccatttttccaaaaatacacatgttcctcataattgttgttcatgaagttagccaccgtcccagaaagtggcgtctcagactctggagtcccagactccttagatttggaggaactcactttcaaaaggcacctgcctgaggcttttaactggatccatttcagttaattatcagatctgatttgctcctggacccagtcctacttgacccagtctaagaattgttcaaataaacttggagaacacaaaacacaaattcctgaagcttggaatctgagatagaactcacccatgacctccagttgctacaagagaacaattggcacagtgtgccctgtcaggtacccttacttggtcactaaatgctcctgagggtcactggagttctacttccgatcccacttctgacaccaatctgttaaaagaaaagctttaggccgggcacggtggctcacgcctgttatcccagcactttgggaggccgaggtgggtggatcacctgaggtcaggagttcaagaccagcctggcctacatggtgaaaccccatctctactaaaaatacaaaaattagtcaggcatggtggtgggcgcctgtagtccaagctactcaggaggctaaggcaggagaattgcttgaagctgggaggtggtggttgcagtgaaccgagatcacgccattacactccagcgtgggggccaagagcgagactgtctcaaaaaaaaaaaaaaaaaaagaaaaagaaaaagaaaaaggaaaagctttagacaaatttagcagagcttatttgaaaaaataagcaattcatgaattcagcagcatgctaaactagtaaagactcggctgggcgtggtggctcacacctgtaatcccagcactttgggaggctgaggcaggcagatcacctgaggtcaggagttcaagaccaccctggctaatatgatgaaaccccatttctactaaaaatacaaaaaaattagctgggcgtggaggcacacacctgtaatcccagctactcaggaggctgaggcaggagaatggcttgaacctgggaggcagaggttgcagtgagccaagatcacaccattgcactccagcctgggcaacaagagtgaaacgccatctcaaaagaaaaaaaaaaaaaacctaaaccagtaaaggctcaaagaactccacctaaccatgtggtcaagtagtacttacagagagaaaaaaagtgacacatagaaatagcctatttagaactcggcatttgctttatctggacaggtctaagcactttgcagtctgcgattggctgaaagctcagttgcaatgattggctgagactcagctacttgttacaagaaactctcatgttaggtttgtttacatattaagttgggtttcagttcactatgtaaggaggcagcttaaggccaaatttaatctaatttaacacctccagcttgaaagacaaaaccaaaccaaatcaaccaagaaacagaaaaaagaaaattcaaagatgtatgagcatgcataactttgataaaaataaaaataataattatttgaattggcaattagaaaatagttatatcctcaggtaacagatgtctctaggtggatgagattgtgggtggtttttcttgttgttgatattttctgtgcatctctaaaaaacatctaatgctttgcaaagaacataagaaacagattagtacattagtggccttggaggaaacaatctcagtaaaacatgtgtttattaatgaatgtattcccccatccctttccaaaaaagttcataggtgtagttatagtcaaaggtaagaggcagtcttgtcagagccagtaaagtaaccaaccatcctggtttgcccaagaccaagcagcttcccaagacactagactttcagtgctaaaaccagagaagtcccatccatactaggagagttgatcactctagtctgtgtaatttgcaaagactctccatatcctttggttcctgtgagtctcaaatccacccagtgaggtacaggtgggccggtggatggtcacctccatttcagaagagaggcagctaaggctcagggaatctccctatccctgacccgggaaaggccttaagagaaagtggtcttttaaactgtgtgtatatatcactttgataaaattaaaaattagttttaaagaagagagagggccaggcgcagtggctcacgcctgtaatcccagcactttcggaggccgaggcgggcaggtcgtaaggtcaagagatcgagaccatcctggctaacacaggtgaaactccatctctattaaaaatacaaaaaaaaaaaaattagccgggcgtagtggtgggcacctgtagtcccagctactccagaggctgaggcaggagaatggcgtgaacctgggaggcggagttttcagtgagccgagattgcgccactgcactccagcctgggcgacagagtgagactccatctcaaaaaaaaaaaaaaaaaaaagagtgagggccaggcgcagccgtcacgcctgtaatcccagcactttcggaggccgatgcgggcagatcacgaggtcaagagatcgagaccatcctggccaacatggtgaaaccccgtctctactaaaaatacaaaaattagccaggcgtggtggtgggcgcctgtagtcccagctactcaggaggctgaggcaggagaatcgcttgaacccgggaggcagaggttgcagtgagccaagatggcaacactgcactccagcctggcaacagagtgagactctgtctcaaaaaaaaaaaaaaaaacaaaaacaaaaaaaaaagagtgggaatccagaatgatagaaagaaaatgagcctgggagggatgaactgcagaggaccataaggtaacatgggagcagttttgcaggtgtatacaactgtcaaaactcactgattgtacactttaattgggtgcagtttttgttgcccttaaattatgcctcaattagagagaaagagagagaatataaggaaatgggggcagccatggcgtccttggagaattcacacttgggacgacaactgctcatttgtgtactctctcctcctcacctgtcttccactccacccctgtctctgatggaacatctctccagctaagccatcttcctcaaggcagcccaattctctgtggggctgccacagcactaaactgttctctgtgtccccaggactccaacctgtctgtgcacacagaaaacccggacctcactccctgcttccagaactccctgctggcctgggtgccctgcatctacctgtgggtcgccctgccctgctacttgctctacctgcggcaccattgtcgtggctacatcatcctctcccacctgtccaagctcaagatggtcagtggctcagggatctcctaccgatggggctgggccctggggattctgcttttattttttaatttaattaaattaattaattaattaatttagagacagagtctcactctgtcgcccaggctggagtgcagtggcatgatcttggctcactgcaacctctgccttctgggttcaagcgattctcctgcctcagcctcctgagtagctgggattacaggcatgcgccaccacacccagctaatttttgtatttttagtagagatggggttttgccattttggcaggctggtctccaactcctgacctcaggtgatcagcctcccaaagtgctgggattagaggcatgagccactgtgcccagccagcattctggttttaatgaggccctctcccacctcctcggctggactgggttccccagtctcacctgacctgcttggggtcatgggaatctgacaactgagaatatatacagccagctgacatattccccacttgggaaagtttaagtaagttcagcaacactctccccacctccagcaagcttctggtcagctccattcccagacctcagtgccagtcccaggcaggtctagtggattctggtggcttcaggtacaaagaccccttcccagtgaggactgtccttgcctctggggatgcggattccaacctgtgctctcttcgcaggtcctgggtgtcctgctgtggtgcgtctcctgggcggaccttttttactccttccatggcctggtccatggccgggcccctgcccctgttttctttgtcacccccttggtggtgggggtcaccatggtcagtgtggggccctgggaaagtggatgggggaggtctccattgggttgtggactgtgatagggaaactgtgggctctgaggagagggctggacatattgggaatgggaagaagaagggggtggccccagaaacttctggccatgtgggatggggagaaatggaggcaggtccagatgtgtgtgttctgcccgggcctccctgccctccctgcacagctgctggccaccctgctgatacagtatgagcggctgcagggcgtacagtcttcgggggtcctcattatcttctggttcctgtgtgtggtctgcgccatcgtcccattccgctccaagatccttttagccaaggcagaggtaaggttgggggagaggggaacctgccaggtttagccctgataggagggtgacctcagggttcaaagtcactgctgggtcccaggtccctccctcgaggcttcaagtacaaacacaattgtgttgttctccacttgctacatttctacctggaagcaggctgaggagggggcaccagtgtaacacaggaatgagccaagatgccaccactgttggaccatcatgtgagggtagggggctgttccacagcacccacccaccaagtgcaatatctgacgtgggtgtcagtcagtgcctgtgtaatgaacacatgtatgcagacaagtgtgaagagttctggcttacctagaggtcccattagcatgttcccttcctttcttcccacctccctcagttcctggccttcctcttgatcttcagtggctgtgatgttgggctggtgggatggaacactgcaggccaacctagtgcctcccatttctccatctcagcgggaagcaggcaaggagagtagcaaagaacataggctgtgaacaacccacttactccccatgtgggctcgggcgggtcgctgaaacctttggagcctcatttccttaattgcagaaagggcgtcatgagctgtcctgcctgtaggctgatgtcccagttagacaaggtcatgtaggtaaggtgatggcaccacacctggcacaggtgccacacctggtcctcgctgaaccagagctcccttgtgatccttcctcatctctcagagtcctctgagtggggacctggaggcccccaggtgctgcctcctgccccagaggagactgatgccccaagggactccgcagggcaggggctgcaggcccaggcttttccagtgcttctgacgcccctccactctcccacccagggtgagatctcagaccccttccgcttcaccaccttctacatccactttgccctggtactctctgccctcatcttggcctgcttcagggagaaacctccatttttctccgcaaagaatgtcgaccctgtgagtttcccatggagggtgcgggggctccacagctgagtcctcagcccaactctgaccagcagcccccaacccctccagttcctttcaaagtgggagagaggtcatccccacaatctgtaaactggggcttggagcaggaacaagggtcccctccatttccctactctgctttgagagggtggtgggcactcctgattcccccgtcctattctctcgccttctagaacccctaccctgagaccagcgctggctttctctcccgcctgtttttctggtggttcacaaagtgagttggctcttccaccagccaggccagagggaggggagggatggaaggtgagatggagaaaggggagcagggcagcagtttagggaccgggctggccacctatcccaccccccaccgcagtgggcacagggcagatgagggtagggaagtggtctgggagggggaccaaatgcagaggcctggcctggcccagtgccgcccccaggctacaggccagccctgcatctggcaggctgtggggacaggcccaggaggctggaagaagactgtcattagttctgagctcctctgtttgtgataaacttgcagcctgtcatctccttggctgcgcctcagagcggcttgagcaggataactgtgtctgtgacctgggtgacagctcattaaccccacagcactgaggaagcacccgaggctggggccaaattgcccaggcctcgtcctcacccagggccccaggcagcgtggattccatcaccagggcctggggtggggaggagatgggacacctggggaggaggaggagaagggggtagtggtaggaacttcggagggagagccagtgacctcaagcctattcactgaggaaatgaaggagacacctttcatggtcacagtgcccgagggagaccctcctttctggagaccctggggccctggagacactgacccttggctccaggctgctaaaccctgaccctctgcggggctgcctgccgggcttcacctccccccaggatggccatctatggctaccggcatcccctggaggagaaggacctctggtccctaaaggaagaggacagatcccagatggtggtgcagcagctgctggaggcatggaggaagcaggaaaagcagacggcacggtgaggccctccccttgccccaacacccagccccttcgcttaccccagatctcctgcagaggacgctggtagaccttggagggcggcattgctggggtggcaagcagagcaggaccaggtgatttcttggcagcctcgggaccattctatgggaagcttaggcctggatggcgctagttctcccagctctggtgggggcaggagaatggctggcactttggagcaactactccatcccaggtcccatcctaaggatataaataaactcacttaatttttcaacagccctaaagggtaggttcaagtgtccctgtgttacagatggggacactggggccgggtgtggtggctcacagctgtaatcctaacactttgagatgccaaggcaggaggattgcttgagtccaagagttcaagaccagcctgggcaatatagtgagaccttgtctctacaaaaaataaacaagatgagccgggcatggtggtgtgcacctgtagtcccagctacttgagaggctgaggtgggaggatcatttgagcccaagaggtcaaggctatagtgagctgagattgtgccactgtactccagtctgggcaatagagtgagaccttttctcaacaacaacaaaaacagatggagacaccgaagcacagaaatttaacagagggcctcccagggtccccaagttggtggtggcagagctggaatccacatggagccggctggccccagaggttctcctcatatcactgcaccaccctgcctgactgagagggctgattccagggccaggagccagcacacccctgccaattctgcctcctcctgtctggaggcggcggctgaatgagatgatcttcccctgaggggtcttcccactgtcagcctcttatcaaggaccacaaacctgtctctggccaactgcctcaccaagagagctgacgctgagcatcatctttctccacccaattctgaccccaggattgaaccctccctcctcccatccacaatccaggcctaggagttcaatgtttgctcagcccggagcttccggttgtcaccagctgttggaggagcctggggctgggcatggttagcagtatcctggctttcatggcttggagcctccacgaagacctatgggcccccagtctgcctgctgcaccccctctcagtccctccatgccactccaccccctccctgttcagctgcccggtggctgtaccaacagccatccttgatcttatctaccttccctcttggcgtcctccctggagccagcactggggaggcggggagagggccagactggggggatagctgggttttagagtccttgtggtagcagtctggccaccccttcagatgccctctggcagctgaggacagagtcgcttgtgcaattcttatgctgtctgttcccctcccagctctgagagccaagaaaacagctccttcctcctcctcactcctagccagcccagcctagcccttggcttcctggagcccctgtccccattcctaacccactgctccttcctccctggaccagacacaaggcttcagcagcacctgggaaaaatgcctccggcgaggacgaggtgctgctgggtgcccggcccaggccccggaagccctccttcctgaaggccctgctggccaccttcggctccagcttcctcatcagtgcctgcttcaagcttatccaggacctgctctccttcatcaatccacagctgctcaggtctctccacactccggctcactatagccctgccctgggcagcagggctggctggctagcccagaggaaggaacaacgtacagtgaaaagaaccccagaccaggaaccagggaggctagctccactttctgtgtgacctttggcaagtggcattgcctgacttgtttcctcactcacattcaacttagaattgctgtgcatatactatgtgccgggcaccgtggtgtgtacgttaacaagcattgggtctttaaatcttcccaacaatcctatgcggaattgccccattcccatgtcacagatgagaaagcaggaactcagagaggtgaagtgacttggccaagggcacacagcaaagaaggaatcaggtctgagtccaggactctgagctccgactgaggtgctctgtccccaccatcaggctctaacatctgtctcaggaatggcttggactagaacgagctctcaaatgagagggtgggaaggagagctgcctagtagctaagtccccacctccttgcccctccgtgcatgcattaatttgttcagcaaacatttattgaacctccagggtaccagaatggtgctcgatactagggatacagagttcaataagacagggtcttgatgtcttatgggagaaaccagcgtgtaaatcaattagaattcagtgggggcagaagtgttctcgggtgtctggaaaaccccgggaggggcaaagaagccagcctgggatgcagcaggaagcacccactggcttgggaggtcaacgaatttggagagacaagtaggtgaagaaacaggggaaagttcagcctcagcttagtcacaaagccctgaaacagcatgactcaggtgtttctgagtggcagaggaaatggcaacgagagggaggggcaggaaaacagagagagggagagctaaggatatccttgaaagatctgagccagggaggggcatctggcttcaaggatctcctgccaggagtgtgggggatgtagggcagggtggctggatggaagtgggccaacccggtcagatggagtccaggccaggaatgagacaagtattcaggagcaatttgggagatgggcgtgtgcgccagagagacagaggagtgccaggcaacctgggtgctggcctgggtaactggaggacgatggatcttttgctgagctgatgggctcggtgggaggaggaggctgggtggggggcaaggtggtggatggagtctggtcatgtggggccagtggtgctggtgggtcctccaaggggagattcccagctagctggaagtcaaactctcgagcccaagagtttgagaccagcctgagcaacatagcaagaccctgtctctacaaaaaagttaagatattagccaggcctggtggcatacgcctagagtcctagctactcaagaggctgaggtgggaagactgcctgagcctgagaggttgaggctgccgtgagctgtgatggcaccaccgcactccagtctaggtgacagagagagaccctgtctcaaaaaaaaaaaaaaaaaaaaagagagagagagacaccagtcactgggctggggccactggggcccaccctactccaatatgacctcaccaaatgaggccacgttcacaggtaccaggtgttgggagctgaacatatctttctgggagacacaacttaagctatcacagaaggggaggcctggctatgattatggctggagggctccatgtagtcgagaggagagtgtcccaacaatgaagagactcggtcatgtcaataggtgaaggtgtagagcttccagcagaggtggccagggtgaagctcagcggcaaagggggcaacagcgcagcaagttcctgaggaggcagaggaaggccagggctcgggggcaggggcagcctccgacagcctgagcaccagaaaaaggaggacaagccactggagggcagtttgtgagtggcaaggagtttgtgggtggcagggagttctcaatgggtggctaagcaagaaggcaggtagctgctgagaggggtggggggctgggatgggcctgaagggaagagaagagaggtgaagaaggccccaagagcgggggcggattagggacctagagaaggttgctaggcagtgctgggggccactgagtttggaaaggtggatttgagcggcaagagtctttgtggtcatgtggcggaatctagagcccccagcagcctaggagaaggagcagggaagtccagtcaatggaaacgtggcatttcttcccgccatatgtcaggaggtaagaaggcaggcaggtgaggctggtggtgagagcgtcatcgatagggcgtgcagcagggtccatggtggatagagaacgaggtgaaggcagagtggagccaggaggtcgtggtcttgaggcagtactgggttgaccctccctggcccaagaggttggagggggtggaggtttcagaggccaggggtgcagtggagactgcgggtaaaagcaaagggcagcagaggagggagcagccatgggggcagcactgcccacctcactcctctctcctccccacagcatcctgatcaggtttatctccaaccccatggccccctcctggtggggcttcctggtggctgggctgatgttcctgtgctccatgatgcagtcgctgatcttacaacactattaccactacatctttgtgactggggtgaagtttcgtactgggatcatgggtgtcatctacaggaaggtcagctggagcagggcccaggggaaaggctggccctgggcagcttgcaagaggctcgcagccaagtccacccactactgtctacctgcaggctctggttatcaccaactcagtcaaacgtgcgtccactgtgggggaaattgtcaacctcatgtcagtggatgcccagcgcttcatggaccttgcccccttcctcaatctgctgtggtcagcacccctgcagatcatcctggcgatctacttcctctggcaggtgactctccaaccctgacctctgcctccttcctctgacatgctgcagaagtggcaagagaggattattctggaactgggagcatggcacatgcttgtagtcccagctgctcaggcggctgaggcaagaggatcacttgagcccaagagttctggctgcagtgcgccacgattgtgcctgcgaatagccaccacactccagcctgggcaacatagcaagaccttgtctctaaaaagaaacaaagaaaacagaaaaaaagaaggagggttattctgggttagcagaggggatatagaattgacacaagagctggctgggcacggtggctcacgcctgtaatcccagcattttgggagaccaaggcgggtggatcacgaggtcaggagttcgagaccagcccggccaggatggtgaaaccccatctctactaaaaatacaaaaattagccagacgtggtggcgggtgcctgtagtcacagctactcaggaggctgaggcaggagaatcgcttgaacccaggaggcagaggttgcagtgagccgagatcataccactgcactctagcctgggtgacagagcaagactctgtctcaaaaaaaaaaaaaaaaaaaaaaaaagaattgacacaagagcttccctaggcattggtggggatggagggataggacttcgaggatgctgatgtctgcaaaggaatcttcccaacatctgttgctatccttcctgcagaagccagggaggaaagaaagtcttggagggaggtgggtgtgactctggctgtcatcgtctatatttgccttcctgtgtgtctggacacccttctatatctgctgtctgtccctgtcgtcgttatctaatggctggctgcttctacaaatgttgtggtcattctgactttctatctgtttggccaaccaccatcttttgcttcctgcccatctacacatttcaagttaacaggcctctgtttgcctgttgggttctctctgtagactttggtaatctgtccctatgtgtcatctatccaccggtgcctcctcagaacctaggtccctctgtcctggctggagtcgctttcatggtcttgctgattccactcaacggagctgtggccgtgaagatgcgcgccttccaggtaggtgctgtcagaggtgcatcctcctgcctgcagcacccggccggctgcctgggggaaggtgtccactaaccttggggcctcccaactaccttgcttcctgagtatggatggctactagccatttgcagaaaccatagctcactcttccctcacagctctcagagggttttactgacattctcattttgtagcagaagaccaacgcttagagaaataatggcagtccagaatcaggcagggctgggactcaaacctgactatcctggtctaacaaggagttttcccgctgcactgtgctaagcatgaatagccagtcactcagtctactatttgcaaacatttcttgaagtgttttttttctttttttttttttttgagacagggtctcgttctgtcacccatgctggaatgcagtggcatgatctcggctcactgcaacctctgcctcccgggttcaagcgatcttcctgcctcagcctccctagtagctgggactacaggcacatgccaccacacccggcttatttttgtatttttttttttagtagagatggggtttcaccatgttggccaggctggtctcaaactcctgacctcaggtgatccgttcatcttagcctcccaaagtgctgggattacaggtgtgagccatcacacctggcctattgaagtctactagcttcccactgcccataggaaaaatgacaaaccccctaagaagactcagcaggcttctgcttaccttgcaagtcctcaccccctgcggactggccaagtttcagccagtctggtcttctttcttttctccacagcaccaagctcagggtacctctaggggccaccacatatactattccctctgcctggaatgcttgtcatccccctcttgcctgcctaactcctttccttcccttacctctcggcattgaagtcacttcctcggctgggcacggtggctcatgcctgtaatcccagagctttgggaggccgaggcaggtggatcacctgaggttgggagatcgagaccagccagaccaacatggagaaaccccgtctctactaaaaatacaaaattagccgggcatggtggcacatgcctgtaatcccagctactctggagtctgaggcaggagaatcccttgaatccaggaggcagaggttgcggtgagccaagatcgcgccattgcactcccacctgggcaacaagagcgaaactccgtctcaaaaaaaaaagtcacttcctccagaagtccaccctgactgcccagtctcagtctaagttagtttccctgccatcacctcattactttcttacaggatcctgtgatttcccatcagaacacacataatgattaataattaagcatttattcagatcattgtttgcttattgtatgcctcccccatcagatcgtcagctgtatcatggcaggggccttgtctgaattcatcgtgacaaattctacacgtagcccatggcctggcacatagtaggcactccataaataggggttgaatgaatacattaatctggtgtgccacaccttgggctaaggtcttggagaacaaagagaaataaatagtccatcccctcaggaagctcacagtctgattagagaaacatatatgtaaaggaatggttatggaacaaaaggaaagtgcaatgtgctttagaaacccagggaaggggaccaggtgtggtggctcacacctgtaatcccagcacttggggaggccaaggtgggaggatcacatgaggccaggagtttgaaatcagcctgggcaacagagtgagacctcgtccctacaaaaaaatttaaaaattagctgggcatggttgttcatgcctgtagttccagctagtcaggaggctgagacaggaggatcaaaggagcccaggagtttgaggctgcagtgagctatgattgtaccactgcagtccagcctgggcaacacagtgaggcaccatctctaaaataaataatactagcaataataataagaagaagaaaaagaagtagtaggagaagaaacccagggcaggggacagaggatgctgcctggggaggccggtgcagtggcactgagggtggagatggatcttgtcaggcagaggacacagggaggcaggggctgtgcattccaggccaaggcacagcacaggcccagcaaggagttgtgagaaggaatggtgggcagcgtggaatggctgcaatggatgagaatggatggaaggtaggaccctgtgagcaggaggtcaggggagggagcaggtgtgccactgacactctttctgcctgcacaggtaaagcaaatgaaattgaaggactcgcgcatcaagctgatgagtgagatcctgaacggcatcaaggtgctgaagctgtacgcctgggagcccagcttcctgaagcaggtggagggcatcaggcagggtgagctccagctgctgcgcacggcggcctacctccacaccacaaccaccttcacctggatgtgcagccccttcctggtgaggcttggcacagggctgggtccctgcctccagggctctgggtgcccaggcatggccagggctcattggactctaccctgacaccacctccacgctgctcaggtgaccctgatcaccctctgggtgtacgtgtacgtggacccaaacaatgtgctggacgccgagaaggcctttgtgtctgtgtccttgtttaatatcttaagacttcccctcaacatgctgccccagttaatcagcaacctgactcaggtaaccctgggtagggctgggggctctactggagttggaacaggttgttggggtcagggaagggtcacttagggcaagggataatcagggggagttattggattcagggaaggttgctagcattatgaagagctattcaaggttgaatgaggtcattaaggtcaggggtcatttggagtcacaggtggtcaggtcgggtgtctggaaacctgagttctgtagatagcctcctcttaccaacctggactttctctttgggcagtgggagccatggaagactcagtcgtgggagggaccccagtgctagtgtctgggccctcagggggtcctgcctagcccaggatgctggggatggggcgagggtaggggttgggggttgggaaagtacagtctctagggctgactcacatcctcccgtaggccagtgtgtctctgaaacggatccagcaattcctgagccaagaggaacttgacccccagagtgtggaaagaaagaccatctccccaggtctagagagcccctacctgggctgcctgccccagtccttgctccagaaaaacctctgtttcaagcttttcctttgttctctcctgaccccttttcttcttcctctgttcacatctgcttcgactctgacctcctccctcttccgggttctctgctctcctccgccctcctccacagggctccccacatccctttcttcctcccttttcccaaggatcccctccccatggcccaggctcctcccctgtcctcctttcccctgccccccagcctccctgcaggctaccccatcccttgagctccctccctgaccctgcccaccttggtcctctcaggctatgccatcaccatacacagtggcaccttcacctgggcccaggacctgccccccactctgcacaggtaccagcttctcccactcccttcccagctgcccacggtgggctggaagttcagatcaatagcagcaccctgcaaagcctttgaccaagaatgcaggaagagcttcagcctgccaggggggtgtctggaagggcggagggcttggttctgcaggtggagggttggagaccaaaaccctgatccctgcctctaactggactcctggggtccttgcccccagcctagacatccaggtcccgaaaggggcactggtggccgtggtggggcctgtgggctgtgggaagtcctccctggtgtctgccctgctgggagagatggagaagctagaaggcaaagtgcacatgaaggtgagagaggcaggggctcctgggcagggtgtggggctcagccaggccttgggcaagccccgaggtaaatttctcctgtggccagggctccgtggcctatgtgccccagcaggcatggatccagaactgcactcttcaggaaaacgtgcttttcggcaaagccctgaaccccaagcgctaccagcagactctggaggcctgtgccttgctagctgacctggagatgctgcctggtggggatcagacagagattggagagaaggtacagagtcctcttccatccctaagaggctagggcatagagctgcccacctcaacccagcccaggtccatatattcatcccttcattcacacattggtgtaacgttatgcccaactctgtgccaggcactggggaaacagatctattagcagatctgtttagtgaacaagtaggaactattgaatattctaggagccaggctgaaggcctgtgcagggtacagggagggcacagcagggagcctacataaggaagagcatcactttttttttttctttctttctgagataaggcctcactctgttgcccaggatggagtgccatggtgacatcatgggacgctgcagcttggaactcctgggctcaagtgatcctctcgcctcagcctcctgagtatctgggaccacaggcacatgccaccatacccagctaaatttttaattttttttagagacagcgtcttgccatgtcgcccaggctggctcaggagatcctcccaccctggcctcccagagtactgggattacaggcatgagctgctgcacctggctgagcatcactttttttttttagacagagccttgctctgtcacccaggctggagtgcagtggcgcagatcatggctcactgcaacctccacctcccgggttcaagcaattctcgtgtctcagccacccgagtagctgggattacgggtgcgcaccaccacacttggctaatttttgtgtttttagtacagacggggttttgccatgttggcccatctggtcttgaactcctggcttcaagtgatccccccgcctcagcctctcaaagtgctgggattacaggcatgagcaccgtgcctagccttaagcatcacttttgacctcagttttaacaactgaggaggaggagctcatcatgtatctgttcattcatttaccatatatttattaagcacccactctattctgggaaatagtatacagtagtgaatactaaaatgccgggctaatatctctaccttcatatagctcacattctagtggcaggaagagataataagtaagataaataagtacaatatataatatgttagataaatgctcagtggaaaaaataaagcggggaaggaatacaggaatgcctgcagagttgaatggttaaggtagcttgggaaatcctcactgagaatcagagaactcaacaaagagaccgagtgagccttgtctggagccagaaagctctgtctggggccatggaaccctgtatggggtcttggagttctctggcatgactaggagttgggaaatggagggaaaagatagagagaggcagaaccctgattaccttggttaagattttggcctttactctaaaaaacatggaacactggggaaaatttggggctttgctttttaacaatttttaactgtggtaaaaaccacacataacataaaatatatcatcttgcccggcatggtggctcccagcactctgggaggctgaggcaggtgtatcatttgaggtaaggagttcaaggccagccttgctaacatgataaaaccccatctctactagaaatacaaacaaattagccgagtgtgatggcgtgtgcctgtagtcccagctactcaggaggctgaggcaggagcattgcgtaagcccaggaggcggaggttgcaatgaactgagattgattgtatcactgcattccagcctgggcgacagagcaagactctgtcttaaaaaaaaaaaaaagaaaaaaaaacttaatcatttcttagtgtacagttcagcaatgttaagtacatttacattgctgtgcaaccgatctccagaaccttttcatcttgcaaaactaaaattgtgcctattaagcaactcctcattccccactgcccctaggccccagtaaccaccattctattttctgttcctaggaatttgactacttagtatcttagtccattttctattgcttataagagaatgcctgaaactaggtaatttataaagaaaagaaatgtattttgtacagttacggaggctgaagagtccacggtccaggggctgcatctggagagggcctccttgttggcggggagtctgcagagtcccaaggccatacagggcatcccatggcaaggggaccgagcatgctagctcaggtctctcttccttccttccttttttttttttttttttttttttttttttgagacaaggcttcactctgttgcccagactgtagattggagtacagcggcgtgatcttggctcactgcaacctccgcctcccaggttcaaacgattctccttcctcagcctcccgaatagctgggattacaggcgcacgcaactacagcccgactaatttttgtatttttagtagagatgggtttcaccatattggccatgctggtcttgaactcctgacttcaaatgatccacccacctcgacctcccaaattgctgggattacaggcatgagccaccacgcgcgacctcaggtttctctttctttcttataaagccaccggtcccactcccccagtaacccattcacgcatcaacctattaatccataaatggatcaaccattcatgagggctctgttttcatgacctaatcacctggtaaatgccacccctcaatcctgccacactggggggtaagtttcaacatgcactttggaaggaacaaatatttcaaccatatcacctaggtacctcacgtaagtggaatcatccagcatttgtcttttcgtgacgggcttatttcacttagcataatgtcctcaaggcatatccatgttgtagcatgtgtcagaatttccctccttgtaaggctgaatgatatttcattataggtatatacacatttgtgtgcccatttatccgtagatgggttgggcaggacaccaagctgggcagggtggtgaccaatggagcagaatggcctcacctgccccaggaggacttaccctttacctctgtccctcacagcattgcagggacagactaggccccatgtgaaatatagattcagaagactgctgttctggtcaggcacagtggctcacacctgtaatcccagcactttactttgggaggctgacgtgggccaattgcttgagctcaggagttggagaccaggctgggcaacatatggagattctgtctctataaaaaataaaacattttagtcagtagccaggcatggtggtcctgcaatcaatcctagctactcgggaggctgaggcatgagaattgctcaaacgcgagaggcagaggttgcagtgagccaagatcgcaccactgcactccagcctgggtgagtgagaccccatctcaggaaaaaaaaaaaaaaatctgccatcccaaataacagtggacaggccgttgtctccctgtgcctgtctgaccccatttttcccaccccccgcctccctccagggcattaacctgtctgggggccagcggcagcgggtcagtctggctcgagctgtttacagtgatgccgatattttcttgctggatgacccactgtccgcggtggactctcatgtggccaagcacatctttgaccacgtcatcgggccagaaggcgtgctggcaggcaaggtgaggcctgccagaggctaagggggctaaggtgagatctgaggcccgaagagagagctggtgagaggctgaggggtttggatgagacttggaggtgtggggggcgcaagaagtgggcatgtgggttgggcatcaggagaaacctgtggggacaactcccccacctgcgaggttctgagcaggctgtggcgagcacagggtgagtcacccatgtgcctgtccaagctccctggcacatgggcacacttcacactcactctgtggctccgtgcctgtgccaggggtgtgctggagggtggtaggggtgagagcctgctgccttctccccagacgcgagtgctggtgacgcacggcattagcttcctgccccagacagacttcatcattgtgctagctgatggacaggtgtctgagatgggcccgtacccagccctgctgcagcgcaacggctcctttgccaactttctctgcaactatgcccccgatgaggaccaagggcacctggaggacagctggaccggtatctgccatcctgggccctctgattcccatgccttcccagcattccccctgtctggggtctctgagtgtgtctagactggcctagtgttgtgccaggcaggttctgggaaacttgggccatctgtgtgacagtcaccagaggtaaagtaaactggacatagtcgggtcccactgcctcctccatcctactctaccctaactgtgggaactcagatcctccgccccggtctcagagcctgttttctttctttctttctttctttctttctttctttctttctttctttctttctttctttctttctttctttctttctttctctctctctctctctctctctctctctctctctctctctctctctctctctctctctttctttctttctttctttctttctttctttctttcttttttttcttttgaggcagagtctggctctgtcgccgggctggagtgcagtggtacaatctcagctcactgcaacctctgcctcccaggttcaagtgattctcctgcctcaggctcccgagtagctgggactacaggcatgcgccaccacgcctggctaatttttgtatttttagtacagacatggtttcaccatgttggccaggatggtctcgatctcttgacctcgtgatctgcctgcctcggcctcccaaagtgctgggattacaggtgtgagccaccttgcccgatctcagagcctgttttccatctgttgaaagcataggagggcccaggcccagcttgtgtggcaaggctgcttcatggataaatagtttggcaagtatgcaagtgcttagcaaagccgcttatttatcaaccaaaatttattggacaatcactatatacaggcactgttccagacactaagctatagcagtgagcaaacaaaaaaattatagtcctcatggagcttgttgacgtctctgggctcacaacatgcccctggctccttgttgcccagacccagctccccagcccccaattctggattggctcacagaccttttcctgggctttcttgcctatggctatacatacagccaacgtgccttgagcatttaccaagtgctgtgcccctcgctcacacactggacacattttcttttaagcctacagtcatgcagattttttttttttttttttggggacagtttctcactctgttgcccaggctggagtgcaacggtgcgatcttggctcactgcaacctttgcctcctgggttcaagcgattctcctgcctcagcctcccgagtagccaggattataggtgcccgccaccacgcccggctaatttttgtatttttagtagagacggggtttcaccatgttggccaggctggtctcgatctcctgacctcgtgagctgcctgcctcagcctcccaaagtgctgggattacaggcgtgagccaccatgcccgaccaaggacgtgagttttaagctcagccagtctaactccagagcccaagttcctaacccttgtatttgagtccgtttctccataatttgtgaagagagtttttcttgttgcttaacccaagtctttcttgttgccctttcaatccccctcattttattttcatgcttgtccattgaacccctttcattagagtggggaatgggagataccaggggcttgcagggagaactagctgaaccctatctccttcctcccaccctactgcagcgttggaaggtgcagaggataaggaggcactgctgattgaagacacactcagcaaccacacggatctgacagacaatgatccagtcacctatgtggtccagaagcagtttatgaggtgagttcctgagagctcccagccctcccggaggctgtatcaggcctccccaggccctgccagatggggtgcaggtttctccctgacactcccagcctctgtcctggggggtgcttgaggccccctccctgggcctgaccagctgcctccacagacagctgagtgccctgtcctcagatggggagggacagggtcggcctgtaccccggaggcacctgggtccatcagagaaggtgcaggtgacagaggcgaaggcagatggggcactgacccaggaggagaaagcagccattggcactgtgagtcggtggggcaagaggggctggaggggatggacaggcaggccccagcagccccagggtttatggagtcccctgtccctgactgccatggctgctccctacaggtggagctcagtgtgttctgggattatgccaaggccgtggggctctgtaccacgctggccatctgtctcctgtatgtgggtcaaagtgcggctgccattggagccaatgtgtggctcagtgcctggacaaatgatgccatggcagacagtagacagaacaacacttccctgaggctgggcgtctatgctgctttaggaattctgcaaggtgagcttgtgggggtgtccagaaggggctccaatatcccttcttctctgggctgccaggccccccaaaccgtgcccttgcatccaagcctccctaacccactctggtcaacccgtgtctctgattctgcccctttgtgcccgctcactagtccaggtgagccagcgccctctgccttctccaacagggttcttggtgatgctggcagccatggccatggcagcgggtggcatccaggctgcccgtgtgttgcaccaggcactgctgcacaacaagatacgctcgccacagtccttctttgacaccacaccatcaggccgcatcctgaactgcttctccaaggacatctatgtcgttgatgaggttctggcccctgtcatcctcatgctgctcaattccttcttcaacgccatctccactcttgtggtcatcatggccagcacgccgctcttcactgtggtcatcctgcccctggctgtgctctacaccttagtgcaggtgtggggtgggcgtgattccagtgtgggcgtggtgttattggggcggggcaacacatgggcgggggcagcaggggtgggacacttcaggccaccaacattacagagttttgttaggggcagtcgttgcttaacatttatgttaggggagccattacttaacctctttgaaactcatttgcctcacctgtaaaatagaatgactcatagaccttcctcatggagttggtgagagaataaaatgaaatagttatacattgtagctggcactgggactttcctgttggctttttttttttggggggggggggacggaatctcgagtctcgctctgtcgctcaggctggagtgcagctgcacgatctcagctcactgtaacctccgcctcccaggttcaagcaattctgtttcagcctcccaggtagctgggattacaggcatgcgccaccacgcccagctaatttttgtagttttagtagagatggggtttcactatgttggccaggctgctcttgaactcctgacctcaagtgatccgcccacctcggcctcccaaagtgctgggattacaggtgggaaccaccatacccggccttcctgttggctgttttttgataaaacattgtcaacagtttgggacacattatcctttccttccttttatacatatctaaacatacgtgtatgcatgcgtttaacatagatgagttgataaccttcagatacagctaactgtaaaaggcctttgcagacactgaactcctgttctgtaatgaattagtcagttcccggggatagatgctcaacacctgggtatagcgaccatgatctaggctgtgctctgtgctgggctaggggagaatcagatagacatcctgtatagcctggatatctgaggccacagaggagaggatggaaactggaggcagagccgtgttgttgtggggttgaagcagagatgatcagagggagggagtgaatgacacatcaaggccccaagtcttgggtccttggaggtgggggaaggcagcgatgtctcgtggtgggagtgaggctggctgggaggactcatctgaaaatggatgagttcagagacaggcaggactgagttgggggttccatggccctgaccccaaactccttctccctccatcagcgcttctatgcagccacatcacggcaactgaagcggctggaatcagtcagccgctcacctatctactcccacttttcggagacagtgactggtgccagtgtcatccgggcctacaaccgcagccgggattttgagatcatcagtgatactaaggtggatgccaaccagagaagctgctacccctacatcatctccaaccggtcagaagccgcctccctcgctccctgctcctccaggaattcccagcaggctctctggtgttcagggtccttgtccctcctttcccctaagcagaaaactggccctgccctgcccctgccccatttcctcctcatctgatcccccataggtggctgagcatcggagtggagttcgtggggaactgcgtggtgctctttgctgcactatttgccgtcatcgggaggagcagcctgaacccggggctggtgggcctttctgtgtcctactccttgcaggtatgaagggcctggaccccagggcagggccaccactgggacagaaaccacacaggtgttccaggcatctcccgagtgcccctccctgctcagtatgggcaccagccacagggtctgttctcaaggactgtgagaaaaaaaaaaaaagaaaaaaatcattgagttgacaagtttataaccacacaccatggctggatgttcctactttccttccccaagaagcccatgttctcacattcagaaagaattctgttgaataatctctgtcctcaaaccccacatctctctcctgctcagccgtcgaccttgcctgacacctcacagttcaactggagagacccccatcagcaggagattgtgctgcaggctgagcaggtctttgtggctggagaaacaaaatgttttaaaagcccagaagagggactgggtgcagtggctcacacctaatcccagcactttgggaggcggaggtgggcggatcacctgaggccaggagctccagaacagcctggccaacatggtgaaaccctatctctacttaaatacaaaaattagccagccgtggtggcgggcatctgtaatcccagctactcaggaggctgaggcaggagaatagcttgaacctgggaggcagaggttgcagtgagccaagatcacgccactgcactccagcctgggtgacagagcgagactccatctcaagagagaaaaaaaaaaagtccagaggagttttcttgctttggggtgttgtagaaatgatcttggagcttagccccaaaggacaaacagaatttctcttgtctctgggcaagttgtaggctcatgtgacaggtcaggacagtgtagggctggcataccgctcgctcacgttcacatgcttgcagagaacgtacacagacgaggtgactgaagcctggtctgcaggtcaggcaggtcatcctgatgccagcttgtactgtcaaagagtcacctaactgcaaacggaatttttgtaaagcagatcacattgttaatacctcaggtggctcaaaccttgaacgcgttggcaaacaaaaaacaatccagaaaggtcaattttcacaaaggtcagtgtgcacatgaatctacttgttaaaatgtacattttgattcagtagacctaggatggggctcaggactctgcactttgatcaagactccttggtacgcaaagtgtggcccatgggccagttgcatcaccatcctctgggagcttgttagaaatgaagaatctcaggttccaagtcccacctcagactacagaatccggcgttgcattttaacaagattctctgggaagtcttatacatattaaagttggagaaacagaaaccaaggcgaggtggtccttggttaagtctgcactgtcactgcccaagggagtcattcgtgattacagccccagctggcatgcctgtgggcttgatccaggcccacctgggtcatccatgggctaggatcccatggatgggcacatgatccaggagtctgaactcctcccaaagccattacggtggggaggggagatcgccatacgtataacccagtccctttggccaggtgacatttgctctgaactggatgatacgaatgatgtcagatttggaatctaacatcgtggctgtggagagggtcaaggagtactccaagacagagacagaggtgggtactggcatgagcccgggacagggggaatctgaagtagctggggaagaaagcttggtggctctctctccctcaacatcagggcctgccacgtatggggctcttcattcatttacccattcactccttactgagcatcaaccaatgctctatgctaggaggtgtagagagatcagagttgagcaagacggtgtttgcccttaggtgattctgatttggtgggaggggtaagacctattgcagggctttgcagtggatgaccagatctctggcgtggtgcacctggagagggcagatgagggagatccttcagctggggtgaccaggggagacgagcttagatgagaaggatggacaggctttgatagactaagtaagatggtggggtgggcagtgggaaggtgagcattccagccaaagagaccagcctgggcaaaggagtggaggtggggcagcatgccctttgttggggaaaaggagttgttccctactgggggttccagacttttctccaccgccccctctcatggtcacaccttagccctcttcatgcccagaagctgcagcatcagtgtcaagcatcccatctttggcccacgctcctatcctgctcgctctcatgctccaagtcccccactgtcacagcagtctgccttcactgggactcccaatcccatgacccccctttgtgtctctgtccatcagcttctctgccttcacctccctccccggccagcctagagtctatgctccaccaacacaaacgctctcacctgccttgcccttctctttcttctctctcagttgtactcacctccaaaacccaccccagctgagcccaccaatctgccttcttcatgcctgcactgagcacttaaaaccttgcaggaggcggggcacagtgactcatgcctgtaatcccagcactttgggaggccaaggtgggtggatctcttgaggtcgggagttcaaaaccagcctggccaacatggtgaaaccccatctctactaaaaatacaaaaaaatagctgggcgtggtggtgcacacctgtattcccagctacttgggagtccaaggcaggagaatcgcttgaacccaggcggtggaggttgcagtgagccgagattgcgccactgcaccccagcctggataacagagtgagactctgtctaaaaaaaaaaaaagcttgcaggagaaaaatcactgagttgacaagtttataaccacacaccacggctgcatgttcctgctttgcttccccaagaagcccatgttctcacgttcagaaagaattctgttgaataatctctgtcctcaaaccccacatctccctcctgctcagccatcgaccttgcctgacacctccataaaaagtaggttctaagacgtgaactccctcaaccttcctgcctctcagtctttaaacccgcctgtgtctccttcaccgttgtctccttttcacttttagcaggaatcatccctttctgtttcaaagcccagcccctccatttcttctcatggccgcttgaggacctggcttcctcagtcccgccctccatctcctgtcattcttgctccctctgttggacgcttcccatccacatgcaaaaatattccatcacatcttccattccagacacacacgcaaaccctcccccctgcactccactgccccatttctctgctctcctctgtcatgaagcatggtttaaagtatggtctctacaagctgcatccgcttcctcatcagccttgatgtcatctgcctcctgcagtcctctttctggccctcgctccacggagacagctcaccagtgaccttcctggttccaaatccaggggacgcttttctgttctcgtctaattcaacctcttagcaacgtcccaataaaatgacctctcccttcttcttggagtcctcgtggattccgtggcctgcattgcacccgccagtccacctgcctgaccccagcctggcttccccaggcatcaccctctggcccctcacccctcactgtctgggagcttccagttcccctgcttcatgtctagcagcccagttcctgcatggatacccatgctcctgtctctgtatcctataaatgtctgccctcaaccccacggcccgttctctgacgcctccttgagagaccaatctgtgcctgctgctctgctttttcacctctggccgcgtggtttctcctgcctcgaagcagggctggctccacaggaatagtcacagcgtccccactcccggaagaactgcgcgtttagagtaatgctctgccgtcagtgccttgacattctccatcattcttcaacaagaagcctcaggttttcattttgcactgggcctcccaaattatgtagccaatcctatctcaaagccaccatcatcttatgccctgccagtctattctgcttgtagctgccaagagatttaaaaaaaaaaaaaaaaaaaatcaaatcacgtcattcctctgtgtacagccctctaatggctttgcatcttaatcagagttaaaaaaaaaaaaagtccttaaaatggcctgcaaggccctacatgatggagccaccattacctcagcctcttacctcttgcctttgccagtgtgctccagaacacacctagagccatttatgcctgctgttccctctgcctggcatgccctccctccagatatccacttggcttgttccctcacctccttcgggtctttactaaagtctgcctcctccaggaagccttccctgaccaccctgtataaagcagcaacactaagcacttcttggccccagcactcatcacttcttgcgttgtatagatttgcttatctgttgattatatgcctccctctactagaacataaatctcacgagggtgaggactgtttcaatggggtaccattgtgtccccactgcctggcactgggctgccacccagtaacaatgaatgggtaaaggtaatgagagggggagttagggcaggcagggagggcacttcaaggaatataaggtgtggcacagtggctcacacctgtattcccaggactttgggaatcctcctaggcaggaggatccctggaggctaggagttcgagaccagcctggtcaacacagcgagacacagtctcttcagagtttttctttaaaaaattagccaggtgtggtgacacaggcctgtagtcctagctaatcaggaggctgaggcaggaggatggcttgagcccaggaattcaaggttgcattgagctatgattgcaccactgcactccagcctgagtgacagaacaagaacttgtcacagaacaaaacaagttagccaggcatggtggcatgtgcctgttgtagtcctagctactagggaggctgagggaggagaatcgctggaacccaggagttcaaggctgcaatgagccatgattgagaccctgtctctcaaaaattaaaaaaaaaaaaaaaaaggaacatgggcaagcagggagactgggaggggaaggacaggggagtgttggagtaggtctgtggggaataaagtcagagggataaaggagtcattgaacacaaggctgagccacaggggtgccaaggaccctcccagggaccatagttggggaggattgaggggccttgggggagagagaccgaaaggtgaaagagggcttcactgggcagctgatgtgaccccatctgcccctcctgccaggcgccctgggtggtggaaggcagccgccctcccgaaggttggcccccacgtggggaggtggagttccggaattattctgtgcgctaccggccgggcctagacctggtgctgagagacctgagtctgcatgtgcacggtggcgagaaggtacgcgtggggtaggcgggcctgcgtgtgtgttcatgcctgcagacatggccacagcccttgtggggagcttgggtcttttgagagcacaagtgctccagccacatgtttgttcggcctccaggagagtcctggagatgcgcctttgacctctcagcttccccctcagagccccttcccttctccgcccaggtggggatcgtgggccgcactggggctggcaagtcttccatgaccctttgcctgttccgcatcctggaggcggcaaagggtgaaatccgcattgatggcctcaatgtggcagacatcggcctccatgacctgcgctctcagctgaccatcatcccgcaggtaggagcctggcatgggctggccacactcaccaacggccctggaggcaggccccaccttgttctgtagctttaggatggagactgggaccccagtctcagaggcttgggcaggtggggagggacagacagcaggaagcagagccatcagtgagccacccgtcatggatctggaaagctcagacttaccctgcccagtcaggccctgtcctttgacctcctgggccagcacatggggaaggacccctccaagaaccccttcccccgagacattctgccctggtctttttgcgcagctctaattacatttcactttttctgtctcctccggggtattttttgtttctgccgagtggacactttggagtcagattagtggctctggttcctgcttcaacagaggtcttcgtgattggcaaagctgaggtttatcactcccctacaggcaattttctatctctttggccattgtgtcctctggggagctggaaacagagtgggaatgctgccaccttaatccctctcttcttccctggacctggggcctatggctcctcatagggcctaagctgcctccctctgaggccacgttgtatccccaggaccccatcctgttctcggggaccctgcgcatgaacctggaccccttcggcagctactcagaggaggacatttggtgggctttggagctgtcccacctgcacacgtttgtgagctcccagccggcaggcctggacttccagtgctcagagggcggggagaatctcaggtaaacactgggagtgcagaggtcaggaactgcaaccctccctgggaaaccctggcgggtgctgggaaacctgacaccaatgacacagagatgaggccagcccggatgtgcacagggctgtcctttcgtattgagcatattccgtgtgccaggcatggtgtactgccccgccgactcctcacacaagccccagcggtggtccatgatcccacttcaccggtcagggaactgaggctcagagatggtaaagggcttgacctaagttgcacagctgggagaaggcaggtctgggatttgaaccagctctgggagattccaaaaccctttgaggaagccctctcccctccagagctttcttacagccccagattttatgtcctcagccactgggctatgcactggaggggccagtagtcacctcttactgagtctaaaggttggagatacctatacctgtgctagctgtgtgatttggggctagttgcttaacctctctgtgcctacttttctttcactctaaaaggcagataataacagtccaaacctctttgcattatgctgcccaataaaaaacaaagcaagtcatgcatatgaagctaatgtttttttcttatagccacactttttaaaaaggaaaaacaagcaaaataaactgtaatactataacttatttagcccaatatatctaaaatattatttcaacacatcattgatataagtattagaaatattttgcgtttcttcctacaagtttgaaatccagtgtatatttcacatttacagaatgtctcaatttggactagtcacatttcaagtgctaatagccacatggggccagtggctaccacctggacagagcagtgttagggtcagtgtgatgacaggaaaagcgcttcgcttggatgctcctgtaaaatgtcagcttttcccctcctcccttccctccatcttctcctcctcctcctcctcttccctattttcatttttatattcagtccatactcatgcaccctccccagacctcaaaaactaaaacaaggccaggcacagtggctcacgcctgtaatcccagcactttaggaggccaaggcaggtggatcacttgagggcaggagttcaagaccagcctggccaacatggtgaaaccctgtctctgctaaacacaaaaattagctaggcgtgatggcgggcgcctgtaatcccagctattcgagaagccaaggcaggagaatcgcttgaaccctggaggcggaggttgcagtgagccaagatctcaccactgcactctagcctgggtgaccgagcgagacttcgtctcaagaaaaaaaactttacatttgcccagcacttaacaatattcaaagcactctggcctccactttctcctttaatctttaccatggtcctgtgggccagaaacgagcctccacggtttgaaatgatttcctcgcagcagttcagctggtaaggggcagagcggggactctggctctgtcccaaacctttccttgctgtatcacagccacctccctcacctggacaacattccccaaggcccctcattatcccaagggtgggactcccttgccacccacgcagcccttaagactaaatatgcatcttaagtggctctcacttacataaccacgtgggggtggctggcggacaaacatggtctctccagaccctgtgccccatgactgtctcttgcttgatccattcttctcacctgcttgctctcaacacttcccccagagcatgccccaccccgacacatgccgtgatcagagacagaaatcagctcccctcctccctcactgagcttgtagccactttaagtataacctgtgtcctgtgccagttccaccataaatcagccctgagttctatccggcggcttattctgctgccaaaaccttcattagttgcgggaatgggccagggagagagcccggactttactccggctgtggtgactcacgcctttgggaagggctgaggtatttgtccttggatgtggggatgctgtggcctctggttgggaacacagcctcgttttgtctgctggctctggcttccagagcaggaggctgaaggcgtgtgtcctgctcctcctttacctcctcagtgaccagacacaaagagtccccgggtgttcctctgccctgccattttcttgtcccagaagcagagccctggcctgtattccctatggggtgggaggtgactgcctgaattgtgtgatattaggctcagcaagatggcatcgtgtggcctatttgcaaatatccaagaagagccatgcaagtatgttcttactaaggtgtaaatggctgatagagtgaagcagagaaacatcacggcactagctgaaaagcaaggatggggaagaaagcaccgagagaggaggccaagggtgccaagagcagaccagggatttcacaatgccttttagcactggctcattccccaaggcccctcattatcccaatggtgtccagacctctgctccgttctggagggctgggctgtggcagaaatgggagaagtcagacagaaaaccagtcctgggccactgaggagtgaaacaggtctgggaatgaggcccagaggcaggtgggaggcccccagctggaaatgcctgccttctccactcccagcgtgggccagaggcagctcgtgtgcctggcccgagccctgctccgcaagagccgcatcctggttttagacgaggccacagctgccatcgacctggagactgacaacctcatccaggctaccatccgcacccagtttgatacctgcactgtcctgaccatcgcacaccggcttaacactatcatggactacaccaggtgggacacggaaacctgagcaatggggaacctggtggggccacctggggcatcaggaatgggcagggcagattagggttatctgaacaaggcaatgttcctgggattgctagggcatggcaggcagagcagagtttcccaagatctggataaggggcagaccagagtggggtggcctgggctcaggggtggggtatacaatgacattttcatttttcttcttcttcttcttttttttttttgagacagagttttgctctgttgcctaggctggagtgcagtggctcactgcagcctcagcctctcgaagtactgggattacaggcgtgcaccaccacatccggctaatttttgtatttttagtagagacggtttcaccatgttggccaggctggtctcgaactcctgacctcaagtgatccacctgtctcggcctcccaaagtgctgggattacaggcgtgagccactgcgcccagcttcaacaatgacattttctaacacatggggaagggcacactgggctccacaggcactgtctttgtgcacaggccacttgcatcctgcctcctccatgaggcaatgtaaggggaactggaggcttcatgctgagtcccatcacttcctaagaaacctgctggcagagtgcctgcatgtccctcaccttattggtgtctcacagccactctggtcacagatgaagaagcaactcaagtggcagctggaccgtgacagcaccatgaggagctgagccttgtggggagagcactgtgtctggagtcccaggctgctgtgtgaccctgggcaatttgcaaaacctttctgagcctgtttcaaatgaaaatgatgcttcgtgggattgtcgtagtcaatgagggctgggcacagtggctcacacctgtaatctcagcactttgggaggccaaggagggcggatgacttgaggtgaggagttcaagaccagcctggccaacatggagaaaccctgtctctactaaaaacaaaacaaaacaaaacaaaaacaaaaatttgccggatgtggtggtgcatgcctgtaatctcagctactcgggaggctgacagagaattgcttgaactcaggaagcaaagattgcagtgagccaagattacgccaggacactccagtctgagtgacagagtgagacgttgtctcaaaaaaaaaaaaaaatggtggccaacgcggtggctcacacctgtaatcccaggactttgggaggccgaggcaggcagatcatttgaggtcagaagttagagaccagcctggccaacatggtgaaaccctgtctctactaaaaatacaaaaattagcctctcatgtggcaggcacctgtagtcccagctgctcaggaggctgaggcaggagaatcacttgaacccaggaggcagagtttgcgccactgcactctagcctgggtgcagagcgagactctgcctcaaaaaaaagaaaaaagtcaatgaaagatatttaaactgcaggtgatcctgggaaatgacagtgtcctccccagccccttgctctaattcttgcgctaggccctccaaggatgaggggaggggccatgccctcagaagcttgtggcttccttggagaggcagaccactccctcattgtgccagatgtcaaagtgtggtgctggaggtcgaggagagagggctgggtgactcagaagcctcacgggagtgaactggccctggcctggcaggctgtgctccctagaaactagaggggaggaggaggcaggaggctcagacaagtcttctttgaaggagtatagtgggaataccccaacaggccttcactcactcaagaaacacttgcaggacgatggagtgggaagggtgccatggacagggcaatgggtcagaccttgctctcttggaagtgcccccatgcagccagcagtgtcttgggagccaagctgagaatgcctgatgctaccctctgtctgttccatccctctcctaccctcaccccccactcccatttaggaccccactgggagaagggagggtgggcaggaagtgctgagccctgggtttggaggagggacagggctgggctgagaggacctgttcccaggcctaaccaaaactgtttcattcaccagcagccctagggtgaggggcttggatggaccttggaggttgggagttcattcattctagtggaacaggcagaaattaatcaaataatcatgtgtaaatagggcccataggaaggacgcaaaggcctgtgtgtgcaggccagaaaaaggctatccacacagggtggccaggacactttctcctgtaaggaagggatgcaccagccaggcctgaaagaatgagtaagagttggaggatggaggtggggcaataaggtagggagcgagctgaaaattgcaggcaaaggatataacacatgccccaaggcaggagggtacaggaggctggagtgcgtgggagggaggcagtagaaccaagatgggggtggagaacaggccgcactctgctgcactttgaggaccatgggagagcattcagtccttacccaagagcaatcaaaagccgctgaagaccttgattttggagtcagggttgggatcggcgggaggggagggggggcggtggccaggcagtgatgtcacagacacagtccttcccaggacacatctgggagcccagtaggctgagaaccagaatgcagtcagccccctcccatggaggagcacttctccaggctggggagagccccttcccctcctgccgtaccctggtggagccagcccactggccttgtaccaggtgcactcggtgagtggttggtgggagattctaaccctgggctcaggcctagctgtttgtgtgtgagctggagacccaccgagcagcagcagcagcagcagcagccgcagcagccgccaccagatttgcagcccaagccccagattccagtgtcagcctcgctgcagctggtttcctgccgtgtgcttttgtgagccgacacaaagcagatggatgtgcacagagcccagcgcacaggcccatggctccctgcgcacagcctgctgaagtcctgtgaccccggcaaggggaagggctcattagggaaggttttcagagccctgactagcagagatgaataggaccttgtgtttgatcccagaaactgcttcacttgccagaactaacagaatggctaaaataaccagccttgcaagtgtgcacatgtggtgcggtggctgtgttgggtgggttggcatgtcactgtgggcctgagcaagtacccagaagagcaggattagacgatgtgaccaggtcagggctgatggaaacctgaccacttctctcttttttgactagggtcctggtcctggacaaaggagtagtagctgaatttgattctccagccaacctcattgcagctagaggcatcttctacgggatggccagagatgctggacttgcctaaaatatattcctgagatttcctcctggcctttcctggttttcatcaggaaggaaatgacaccaaatatgtccgcagaatggacttgatagcaaacactgggggcaccttaagattttgcacctgtaaagtgccttacagggtaactgtgctgaatgctttagatgaggaaatgatccccaagtggtgaatgacacgcctaaggtcacagctagtttgagccagttagactagtccccggtctcccgattcccaactgagtgttatttgcacactgcactgttttcaaataacgattttatgaaatgacctctgtcctccctctgatttttcatattttctaaagtttcgtttctgttttttaataaaaagctttttcctcctggaacagaagacagctgctgggtcaggccacccctaggaactcagtcctgtactctggggtgctgcctgaatccattaaaaatgggagtactgatgaaataaaactacatggtcaacagta

SEQ ID NO: 15296 - DNA, 56802 bp, Homo sapiens; identical to SEQ ID NO: 15295

SEQ ID NO: 15297 - DNA, 98002 bp, Homo sapiens
cttgcgcggtgtggcggccgatgccgctataaaggcttgttttgctgcagggctcatgctcgggagcgtggttgagcggctggcgcggttgtcctggagcaggggcgcaggtaggtgatggctgctgccgcacccctgccctccagctcggttgtcacggggatcacccctttgcatttcctcggggcgtggcgggatgtggccagggctgcgagcagttcgggggacactggagacttggggaacggcgtatggcctccccctggtctcctgccgccgcctcctaggcctgtgagcccggggtctggtgacggggtcgtgtgctggaagacaggcaggtaggatcgggatgagcgggcagggacgcgggctacgtccctggccgcggccgccagggggcgctgcgcccgcgggccgtgggtgtgggtcgcgctcgcctgggcaggccggagcgggctgtgggaacgccctagggcccgggcatcccaggcgaagcgggtctgagagaaacgcccacctgggaggctgtgcagcgggtggctcggggcaccctgctcaacccgcagcggagccgccagcgaccttcgaagtaagtcatccccttcgtttttgcaagcgggtaaatggaggtacgtgacataagcacgcgcagcaaagccgtggctgtgccgggaacgcagcccagatctctccacggtcatccagtgctcttttcgcttctgccacacagagccgcgggtggctttgtgtttatcacacaggggccatttggtttctgcacagacggagaggctggaggcaggtgggcacaggaacgacggggaaagtttcaggaggtcttggaggaggagatggctaggttttactgtggtccgcagcgtgtatgaaaggtgaggctgcttggagacgcaacaagtggattacagtgggtgtggtaaatacgtatccctttagcgtggtgtcttcctcgtgcagcttgagggcctggaggtgatggaaacctactcatgagtgttgggatgactgcagcttgcacacaccagtctggtaatcccgtgcaactctcctcctgccatgcagttgaatcagtatcattgtgcagggagagtgtctacacttttatcagtggaaagagaatcttggtaaaaaagggcagctgactaagtggcctcaaccctattgggcacttctttggggttctcccacgttgattattctgcttctacccttgtacatgtctggacaacaggtttgttttttacaaacaaaaatcccttctctttcttcctctcttgatagctgaggcaagtgagcatttaaaaaagatattccaacaactttaaaggaggacacgagaagatagggaaatataaatagtatcagtaaaatggctggcctggggatccatccttgcttgcttgcttgcttcagactggggctttgtttctttccaaacctgtcaggattcccagctcttcgccggcctccacgtggggtgccctcttttatgttccagatacacagacgatggtgtccttatgttcaaggccacagacagtaactttgtgcctactttgggcctgcctgctctcctgattgtgcctctttttccaggaaagtagagatgagtgtgttagagataatggaacactgttccccacacccttcatacatagaataacttagtcccttaggatagtttagcagtgtctaccacagcagtcactgtaggcacaaaacagtcattatttgtgtcataacagggaagtcgttttgtccctgcctctctctgctcctgtgctccactgattctacttcatcctttgaaataaaagtggttgaaagaatctttggttatcatgggtgcttagataattaagattatgttcgtgttcttcttgatgtggcatttcatattgtggatgagttccagtgacctcctctgtttcaaactgctcaccgccccaacccccaccttttaaaaaggtagtactaatcttttcctcttccagataatcagctaagctagggaacccttgaaggggaaggttagaatttcgtgattcccgtaagaaggttactctgatctacagctacagctcaacactggggacactggcagatgccaggtctgtttatagtttagccttaatgaggtctcaatgacgtgattgctgcactctggcttggtgagccgctgttctttatggtgtagtttgtcattggacaaggtgactttttttttttttttaaagataagtaacagctatatcaacttagggtacttgaaccagaattctgaaaggcaagaaatcaagctttctttggactggaaacctgtctttgcataggagatttagtcctttttattcagaggattagtaagtgttctctttttatctgacactttaaaaattgcattataatggttagaattttgtgctgcagaagtagtagttttaagtcacagcgatagccagggatttatggaatccagaaggcgacacggctacacgtctttaatttccgttggaggctagtatgaaaggtgttttctcagcttgtctctgggaggctgtgacccttcttagaggggggaaacattttggagaagtatgtatgtgttttttgtttttaagtgacctgagttgatacagcatattgattagacttagccaggcaagcagtggtttagaatagagtttcaggtaaaaactaggtaagacttagtaatacagggtggagaatttgtttttgttattgttttttactaacagctttgttgccataggatttatatgacatgaaattcactcttttaaagtataaattcagtgtgttttttttcaatgtattcactgcattgtgcaaccattaccactatctagttttagaacattttcagtacccagggaatttgtgtttgaagttaagttataacattgttttaactggataacttcatggagctttaaaataacaccagctaacccattagttaattataaaaaggcagagatggaatatatcattggtagaataagtgtttggtaagtttttatttagtaaaatttagtagaagaaatgatgtccactttaaaattgtggagtttttaatacttgggacaaactgaaattgtttctagaaagtctttaaaaaaaaaaccaacctttctattgtatacactggatttgagcttagttgaagagaatgggtgtctctttactagtgtgtttactgtttctaattttttttcccttagagttgggagaaggtaatttttcttgattctcttatactgaatctttttctttaaaaaaatgaaatcaaaatctttgaactttttttgaaaattaatttttgtagctataacagtagaaagctttagtacttttgccttttttttttttttcctatttttaaggcacttgagcttatggttaagtactgtttaggaaataatctatttcttgatgaatttttaatttcaggaattctgatgtgaaactaacagtctgtgagccctggaacctccactcagagaagatgaaggatatcgacataggaaaagagtatatcatccccagtcctgggtatagaagtgtgagggagagaaccagcacttctgggacgcacagagaccgtgaagattccaagttcaggagaactcgaccggtcagtttcctttcctaagagtctcttacctgcttgttgtactaaaacacatcttttttcgtataatgggtaatttagaaacttattttttggccgggcgcggtggctcacgcctataaacccagcactttgggaggctgaggcgggtggatcatctgaggtcaggagttcgagaccagcctgaccaacatggtgaaaacctgtctctactaaaagtacaaaaattagccaggcgtggtggcgggcgcctataatcccagatacttgcgaggctgaggcacgagaatcgcttgaacccaagaggcggaggttgcagtgagctgggatcatgccactgcactccagcctgggcgatagagcgagactcagtctcaaaaaaaaatgtgtttttctttattggctttaggttactgttaagaatttatggttattgataagtctctggtccatagtaagcactcaataagtggaagagaggctggctgtcaccctctcacccggtctgttctgagcattctcctctttttcacttttattctatgttggtgccttctgaaaaggctatacttaacagaagacaacttattgagggggagggggtcatggggtcaatgacagggaatataaagccaattaagcttcattcatgtacctaaacaaaattggtgttttcttctactttctgtcatgtgtgtttaaaatgtgaacctggccaggcacagtggctcatgcttgtaatcccagcactttgggaggttgaggtgggtgggtcacttgaggtcaggagtttgagaccagcctggccaacacggtgaaaccctgtctctgctaaaaatacaaaaattagtgaggtgtggtggtgggcacctgtactcccagctactcaggagggaggcaggagaattgcttgaatccaggaggcagaggttgcagtgagccaagatcacgccactgcactccagcctgggcaacagagtgagactccgtctccaaaaaaataaaaaataaaataaaatgtgaatcctttggagagactcagatttcagaacaattctagatagttgtgggattatcagtatgtttttcaagcgaattcataagttaagcagtctttagataataatctaatttcctccaagggaaataatgaagatgcgtttttacctcgagaaaatattctttttcctgaggaaaaaaagcattataccttttcttacaaaagtacctaataaggcagaatggactaggtttaggaagttgaggtttttgttggtgtatttgttatgtgaaaatttgagaaagataatggactttgcagctgacactggcctttccttagcctgatactacctttccctctttggttgtgttaaagccattgctttattaatgaacattttcttgctaatgagtcttttctgtaccctactgtgtattatagaatgcttttccattcaggtttaacttcagagaaacaggcttaatgtaatcagtgtcaaatgcttctcgtggtgccagttttataacttcctcatgtccttttgtctagaccttatgttgattaaacatctatccattacatctgagtgctagacacatttagtgtaacagttaagtctggaaaaagtcagaaggtaacattggggcagggccttaaagggtgattaggtggggaggctttttaggcggtacaagtacagacccaaaggtatggaaagagcgtgtgacatattgggactttggataagctacttacgtcatttgtatataaaatggggttgacagtagtacctgactcatgggatcactgaggagtaaatgagataatacatataaaatatttaaaatggtacctggcacatggccagtgctcaataaatgttagctcttagaactagttgttcagggcataggatgtgtaaagagattataggtcgggtgaaattctgcatgccatgctaagaaatatttcactgtgggcattagggaactattggaagttaatgagattaaaaaaaaaaacctttttattttgagctaactgtagatttacatgcaattataaaaaataatatagagatcctatatattcttcatccagtttcccccagtggtaacatcttgcataactatagtccagtatcacaacaggataatgattgacattgatacaatccattgactttaggatttcaccagttttatatgcactcatttgtgtgtgtgtgtgtgtgtgtgtgtgtgtgtgttgtgttctatgcattttttaaaggtgtaaatttgtgtgaccgcttccacagtcaggatgcaaaggttccatcacaaggatctctcgttacccttttatagccacagtcatgtcccctcaaccccagtctctggcaactgctaatcttttctccatttctgtaattttgtcattttaagaatgctatatacattgaatcatatagtatataacctttcgagattgcttttttcactcagctgaactcccttgatagccatctaattttgttgtgtgcatcaatagttctttcctttgtattgctgagtagcattccgtgttatagatgtaccatagcttctttaaccattcatttgttaaaggacatatgggtcatttccagttaatggcaattatacataaaggtgctctgaaccttcagttacaggattttgtgtgaacataagcttttatttctctggattaatgcccaggactgcgcttgctgggtcatatggtaagtgcatatttagtttgtaagaaactgcagtactctttcccagagtgtctgtgccattttacattcccaccagcaatgatccagtttttccacattgttgccagtactcaatgttataatgtttattttagccattcctatagatgtgcctggtatctgattgtggttttaatttgcagttccctaatggctacgatgtttgagagtagatttttatcttagattagtcttgaagcaatgcagaaaaaaacctgtacaggagaaagagaccaaatataaagagcattcaggaagcggctctgcctatccatgtcagagaggccagggttctgttgtaaagcacagaagtgaggatggaggaaaggcgtttctagaagatagggaggcattggggtgtctgggattgatggtaaggatttaaacctattcgtggacataagaaaaggagattggggagatattaagaatgagtttgggccgggcacggtggctcacgcccgtaatcctagcactttgggaggccgaggctggtggattgcctgagctcaggagtttgagaccagcctgggcaacacagtgaaaccccatctacttgggaggttgaggcaggagaatcgcttgaacctgagaggcggaagttgcagtgaaccaagatcgcgccattgcactccagcctgggcaacagagtgagactccatctccaaaaaaaaaaaaaaaagaagaagaatgattttgattttgaagatgttgaatttgaagtgcatatgggtaaaattatcagtaggtagagcatagacaagaagtagtgtaggaaaaaacatttagagcctttagtgtgtccacataggtgaagctgtgagagtgagcaggcttacccaaggatggcttgcagagcaggagaaggtggaggctgtggagctggtgtgtggtcctgtgaaatttctggggatagggtccccagcttgtgagagtagagttgacatcagggtttgcagtggcagcagcgagcttttcctctacgaagtggagaagaacagcaggtaggcaccgctgggctttgagtaccctaaaggatatggagtcagccaccactgtagcaggttttcaacatgccactgaagccttatctcagagaaatatgaaggctaataccacttttataaaatttcaggaatccacatgaattttatgaattttatttttattattctttcatgtttcctaaactttttttttttttttttttttttgagacgaagtctccttctgtcacccaggctggagtgcagtggtgcaatctcagctcactgcaacctccacctcccgggctcaagcaattctcctgcctcagcctcctaaacagcaggtgcctacctgctgttctctgttaccacattggccaggctggtcttgaactcctgagctcaagtgatccgcctgccttggcctcccaaagtactgggattacaggcgtcagccaccacatctggccatgaacttttattttttattaaattttttttgtttgtttttttgtagaggcactctcactgttggccaggctgttgttgaactcccagcttcaagcaagcctcccgcctcagcctcccaaagtgctgggattacaggcatgtggcaccacaccctgcccctaaactttgaaatttgagtactgttttcctgatttttactgtatccttgtaatctctgaacttttttaaaagatttcttttattctactctctttctgttacttagtctagacctagcaaaacaacaacaataagcccataggtttattcaagctatttttgtatatacattaaaatgaatgcatcgctactaagtatttttgtaagttcagacaccatctagaatctgcttgaccgttacctgtcaaaaaacaaaatttctcagatgtatttatctttaacttgtcttcatgttacaagtttgctgacagaagcaaccagcaagatgacaagaaattttgtggtctgagaaaattgtataaatggtataaaatggataatgtaagtagttgggaagcagaattcctgtataagcatatagtttttctttttttaaagtaagcagttaattgggcagagattgcaatttcatgtcacatcatcattaccatcatttttatatttgttagagaggaaatctgggacaggatctcccaggatgccaggtatgcctactatctgtcaaaaatttaaaacaaacaacaaaaaagcctctaagtaacaaaagataaggatacatctatggctcttatgtggaaagcaaggtttcattcagcactattagcctttaacacgtggaattaaccgagaagcaggagacctgtgctgctggtgcctcacgcctgtagtcccagcactgtgggaggccgagggaggaggctcgcttgagcctgggagtgcaagaccaacctgggcatcatggtgagacctgtctctacaaaaaaataaaaataaaaataaattagctgggcacaggggtttgtgcctgtagtcccagctacttgggaggctgaggtgggaggatcacttgagcccaggaggtccaggctacagtaagctgtgattgtgccactgcactccaccctgcgtgacagagcgagaccctgtctcaccaaaaaaaaataaagaaagaaagaaaagaaatggtgtcaaacagaagtcagaagcaaagcaccaaagaataagttctgactttgagcaggccagtgcttttcttcttcaaggtgtaagtgaagatgcagattacatggtttgcccatttctcagtattgtgaccaaatcattcttttggaatatgacttggaaaaattgctctattagtcacatcttcaaatatttataatttctcacgtatgcttagaaataattagggttgaaataaagcattcgcacatctacccactttcttcgggactgtaatgttaatgcttgtggccacacacaatttgaggcttagcaggcatcctttaatcctgaagtgttaataaagtggtggtttctgttgctgttagttctttgagcctgagtactaactttggctggcattaggctggcgttacttcagctaacatgaagttttatacctaggctgctcctaaacactgttcctttgcctgaggcatgattattcaggcatggttcctttttttaatcctatttatatatgcacatgtagatcatatgactccacgagccctgatttttttttaagatgcagtcagtgtttattcatttttttaaatttagcaaatatttgaacactcttcaagatgcatgcacagcactgaaccgagtggtctggtgcagataaagataaattggtgctgggcctgcttgtccaccaatagaagcttaaactcacaacacgtactctacatagatgactgtaatttagatgctgtgggaattagtaaaaggagaaagtgcttctctctcagggaactctttaggaggaggtatcatttggctggaaacttgaggaatggatagaatttggagaaatgaagaacttgccaggcaaaagaaagagttgtgggatagggatacctagtccttgttggtattgagcatcaaatgtgtgaagtcttagctatagtgcaatacctcagtgaatttcacattatgtgtggggtttttttgttttttgttttttgtttttgaggtagagtctcactctgtagcccaggctagagggcagtggtgcgatcttggctcactgcaacctccgcctcccaagttcaagcgattctcctctctcagtctcccaagtagctgggattacaggcacatgcaaccacacccagctaattgtttgtatttttagtagagatggggtttcaccatgttagccaggctggtcttgaactcctgacctcaggtgatccctccgcctcagcctctcaaagtgctgggattacaggtgtgagccactgcgcctgggcatgtgtgttcttgaataataagccaaggagtttggattttaattgctttaaattaatatttaagcaaaagcaagacaaagcttgtcagatgcttttatgagctttattttattgtggtggtggtttgttttcttagtgctctcaggcaaaggtaagggtgccttgtttttcattagcatgtctaatctgggaaagaaggaagaatggaaaaataagcagaagtgggccgggcgtggtggctcacgcctgtaatctcagcactttgggaggccgaggcgggcagatcacaaggtcaggagattgagaccatcctggctaacatggtgaaaccctgcctctactaaaaatacaaaaaattagctgggcatggtggcatgcacctgtagtcccagctactcgggagactgaggcaggagaatcgcttgaacccgggagccagagtttgcagtgagccgagatcgcaccactgcactccagcctggggaacagcaagactctgtctcaaaaaaaaaaaaaaaaaaaaaaaagcagaagtaaactaaagttcatgtaccattattactggcacatgaactttagttattttttccccttctctcaaaagtgtgtcattggtgggattttcttcctaccaaattagaatatcctgtgtctaggaaaggtaacaaagcaagtattcataaaatccagggctcttacttagtatttccttagttctgtggtaggctgaccctttaatcttggttggagttttcataattaatgctttgaaatattttggtgagctcaagttgtatcttagggatcaaagatgtgggtctaatctcttaccagaaatgattcgaagatgtattgttaggaaagaaatatgggctcattatagaaaatgtacaaagtgtgtaaagttgtagaaaaaaagtaaccacccttaattcctctacccagagacagccattgttttcataaaatagttttgtctagtacattgtacttttagagtttgctcctgaaagcttttctttacagactaaggacgtgtgaatttgtctatgcccttgtgttttccaagtcaagagtattacctgtgagtcggcttgctgttaggaaggagagcaggaggaaggagattagcattttgcagctctgcattatttttctcttgattgatactcggtgactcagcagattttctggacagggttaagataagtaagaatacctgcctttttttttttttttttttcttctctccctgtaggcatccataaagctttatgaggcacagtagtctcttaggcgctgctgggtgtgacaccgtatctggtctggtgccaggtgttggtctccaatagcagcccagagatctccggctgaggtaacaacagtgtgcgattggtgtggagcccaggtggctctcatgcttggtaactgcattgacagctcgctggggctcttgaggttgggctgctgccgggatcatcagctctcttatgccgtttgctgcaagactgccgcggctttcctaggaagtgctgcttaagggaaataaatatagcctgttggcatgagttaaaggaactttctgtcaaaggggaagaaaagtgttggaattagcttcctgttttttttttttttaagtacctaaatctttatttggttaagataacttggaagttacaaatggttaatgaaaactttttcaatgaaatattgtttccacagttaggtgggtttccgttaatgctttcttttttttagttattattatactttaagttctagggtacatgtacacaacgtgcaggtttgttacatatgtatacgtgtgccatggtggtgggctgcacccattaactcgtcatttacattaggtatatctcctaatgctatccctcccccctccctgttcatgctttttttaatgtcttaccgtttttccctctcttttagtcaaaaataaaaaggtcaacgcaaagaaacagggactccagaaggctttgcaatggttaaacctgtcattattaaactcacagactaatgtgaagttaatttggtgcactgaagtccactaatgagcagaattaaatttatccttttcctccctgccccccttttaaggagttagcctatttagataattagatgttatatatgttttaactatttaagattattttatgaattagctgttcaaagaatcaattgttactagatatcagatgagaacttccacttaccaaagcctgctcatggaggtagaaagcaagactgacatgtgtactttaaaagatggatggaacctcaaaggccgtcttgcccagtccccatttagcctcacctctctgtaggtgaggcccaggagagacacttactaggcagactatgctggggctgggtgagcttcccaaggatgttctttctggaattcggtggctcagaatacagcacttggctcctctttgaagcatgatggctctgttgcctgtctctggcccagtgtgctgggctgctgaaaagagcatggaaccacccaggagacgccacgacactgacagctgtacctgacctgagggttcaggatatgttttcaaaagcaaatctcgctaaaaaggatttgtatgttattatgaaatctatatttatgtggtggaaatagacacactcaggcttttagagataaactacacagaatgggttacaataaatgcttataattgtttggcttttttaagaatcctgttaacttgacaaccttctgtttacttttctttggtattatgcaggtatgatattgagcagtcacttagttttcttaaatgttgtgtctcacagtagaaaaatagccaaaccactcagcccctgacctttgtgtttgcttctcacggtgatcagcagttctggtctgctctgcagtatggtggtcacatgatggaacccagaaagccttgtactaagcatttaacacacattgtgttaggcactggaggaagtttcatttacaaattatattttggcctttttttttttttttttttttgagacggagtctctgtcacccaggctggagtgcagtggcatggtcttggctcactgcaacctctgccttctaggttcaagcaattctcctgccctcagtctcccaagtacctgggattacaggtgtgcaccaccatgcctggctaatttttgcatttttagtagagacaggatttcaccatgttggccaggctggtctcgagtcctgacctcaagtgatccacctgcctgggcctcccaaagtgctgggattataggtgtgagccactgtacctggcctttttttttttttttagctaaagcctgaaaatcttgttgaagggattttgtcaaatgcaaaagaccaatattcacaactctctaaatcagtggttttcaggccaggctgaatgttaaaatcacttgaagaatgttcaacaaataccagtgttggggtcctattccagaccaattaaatcagtctctgggatagaacccagacattggtattgttttaaaactcctctggtgattctagtaggtaggcagtgctgggaatctctagatctcatggaataaagtctgttctctcccctcactcaatggctccaagtgtttcctgtaaatcccgttttacccctgtgattcattttcagtttaatcctttgaaaccttaccatgctattaacaaagttaatcttagacccaacataacaggaactttgaataagttccttggaatttagcttatgaaacaactgaaagccctcaaattcctggtgattatggagtaatgctagattatcaactgcagacaaatacctgttttactgtggtggtggagatatgtttgtgaattgtattgctagctgatcatcggcttgagagtaacatagcacagctacagataagtgagctgatgctcaagttaattcttttctcagtgtagtatagctgttgagtgataggactgagtttagcagcttccctgacttggaataatagctctttcttttgtattctgcttcttccccatataggttgggttctagaattttgctgatcctcttgactgaaatggctactatttggaagttcttaagggaagagcttaagatggtcagggttgtgataacaacccactggggagtaaggatgtggtgggaattgcagaggaaacgtgcttggtaggtttctttaacttgttggagattaggaagggcgggaaggcctgaagtcagccggtcttgggaggacatcagtttttgatctttttaaatttaaaagtgaattttaattcacttttaaatttaatttctaatattctgagtcccttaagaagtatatctagtggcacaacagttccccttaaaagtttgtctttctagatgtttgtcataaaggctgcgtgggcctgggacatctgtagaaatggttttcttggccagaaggatgtatttgaagaggcgcccattgtcttgtttgtcttaaggtcttgtgaatgaggagaggagaggaagacagtgttgtgagatctgaggcctgttgattccgattgtgccccagataccgctttatttgaggggtgtgccagacaggagcaggcagcctttaacccccttggaaaccgaggtacctctctgttgccagttgacacctgcagtctctgccttcaggaacaacttggttgaatcctcagcccgaggcttattaggcaggctaccctgctgttgtccggcctccaggaagggattggattgttcagacggggaacgatttctggcccctggtatctgtcccagaggcctccgtgcaggggaaaagcccttggttgccctgtcagcaggcatttgctctggcagcctgttaaaatgagatgggacagctggagaagtggtggccatggggtgtgataggtgcgctgattatctgaggcctgaggatggcgttagcgcccgcagaagcgtcttttgcaagagcagatctgtctgcttatgaatcgaatgttacctgtttttcataccagaggtgtctatgaatgtgtgtttccctgatctttgtttgaaccttgacagaatctgaattgctttttgttattgttgtttttgtttttctcttttttttttttttgagacggagtctggctctgttgcccaggctggcgtgcagtggtgcgatcttggctcactgcaccctctgcctccttggttcaagcaattctcctgcctcagcctcctgagtagctgggatgacaggcatgcatcaccatacccggcttatttttgtatttttagtagagaccgggatttcaccatgttggccaggctggtctcgaactcccaaccttaggtgatcctcccaccttggcctcccaaaatgctgggattacaagcataagccaccccacccggcagaatctgaacttcattgtccctctttagcttccctgtgaccttactcctgccccattgccattaccttggtaggaaaaatgctgagtatcctagtcacatagtcatggggaagatataaatggcagtcatacttcctcgtttgatatttttctcagctcctggatctgccagtatttttccctttaagacaaagcagctgctgtgggtgcctttctgtgtggctgggtcgtctggccactgacagcctttcagtgtgctgtgctccttaagagaaatgggtcccctcatcttgtttcaggggaaactttaaaaagttacttgtaaaagggattgaaagcatcataacaaaaaacaaatggcctcataaaatacattcctctaggtcagcctatatcagtactaactgtgttagctcttcagctatctagggttaccttagtacgattgacattttgggccacataattctttgttgtgggggctatcctgtgcattgtaggatgttcagcagcatccctggactttacctgctagagctagtagcacccctcaaacatttccagatattgccacatgtcctctgggcaagcaaaacaccctcacttgtgaactcctgggctgcaccgtgcgacacagtactattgtggctattaagcatttgacctgtggccagtctgaactgagatgtgctgtaagcataaaatacctgatttcagagacttagtacgaaaaaagaaatacctcgtttgtaaaatacctaataatttttcacattgattatatgttaaaaaagataatactttgcattgggttaaatgaaatatattatttaaattaatttaccttttactttttatttttagagtcagagtctcactctgtcacccagactgtagtgcggtggcatgaccatggctcactgcagcgtcaaacacctgggctcctgtgatcctcctgcctcagcctcctgagtagctaggactacaatctcgtgccaccatgcctggctaacttttaaattttttatagtgatggggttttggagggttacacagactagtctcaaactcctggcctgaggccatcctcccacctcagcctcccaaagtgttgtgatgacaggcataagccactgtacactgcctactttttactttttaaatgtggctactagaaaaatttaaattacattatgtggcttacatttgcagcttgcattatatttctattggacagtgctgaactagagtgttgatctactgtaggttagccattgattttgtattaggcatttagatccctgtaagctgttgggtttaatgattttttcctttggaagattttcctttatgcagtaaaattatggagacacagagtatgtagtattacatattaccagtttgctctcctgaatccctgctggtagcatattaaaaatcagtttaatgttcagaccgtgtatgtttgtctatatttctctcctttccatattgcattttcttttccatattagattttatctcttttaaggcttatgtggttgtatcttaaatttaatttgtatttctcgattggtgacattgggtctgtgtgttctctcctgtatctagaacagtgcctggcacatagtaggccctcagtaaggactagttgaatgaatggatgaaaaaatactgtattttactttttcagtacaagtccactactcgaaatatattattatgttagctacttggttacttcttatttttatttatttatttatttatttagagacagggtctcactctgtcacccaggctggagtgcagtggcatgatcttggctcacttcagcccgatggtcctggctcaagcgatcctcccacctcagcttcctgagtagctggggctaacggtgtcccttttttgtatttttttgtacaggcggggtttcatcatgttgcccaggctggtctcaagctcctaggctcaagcgatctgcccgcttgagcctcccagagtgctgggattgtaggtgtgagccgccgcgcccagccacttggtcacttctttagctttatcttcccttctcttaatgctaatttccttacgcaaaaaagtttccttttcatgtttgaacctctcttccctttgatacatttctgcttgttgggtgtaaatggaggctgtcccccatcatagctggactaagtatgctatataatttatgtcatcatttttaatgtaatttttgggaggttaattccagatggattaatgtatgatatgaaacctggatatcaattaattcatctccaatctggttagttggtaggaaggtaggtagtaggtaggatgtgagtgactgtctctgtcacccaggctggggtgcagaggtgcaatcatggctcactgtaccctcgacttaccaggatcaagcgatcctcctgccttagcctctcaggtagctggaccacaggtgtgcaccaccatgcccggctagttttaaaaaatgctgtatatagatgggttctcactttgttgcccaggctggtcttgaactcctgggctcaagcgatcctcccactttggcctcccagtgctgagattacaggtgtgagccagtgcacctggcccaatctggtatttatttgtcccaacaatattcactgactcatgattccctaccttgttatattatttatgcttttgtatagtaagcccttatagcttgaatatattaagtcttttctcttggttcattgccatttttaatccattcaaccttagaatgttgataactcactttatggaatgttaactgtggtagaaaatatttatttttaccttcaaatagacatacttttttttttttcctggcatgcttggccatgtgagcttttttaggaagcctagagaggaagagaagttagacatccaagcatatagttagtttcaagtgggagacatctgtgcagttactggcaggttagtataaagatgctgttattttatgtttctttttttttttcttttttttttttgagacagagtctccctctgtcacacaggctgcggttcagtggcgcgatctcagctcactgcaacctgcacctcccaggttcaagcaattcttctgcctcaccctcccgagtagctgggactataggcatgtgccaccatgcccgcctaatttttgtatttttagtagagatgaggttgcaccatattggccaggctggtctcgaactcttgacctcaggtgatccacccgcctcagccttctaaaatgctgggattacaggcgtgagccactacgcctggccctgagtcattgtttatcttaatctggtattcaccctggggaagagagaagagccatttatgaggtacacctgggatcattttgtacagttatggtttatttgcttggttttgttttttgtttttttgttttttttgacaggcccatagcatagtgatcaagacccttagctcaaggctggattgaaatccctgctgtgacctaacatcggtgtgcctcagtttccttagctgtaaaacagggatactagtacctacctcaaagggttgttatgaggattaaattagttagtatctgtaaaccatttaaaacagtgtctggcacatagtacatgctatgttggtttgttataaatttgtataaattttcttaattacctttaagtgaaaagcttgcctttataaatgcatactagtcgtgagatttggctgtacacaaggaagattgctatagcttcctttatttcttgctaatgtcaagacaacctgaggtccacaaaatagaagtgaaagtactaaagttaatagcaattctcttttgcaataatactggagcacatatcctgtaataaagttaattggggcaaactgggtagaagtctaattgctaggagctacatttttttaatcctgtaaccccagggatagaatttatcctaaataatctagaaggagaaaaataaaactataattgtatattatactattaataataagcaaaagctgggtgtggagactcatacctgtaatcccagcactttccgaagccaagaatggaggattgattgcttgagcccaggagctcaagaccagccttggcaacatagtaagaacccgtctctacaaaaaataaaaaaattagccagacatggtggtagtgcatgcctgtagtcccagctactctggaggctgaggtgggagattgcttgagccagggaggtcaaagctgcagtgagctatgattgtgccactgcattccagcctgggtgacagagcaaaatcctgtctcagacaaaaataataataagcaaaacagctagagaatctaaacagaagtggaatgggtaagatcgcctcagtggtatatcatgtagcattaattgatgatatgtagaatgtaagggaaagaaggtattttgaaggtgttttcattgacgtttgaatactgggtgccaaactctctactatgccagaggccagggatataaacaagaggaagacagcttgccctctaggagctcttaccagaagcattgggctgtggtggtataggtacagggaagacataggaggaaggaagtaagttccccgaccttgaaagagtcagggaaaactaaaggaaagaagaaatcgttgagacagaccctaagatttattggctaagtaaattgggataatatagctaacatgtattgaatgtttattatatacccaatattttgctaagcacttttaattatcccattaattcctctcatccctatgtggtagatgcatgtatcattgtaaaaatgagtaaactgaaacttaaatctgtatctatcttctaaaattcatgtttgaaatcactgtatttactatggcttccagctgtgggaaaattctgcctgtggagatcttcatactttaaggccataagaaaaaatagttttgttggagtaagagaattattttctcttgtttttattttttatttatttatttttcatgttaacatttgaaagttcttgccaacagctgaatatctgttgcttattgttttgagagacctgtctctgaaggaggtaggtgcaaatatggagtaggacagtggttccttcaaaggagaagatcctgtatcatatcctgtatttccatcagatatttcattttcctgacttgggcaatgtgtaaagatatgacaacaagattgacaatttgggaaaacgtttaggaaagaataacagggacaggatgtgacttggaaagttcgttgcttagagtagcaaggtttgattctttttgatcaacaatatagacttttccatcctcttactgtgagaatttctactccatgctttgttacatgagaattctgagattagtgctatttcaaccacttttatgggggtttgttaggataaaattgcactgagtgcctgttctaaaaccaaaggcagcaggagagccctgagtctctgccatcagtagtgccactgcagtactcacgagaaacctggggaatgaagacttgcctggcagctttcatttgaatctttttaaaaagagcctttgattttgatgttttccaatataggaagtaacttactacctaggaggtggtgaaacatgacatagttatatatagtaaaaagaacaaaaaccatgcaatcagaggattttaaaaatattaagtccatttagttttctatgaataggttttagtgaaaactgtcactaggcattttagaaatgaagaaaatgaaatcagtgtgttatacacataggaactggcatttttttggttcccaccatctggaatagtcttacagatcggaggcactcggtaagttatttgtggaaagaatggatgaaagctgtgaagattctggtttcctattaatgctaatatgccatgctcatgtaaacatactgatggattgcttgccaagttttcctcttctgatgcttctcaaacatcaaagatgtttatagaacccttctggccggacacggtggcttacacctgtaatcccaacactttgggaggccgaggcaggcggatcatgaggtcaggagatcgagaccagcctggccaacacggtgaaaccccatctctactaaaaatacaaaaaattagccgggcgtggtggcgggtgcctgtaatcccagctactcgggaggctgaggcaggagaatggagtgaacccgggaggcggagcttgcagtgagcttaggtcgcaccactgcactccagcctgggcgacagagtgagactctgtcttaaaaaaaaacaacaacaagaaaaccccttctaactcttgaacttggttcacctggaaaagcaaaagaactagaatagctaaaacaattttgaaaaggaaggataaagttgaaggcatcacactatccaattttaagacttagtttgtagctacagtaatcaagtcagtagtatcaatgtaggggtagacaaatagatcaatgaaatagagtctagaaatagactcacacaggcatggccaacttttcgacataagtgcagcacacctcactggagaaatggtaatcttttcaacacatggtactggaacaaccggacatctgtaggcaaaaaagtgaacctttgccgaaaccttacactttatacaaaaattaactcaaaatgaaccatagatttaaatataaaatgtaaaactataaagcttttaagagagcacataggagaaaatcttcatgacctgggggttggaagaagagttcttaggcatgacactaaaagcacaattgtaaaagaaaaaaattggtaaattagacttcaaaattacaaacttttgctgcatgaatggccctaattaggaggatgaaacatggccataaaatgggagaaaatatttgcaaatcatatgacaaagaactttaatccagaatatataaggaacttgctaaactcaataataaaaaaaaaaattcacttagaaaataagctgtaatttcagcactttgggaggtcaaggtgggaggatcgcttgagcccaggagttcaagaccggcctgggcaacatagtgctgtctccacaaaataaaaataattagctgggtgtggtagcacgtgcccgtagtcccagctacttgggaggtgggaggatcacttgagcctgggagttcaaggctgcaatgagccgtgatcatgccattgcactcccagcctgggcaacagagcaagaccttgtcttaaaaaaaaaaaaaaaaaaacatagaaaatgggcaaaagacttgaacagatacttcagcaaaaagaatgtaggggtgacatataagtacacatagatgttaaacattattcgttcaccattagggtagtgcaaattaaaaccacaataagataccataccacacctattagaatggctaaaataaaatataatgccaatactggccaggtgcggtggctcacgcctgtaatcccagcactttgggagcccaaggcaggcggatcactaggttaggagttcgagaccagcctgaccaacatggtgaaaccccgtctctactaaaaatagaaaaattagccaggcgtggtggtgggcatctgtaatcccagcaactcaggaggctgaggcaggagaattgcttgaaccctggaggcggaggttgcagtgacccgagattgcaccactgcacaccagtctgggcgacagatcaagactccgtcttgggggtaaaaaaaaaaatgccaataccaagcactggtgaggatgtggggaaactagatttctcatccattgctagtgggaatgtaaaatggtactgtggtcaagtaatttcaatgacaactaatatttgaatcataaataatgtcaagctgctttatatacttcttgtgctatcaaaagttaaacaagaagtgagatctccacttgaagtcaggagtttgagactagcctgggcaaaatggcatctctactaaaaatacaaaaattagacgggttggtggtgggcatttgtaatcccagctacttgggaggctgaggcaagtgaattgctggaacccgggaagcggagattgcagtgagccaagattgcgccactgcactccatcctgggtgacagagcgagatgctgtctcaaaaaaaaaaaaaaaaaaaagtgagatctccattccagtacaaatttgtagtggatatatttttcaaactgaaattacagttctagtagtgatttttagacctcgatgatgtatgaggcaaatttccatatttcaagatccgtgtattttggaaatagtggcaatggttgtatagtattgtgaatataattaatgcctctgaattctatacacttaaaatggctaaaatggcaaattttatgttatatatattttgccacatagaaataatccatttaactgtggcatttagttgcttccacataactttccattgaaagtgattaatctgcagtggggtgcatgcatgtaatgatatgataaaggtaaatgtcaagagaggaatctaatagaattctataatgtcttccatgagataaaaggctcaattaaaaatgtgtattcctggatttagctcagtatttggaagttcctgtctttttttttttttttttttttgagacagggtcttgctctgtcacccaggctggagtgcagtggcacaatcttaactcattgcaatctctgcctccctggttcaagagatcctcctacctcagcctcctgagtatctgggactataggtgtgtgccaccacgccctgctaatttttgtatttttggtagagatggggattcaccatgttgaccaggctggtttcagactcctgacctaaggagtctgcctgcctttgcctcccaaagtgctgggcttacaggtgtgagccactgcgcccagcccggcagtaccttcacgaagacatttgcaaaagtggaattgtagactctcattgcaaatcagcattcatagatgaagatttgcaatcaattttgatgaaagggaaaactattttaaaccccagttaagtgaaatgttattcccccataaaagaatttcattcttctcatcagtagacctgcattacaaaaaattgtactcaattattataatctgaattgtgtcaacattttgtggagatttgttttctcttgtaataggagtacctacttaatatctttgattttgcctcttagcccacaaaactgaaaatatttacctctggccttttacagaaaatgtttgtcaacccctagcttaaagcattgatttttctctttttcttcttttatttttttattttttattttttttttgagacggagtctcgctctttcgctcaggccggagtgcagtggcgctatcttggctcactgcaagctccgcctcccaggttcacaccgttctcctgcttcagcctcccgagtagctgggactataggtgcctgccatggcgcccagctaattttttgtatttttttttagtagagacggggtttcaccgtgttagccaggatggtctcgatctcctgacctcgtgatccgcccaccttggcctcccaaagtgctaggattacaggcgtatatgctttgaaagcgatgaaaatctcaccttattctctgttttagctgcatcccagagatgttgatgtattgcagtttcatactgtttagcacagaatatgttctggtttccatttaatgccttctttttatttattaatttaaagagatagagtcttgttctgttgcccagtctggagtgtagtggtgagatcaaagttcactgcagcctcaaactcctgagctcaagcaatcctcccacctcagcctcctgagtagttgagattatataggtacaaattgtcatgcccgtttgatgttttctttcacttacattacttagaagtatattgcataatttctgaacattcagatattttaaaaatctttgttactgaactctaattaaatcctaaagtggtcagagtgcatgtatacatgatgtcagtcttgagatttgttgaggtttgctttatagcccaatgtatagtccattttggcaatgtatttgaagtgacatttttcagatcttttgtcatcttctgaagctttggatatccaaataaggctggtccctgtaacattctgtacctactctgtacagattcccagtttctactcacttaaagtaggtgtgcttgtatttttagtgtatctttctctctcaatccaggaggttttttccttccccttgtgattatatgcagctcataggtaagaaaaacctttgtaatgtacttaaatctcagcagtcctcagctcattatcaagtgccgtagtccctaaccactaaattaagtgttgaccttatacataaggacttcatttaagagcgagttcgttcttgttgttgactcctgtcatgttgtaccattattctcttgaaactggtctgacttgcctttgacaaaaggaaaggagtgtgctttgcagggctatgtgctttcctaataccagaagttatctaaagatacttaactgtgctgtgaactaaagctattgtgtttgatctgcccaggcatccagctgactcctgtatacaaaattctacccgttcagttctgttaatgtttaagttcccgctgttctttggtgggaaaggaggtgatgtataaaaatcaactgctttgtataaggcttggtgtgttaggtgctaaaccacttaactttttcttgatttggggatctattctccttgtttttttgtttgtttgtttgttttttgttttttttttccttcttttagagacagagtcttgctctgtcacccaggctggagtgcagtggtacgatcatagctcattgcagcctccaactcctgggctgaagtcatcctcctgcctccatctcccaagtagctggtactgcaggcacgcatcaccatgcctggctgattttttttttttactttttgtagagatggtgtgttgctgtgttgcccagggtggtcttgaactcctgagctcaaccgatccttccaaagtgtcaggattacaggcgcgagccaccatgcccagctgagatctgttttttactgtttcacaataattgctggaaatatttgtaataatgtgactttcactgctaagacagaaaaggaagataaggaaattgaggaaaatgaagcttctgcttctacaacaggaaagcataaacgtttgagttacttttagagtaaacgggggataagtgtgtctagattcttgacccaccctcttctgccacagtcagacttagaatgcacttttgcatgcacttttgttaatctaatgaacgaacatttatacactttctagttagtaaatacgtgtaactttatatttcagctcatgagatcctttgctgcgtgctgcagggaagtgtagagctcttcagctgtgcagccaggataagaactcacgttctgttctccctgctgctgctgtgacaggggaggcacgtgtacatccaggctctttctgtgtggcagggctgtttaattggggctgatggaaatttttgtcataggaaatgggcaatcagattttcagttagtagtgaaataattgactctcaatccatattgggaaacagaagataaaacatttggtaataaaaatgtaaattttagaacatagaacacaaagagtggtccataagctgggcgcggcagctcacacctataatcccaacactttgggaggctgaggtgggcggatcacgaggtcaagagatcaagaccatcctggccaacatggtgaaaccccgtgtctactaaaaatacaaaaattagctgggcatggtggtgcacgcctgtaacccccctactcggaggctgagacatgagaattgcttgaaccggggaggctgagattgcagtgatccaagatcatgccactgcactccggcctgggcaacagagcgagactccatctcaaaaataaaataaaataaaaacagggccgggcgcggtggctcatgcctgtaatcccagcactttgggaggccaaggcaggtggatcatgaggtcaggagttcgaaaccagcctgaccaacatggtgaaaccccacctctactaaaaatacaaaaattagccaggcatggtggcacatccctgtaatcccagctactcaggaggctgaggcaggagaattgcttgaacccgggaggtggaggttgcaatgagccgagattgcgccactgcactccagcctgggtgacagagggagactctatctcaaaaaaacccaaaaaaacaaagagcggaccctaatgtaacctatggacttcagttaataatgaatctgtattggctcatcaattgtaacaaaggtaccacactaatggaagatgttaataataggaaaaacagatgaggaggacgggagaggtacagaggtatatgggagcattctgtactatctgattagtttttctgtaaaacctaaagatgctaaaaaaaaaaaaaagaaaactgtttaaaatttttaaatatctagcttaatgttccccaatgggttcaaatcatacaaagttagtgtttaacctcctgacccttgcttggaatttctcagttaagatgagtccagtttgcagtttgagctgtttcatcagttccgtttgcctctcgcctgtgtattaactgtgctcttgcctttctccctatctgctggaacagttggaatgccaagatgccttggaaacagcagcccgagccgagggcctctctcttgatgcctccatgcattctcagctcagaatcctggatgaggagcatcccaagggaaagtaccatcatggcttgagtgctctgaagcccatccggactacttccaagtaagatgccgtgctgagtgatgacagtgaagcatcaaaggcctttttttttttttttttttttttttgagatggagtcttgctctgtcgccagtggcatgatctcggctcactgcaacctccgcctcctgggttcaagtgattctcctgcctctcagcctcctgagtagctgggactacaggcgtgcaccaccaccaagcccagctaatttttttgtatttttagtagagacggggttacaccatattggccaggatagtctcaatctcctgacctcatgatctgcccgcctcggcctcccaaagtgctgggattacaggtgtgagccaccgcgcccggcccatcaaagccgttttagaacattcaggctaagattagatcatctggggagactggtctttagctaagagctgtgttcactaaacagtgtccattaaacacgggctgccctctccgtgcgtgttgatagctttgtgatttcggttttctctccttagacaccagcacccagtggacaatgctgggcttttttcctgtatgactttttcgtggctttcttctctggcccgtgtggcccacaagaagggggagctctcaatggaagacgtgtggtctctgtccaagcacgagtcttctgacgtgaactgcagaaggtaggcgcctctggtccaccctcatctcccccatgccgggtgggcagggcctgagctaggagtgtgaagtccacagctctgtgtctttaaagagccgagctgtccagtggagggcgggcggcctggggatgactttctctttgctcttttgctttatctcctatttcacctttgatcctgttttaaccacgggctttctctctctctctcagccccgcttctcttcctgagtctgcagggagattatgttgctgccttgtgacagaatacatttttgtggtagctgattgtcatgattaaaatgtagtttacaactttacattttaccacaggaaccttcagaaagggttgggggcccctgaaaaagaaagttcttattcacaaattgcattcagggatcattttcctgggtggaaagaaaggcttttgctctcatcattttctgtatcctgggaggctccttatacagggtaaatgtgtagttccctaggaagggtattttttcccagaaggtgaagactatgtacataattttaaaggagagacttgtgtgagtggtggcaaaacctggagacaaaaagtggtggcaggcggggagctaggtgtgcctttcccccgaggagatgtgtaacgaggacgtgtgcccttgttaagactagagagactgtggcaagaagagctgaatgaagttgggccagacgctgcttccctgcgaagggttgtgtggatcttctgccgcaccaggctcatcctgtccatcgtgtgcctgatgatcacgcagctggctggcttcagtggaccagtaagttctaaccatcctttccgacagtctccaggggcccggccacggccagctctaacactcttattctgttgcagaggttgtgctcagctttgggctaggtagcagtcttagagatgccttcaggtctgttgaaaggggtcgatggattttggcaacagctggaaggatgaaagggcagtgttgccagagaagaaatggaactggcttgatttctgggtgggggtgaaatggaactgactccagttctgcacaggactgtgcttctcggttgtgtgttaacatgaactgacagtcggtgcaggcagatgtgtcttgcagtgctatgagtgggtgagagcacgttgtgtggcccgggctggtgagccagcaccgggaacataccaagtgcctggaggcagttatcacatgtttggcaggtctgtggcaaataagccctgagaaaactagaggactgtcgaggattttagagtctgacctggagtccgtttaagtttggcttatagtgtgactgtgtggcaagtgttggggtggcagccgtggttttccccagtctgtactgatgcagagtagacaagagagcctttgacgttcactctgtttcctgggcacctgtttcttacacctgctgtgctgccttacacttgagaccttgattaaatctattctctacacatttgccttgaggcatcggagcagtagtactgcttgtactgtgcgttttccatatgtgggtaagctggaggttcatggttttggtaagtatgtgcctaagatgcatggcaattaggtaaaactaatttgcagttttgtttttgtttttatttttttaacgtttgatgcctcttgttaaagttttgatctcttttctgaagcagagaacactacttttctggtattgggtttctatattattaataattgaccaactaacatactttatataaaagttttaagtaagaaggaccatgtaactgaaatgttgtgttatgtaatttaccaaaatggcaaacattttcatagagccagcttcccccaagaagagcttctgtcattgtttcactacagggctggtggctgctctgatctcatagaattcattcctctgggtagcaccatatgcaggctttgcgaataaagtgatcatgggctttcttgattccatttggccaatgcaagaacttcattggctcccctctaaaaaaaattccatggattgctgggatttttattttttattttttgaaaaaaatggtacctatccgtattcagcttggtggcttcacagtccctcccctgaacatccgtatattccttattctctcatttatggtgcagaacactggggtactaacctctaggaaactgttctagctgccagggaaagctaagagccctcctttaacaggaaagcagcagcatgctttttcttctctctgccgtttcagggaagagcaccttaaggccagtgttatttcatgggattctgccctagagctgagaaagtaatggactcatccataatctcttttatagatttgaaagtgtaaacaatacacacttccttttttggaactccaattctaatatgtttctttttcattggaaattgaaaaaccaggctggttttgagattagtactagcagtgagtaaacctcctgtctgtggacttaaatccttttgaggaacatttcgttttagatttttacaagttttctaatctggcacgactttcaaactagcttaatctgttcttacagaaacctgtgtaaggacagactgcccacatacgggctccccaaataaaatggcatttttatttcttgtccctgctcgggtttcaccgaaccttggtagccataatcagaacaaatgaaacacagtcaagttgttgtgttctgtttgtttttacctgccagccagctgatgctgacatttatacaccaagatgatccaaggttttggtgacgccggtggggactgccgctatatgtgcagggtgcccgggggtcatagtaatgttaatggagtaccagaatctctaacagtgtggtcctgtgtagccacattgctacacttacagagatgctttggggcctttttggattaagacagttctaaaagaccaggcctcacctatgatctgtgtataaagaattagcatcgcactgtagatctgcaagagaaggccgcctcctgcagtgctctctcttggtgaatgctaactctgctcgagggccttttggggaaaggacagtgtaaaacccttagagaggtaagtttcccacccttccaacctctctccacctgcagcttgcttggtgctgtcaggatctggatttggggggagtctctctgtagtggaaccagtgacagaagctgttctttagaattttcaggatggctgtattctgcggtcagaatgagagagtcaagctgggcagaatctctcgccaagagttcaggtaaggtaatgtttattcactgggaatgctttccacagccagacagctatgctaacagtctcaagttttcttccagtttgtttagatttaaatgatacatttgtaactttttaaaaactaaattttggttggatttttcatgaaaacctcttttttctttatcccctaaaaaatggtttgaaatgtcattgttatttaaaaacccgatgtgttggaacttctttaatctgctgtttcctctttttccccccctttgaaagtttcgcatagtgtaaacattcactatgtcttttaccttccctgctcctcccatctgggaggcgctgatgctattacccagtgctgaaaaatggcactctaaaggtatgggaaggaaggagcccaaggcaaccacctgctgtcctttcagccttcctttggagactgctccatcagtgccgaggtgtgtgggaacaggcttcactgcaccgccatcttactgagttgcttcacgtgaggaaaagggggctttggccctgtgactcagttccacattttggattgcatactggaaaagaagccaatcttcttgctagtaaaccagcaacccggctgtatacagtggtgacccaagcaatggatataaacctaaaaatctgagggaggggagaggtggaatacagtagttcttggaatctgaagtctcctatttgatcaggttatttcctgggacttggcaaaaatctgattggtggggatctcctaggacctagtggacatctggtattaatttaatctcaggaaaaacaagaaattaacccagagagagtctgggttttggaattcagcgtagctacctccagaccgtggtgtctggcctccatttttgtctgtcattcagctctgacttacagctgcagtcacctttgctataaggcacctgggtagaagggtggatgggcttcacatcaatttttttcttcctttagggtgggggattggtttggctttcttttgttgtggttttttgttttatttttgtcaagattgatttttagatgcaaggacttgaaaagacccagaaggatgccaccagtttttccttgaggcctaggattttttattctgtcccgagcagaggtaattcctcacaacttagtgcaccagtagcaccagccattttgagcagagtacctctttggggagcttttcgttttgttttgtttttaattctctttccttagcagcaaggtcttttttcctagagaatctactccgttgcagaatcattgcaacctcaggagccctcactgattgagtgctgtcagcctgatatactactttggactctggaaacagatatgggttctattctctatttctactgtgtgtcgttaaacaaccgtcggagaccagatgacctgttagatggctagtcctgtataactcgactctgtatgtttcaatgtatgttactgcaatgcttcacctgctgtacagtgtttgtgagatgctctttgaagatggtacttttatattttttcattttcaataaaagtacattccttcccacttcctggtatttaatactgttgctgaatgtgccttgtgtgagtgtgtgctccggcgttgcaggacctcagctggaggtggcactcggtggttcttgggggctggccgccttccctctgcaggtggtgttagacatatgctacctgaggtaacatgttttcatttttgggagggagtcgggagtggggcgggcccatgggagggtctctggatttttgatagcctgctttgtttgctctcttctgtactattaaactgctgatgtttattttcaggaatgttttgcaaatgcacttctcactcttccccagtacaactgtaggtacactgttcctttttatcaaataagcacgtttgaaacgatccaaaaaaaaggtcttaatttcatgtaaacaaatgtatccatgtgtggagatactggaataaggtcaaagctatacttttgaatgaccatgtgtttagagttaatttcagctcattgataggtttatgttacattagaaagagtaatggttttgatgatgtcctgtaaggaagaaagtttgcaattagacctagctcctgcagaatgccctgagtaagttactgcaggcagcttgtaataattgggtcttccaaagttttgctttgcttgcgcactggtccctgagtggagctgcctactctttctaacttaacataaaactatggcattgtgtgtgagtgccgtggagatgttgacagtggtgtgtgtctctccctgtaggccttcatggtgaaacacctcttggagtatacccaggcaacagagtctaacctgcagtacagcttgttgttagtgctgggcctcctcctgacggaaatcgtgcggtcttggtcgcttgcactgacttgggcattgaattaccgaaccggtgtccgcttgcggggggccatcctaaccatggcatttaagaagatccttaagttaaagaacattaaagagaaatccctgggtgaggtgagtgaggggtgtttgcttcacagcagagagcaacttcctagcttgaggttcattcctctagggccctgccttatcctttatcttcctcctgagacaaatgaaccgtgtccttgcagggtcccctcactactctttgtatcttatagctcatcaacatttgctccaacgatgggcagagaatgtttgaggcagcagccgttggcagcctgctggctggaggacccgttgttgccatcttaggcatgatttataatgtaattattctgggaccaacaggcttcctgggatcagctgtttttatcctcttttacccagcaatggtgagtaagcctcccagctgaatcctggcagcttctccttaggagatgagttacttccattgggttatagtaggcattgctgaggtctcacagctctgattggaaatttcctcaaagcaggttcaatctagagctcgatagtgcttgctctatagggacagaattttgacttgagaggaggtaaggtgtcacttgcatgaaagagagtctgaatgagaaggtcagctggtgaaccctgtcccacttgacataggagtgtttgagtcactgcgttggagttggtgctaagtgatagggccctcctgcctcccctttggaagcactcagtctctgtggtcactattgagaataaatactttcttgtcttcattgccttataaagagataagaattcagtaatgttttattacaattcaataggtcacttttattaaagacagtacgattacataacatttggcccatcctagcaagcaggattatatgctcattttattgagaatgaccttaagcagattaggtagttctcaagtttgaatgagctttaatttggcgtggcatcgcttttcctttcagatgtttgcatcacggctcacagcatatttcaggagaaaatgcgtggccgccacggatgaacgtgtccagaagatgaatgaagttcttacttacattaaatttatcaaaatgtatgcctgggtcaaagcattttctcagagtgttcaaagtgagtttaaagattttgtatgtgcatgtggtagaaggaccttggattctttgggtcttataattcacacactttgctttctgagcacattacgtactaggactagtgtctagtatcgtaggacataatatcatagaatctttgtgttcaaaagggatcttagaggtttgaacccataacctcatctcactgatgaggaaattgagacctgggaaaatgttgatttttcccagttaaaacacagctagttaggaataatccagtttcgaagccccctgtgtatattctcatcctgcccatgattttccagcctggtcatgaggctttcacagaagacaatatcaaattactactgagagcatcacctttgcccactctactctgtggtttcacgggaaatagtttgtggcccttgaggtaaactgggagtcaggatggctggatgctggtcctagctctgtcaaacgtgtaagtgcccacaaagctaggagaaatggcacagatggggcattcagaaagatctcaacacaaattgaaccagtgtgccttgaaacaggtgaaatttaagtagtagataattaaaaacaaacacatagatacttaatttaaataaaagagatgaggctgttggtggaccataacctcatcaggagctgagtccagtgctgtgaaacagtcaatgcattatagttggagtagaaatacagtgttcaggccaggcgccagtggctcacgcctgtaatcccagcagtttgggaggctgagttacgtggatcacctgagttcaggagttcaagaccagcctggccaatatagtgaaaccccgtctgtactaaaaatacaaaaataagctgggtgtggtggtgcatgcctgtaatcccagctattcgtgaggcagagacaggagaatcgcttgaacccaagaggcggaggttgcagtgagctgagatcacaccattacactccagcctgggtgtcgcagcgagactgtctcaaaaaaaaaaaaaaaaaacaaaacagtgttcagagcaaggcagctgttgttttcctttcattgagtaaccttcaggaacatgatgtccaattctggaatctacatttgatttatgagggctgttaagctaagaagcatccagaggagatgagcactcaagaggtgcccagcagtggacggggctgccttgttaagcagtgagtttgtttctactagagtggaacaaatggattctgaatggacatctgccagcaggttgatggcaggatggctgccactggtcccttctggctctctgattctgtagttttatgatcttttttctgaaatttccctcatccatcagcccctgactggttatctttacctgtatgtattaatttgaaaagagtgttcttactcattatagacatggccaaggtgtataatacatgttcaagtaaggagttcagtgtttttatgtgacttacaagctagctgtgaagatagttcccaatgccttaggcagtggtaatacctttaaggtcagtgtataccctcttagaagaattaagtatttgccaggtacagtggtacatgcctgtaatcccagcactttgggaggcctaggcgagtagatcacctaaggtcaggagttcaagagcagcctggccaaaatggcaaaaccccgtctctactaaaaatacaaaaattagctaggcgtggtggcacagcctgtaatcctagctactcaagaggccgaggcaggaggatcacttgaacccaggaggcagaggttgcagtgagctgagatcacaccactgcactccagcctcggcaacagagtgagactcccgtcttaaaaaaaaaaaaagtattggccgggcgaggtggctcatgcctttagtctccacgctttggaaggagagacaggatcactagagcccaggagttcaagaccagcctggacaacgtactgagacctcctctctacaaaaaataaaacataactgggcatggtagtgcacatctgtggtcccagctacttgggaggctaagatgggaggatcacttgagccatggaggttgaggctgcggtgagccgtgattgtgccactgcactccagcctgagcaacagagcgagacctcgtctgaaaaaaaagtatcttattgttctgcttcctgctccacggtcttcagtacactatggttgctttgctaatatgggggttgattttgcaaatatttaagaaaaatcattctgcctatagaaattgtatttcacctatcttcttccggttgtcattactgcatttttatatggaagcttctatcccactgccaacatacagcaggcactctgggaaatgttagttccctccccactgccccttttttttttttttttgagataaggcctggctttgtcacccagtctggaatacagcggtgcaatctcggtgcactgcaacttccacctcccaggttcaggcaattctccggcctcagcctcccaagtagctgggatcataggcgtgtactaccacacccggctaatttttgtatttttagcagggacggggttttgccgtgttggccaggctggtctcgaacacctgacctcaggtgattccccctgctttgggcctcccaaagtactgggattataggcatgagccaccgcacctggcctcttagtccctccctttttaattctccagtgccattgtgttgtctttcctattaattccttaggcaaaaagtcaacaacaaccaggtaagcaaacacaactgccaattatagatacaattaatgtgttcattccttctcaacctaagaaatttacaagaagaatcagaaaaaggtatcatagaagatgatgattgagttcatacatagtgactgctttctgttagattcattcctgtcacttgatccatttcaaacctcagccttttataccagctttagtggtagagttgatagtcataggtgttgaagggtggctggagacctacagagtcttgtttggaggtggaggaacaacatccctaggcttcttttaacttgctttgaaattggcttgctttttattcatagaaatccgcgaggaggagcgtcggatattggaaaaagctgggtacttccagagcatcactgtgggtgtggctcccattgtggtggtgattgccagcgtggtgaccttctctgttcatatgaccctgggcttcgatctgacagcagcacaggtcagggaaccctcagggatggggaacattttagaaataccacatttgctggaggctgaggcaggaaaatcacttgaacccaggtggtggaggttacagtgagccaagatcatgccattgcactccagcctgggggacagagcaagactccatctcaaaacaaaacaaacaaacaaacaaaaaaaaaataccacatatggagatgatgctgtggtcctctccttactggacctggaggttcccccaagaattagtaggtattttttcattcatgggattaagctgagaagcagaagagtggggagccagcccttatgcacaaatagtgtatgagttgtttttagtcaacataagtttgagtttaattctgaaattacagatcatcctgtggttcatatttactgacaattttaattgaaggtctcaaaaactctacttaaaaaaaaatgtggccaggcatggtggctcacgcctgtaatcccagcactttgggaggccgaggcgggcggatcacttgaggtcagaagtttgagaccagcctggccaacatggtgaaaccctgtctctactaaaaatacaaaaattagctgggcatagtggtgcatgcctgtaatcccagctactcgggaggctgaggcaggagaattgcttgaacctgggaggtggaagttgcagtgagccaagatcgtgtcactgcactccagcctgggcgacagagcgagactccgtctcaaaaaaaaaaaaatgtaattgacttgtaataacagctgaccgtgaagttgcagccttcctagcgcctgagaggaaattcatggtgtcaggttacttcagttgcatagcatcattaggcacagtttcttctcttctcctattttcaggctttcacagtggtgacagtcttcaattccatgacttttgctttgaaagtaacaccgttttcagtaaagtccctctcagaagcctcagtggctgttgacagatttaaggtaagtggctccttcccctgcccccgtgtcaggagccctccccacacaactaactgctggctctgttcaaggggccacccaggctggcctcactgggcttaagcttggctttggccttttggcaagttggtaagaaaaagggggcagtggaggagactgaattgagggatgagacttgtcaccttttttaattaatgtgaatttttaccttttgtgaacggccatgatctgggctcccaggattgcagagttcccctttagagctagccccttccacctgggcctgacatggatgtgtcgcaactcactgggccttgaagtggcttaaacctagaagaccagcactgtggggcatcttccccttgatctttgctactgtcactttgattgattgacatgctgaatcctttttgatactttctttttcctgccctgtggtgctactcacgatgcagggaaagcagttacatggaaatagtcataaaactaggtcatgttgagaagtgcagttaagtaagtctcagcttcttttcttgcaggtggttagttgatcataccttggctgtgttctttgttccttcagaatactacacatacatgatacaaaagggagtatatttgggagggtggagagaaatagatatttgatagtggttaatacttaacaaaaaaagggatgccatgtgggctggaattccttgatgttgccactgcatagattagctcctatgtccctgcttgtctttattggccagtgagaggaataagaaagcaattttggtgatgtgaaggcttgaagctcacatgtttgagggatgaatataatcatcttggaggttcaggagaaaacaaattggattttcttcttaagaaacatggaaactcagttcccgagatttgtttgtattctacttgtttacagttgaccgggtgacttttatttggtcaagaaagctagtcctggctgggtgtggtggctcacacctgtaatcccagctctttgggaggctgaggcaggtggctcacttgagcccaggagttcaagaccagcctgggcaacacagcaagaccccgtctctacaaaaaaataaaaaaatagccaggtgcagtggtgtgcgcccacagtcctagctacccggggggctgaggtgggaagattgcttgagcccaggaggtcgagcctgcagtgagttatgatcatggcactgcactccagcctgggcaacagaatgagactcttatctgtgtttttgtttttttttgttgttgtttgtttgtttcttacaaaaagagaagaaagaaaaaggaagggagggagggaagagagagaaggaaggaaggagagaagagagaaaggaagaaagctagtcttcgaatgtgcccctcccccaccccaacgtggccacttcttagaaaaccaagagctgagtcatatgaaaaaaaatggcctaatgggactcagagctttattttgctgaatccgcaataaccagtcgtggatgaaagcaaatgtttgaccataagttctccctgctgttcatttctatattcttgttagtgaatggatttggtagcactttggataaagtaagggcatgtagtgtaggttggtcctccccttgtttttcgagggctctcatctcctgcttattagtgaggacttggattagcaggtggctttcacatcataggtccctcctctctccaggaagcctcagaattaatagtagaagcagcaccacccacagctctatttgatgccccatgagactttagaccccttctatcttacttctcttggtggtctcagtctctttttttccttgttattctttttttaattagatgcttggcacaagataacaagtatttatggccagccttggtggctcacgcctgtaatcccaacactttgggaggctgaggtggttggatcacttgaggtcaggagttcaagaccagcctggccaacatggtaaaaccctgtctctactaaaaatccaaaaaattagccaggtgtggtggtgtgtgcctgtagtcccagctactcgggaggctgaggcaggagaatcgcttgaacctgggaggtaggggttgccatgagtcgagatcgcgccactgcactccagcctgggcaacacagcgagactctgtctcagaaaaaaaaagataacgagtgtttattacttaattcctcccgaactctaagccggttctttcttcttatcttcagatgtctattaattagaattacattgactttatgagggttggggggctgttttttaggtgtaaggcaactgtttattatgtttctgagtacgttaaaggaagtttgcctcaatcttgggggaccatctaaggcagccttttgaaaacaacagaactgttcctgggattgtatctccccaaaagcatctgccctctcatcatttttagaagatggaatatagaataacaaggatgagacttgcttctttgattcattttacagaccttgaaactcactgacgatgttgcagagccctgcttttcaccctgtgtcttgttttacatcattttctttctttcttttttaaattggagttggagatctgacagatttgcaagtatagtcttttctctatttcacctaccctgcaagtgcatatggcaggagaacttgttgcttcctgttgggtagtatgcataaagaataggaaaagagatataaaatttatttatgtaacctgtaatttattgatttgataacctgtagaaaggcagtgtgaagctgcactgattgtcaccagtggaatagggtggcttgctctagcaaatacagacacaggacacccagtgaaatactgcatggaatatacttatactgaaaaattattattgtttttctggaattaaatttaacgggggcccggcatggtggctcacgcctgtaatcctaagcactttgggaggctgagcaggtggatctcttgaggccaggagttcgagaccagcctggccaacattatgaaaccccgtctctactaaaaatacaaaaattagctgggtgtggtggtgggcacctgtaatcccagctactcaggagggctgacacaggagaatggcatgaacctgggaggcagaggttgcagtgagctgagattgcgccactgcattccagcctgggtgacagagtgagatcctgtctcaaaaaataaataaatacattaattaattaatttaactgggcatcttatatttatctggcaaccctgtgagtagtcccctcttctgttctcaacagattcattctgatttgattcttctagtgaatgaatagtgttttcatggtcagtgtcctgtgataaagttgaggcttatggtttataggtttatatggttataggtttatgttatatctaagattctgttgttctgacaggtgcaaattcaagtagatacaagttcaagtatggggaggcccttctctgcctcttagcacgtcagggcagagtgatctgaagccgaaactctcctggtagaagggagggtaaggctgcggggagtaggaaggaaacatggggctggagctgtgaaaaccagtaggtactggcatgtttcttaatagttcattgaggcctaaaagaccttcatcctttgaataactctttaagggagagaaatgatggaaattctgtcggcatgtggttttactctgtgaaggtgatcaaaatgtttggcatgttactcttagttcaatctctcaggaaggctttgaacaaatgaaagcagcagccatttcagcaagcgggggccacacctaaggttactcgagagtgaagattatctcagaagtttagaatcatgacacttcggggaagataggatcagggatgaatgggagacgggggcttaagggagagcttagaagtttagaatctaagagagaaagggtttgtttttggggagagggattatgtatgatatttaatagcacctgcaaactttaagatagctggggggttctcagtaactaaggagggtcctgaccctaaaagctatcttttctctaaagattttgtaatgtttaaaatttttttaaattaagataaatatattttaaatcatactgtgaatccaactggtatagcattctgtagagaagatcactggcttaagaggattgttagaaggtggctcacacctgtaatcccagcactttgggaggctgaggcgggtggatcacgaggtcaggagatctagacatcctggctaatatagtgaaaccctgtctctactaaaaatacaaaaaattagccaggcgtggtggcgggcacctgtagtcccagctactcgggaagctgaggcaggaaaatggcgtgaactcaggaggcggagcttgcaatgagccgagattgcaccactgcactccagcctgggcgacacagcgagactccatctcaccaaaaaaaaaaaaaaaaaaaagtggattcaaagtcttacgggaaaatcctgggctgtgatttattgtgatcagtgttttacatcttaatttcagaaacatttccctcttcaagagttcattcttcagctgggtgcggtggctcacgcctgtaatcccagcactttgggaggctgaggcaggcagatcacttgagcccaggagctcaagaccagcctggccaacatagtgaaaccccatctctacaaaaaaatacaaaaattagccgggcatggtggcacgtgcctgtaatttcagctacttgggaggctgaggcatcagaatctcttgaacctgggaggtggaggttgcagtgagtcgagatcgtgccactgcactcctatctgggcaacagagcgagactccatctcaaaaaaaaaattatttttcttttaacataactcaggggtctctgggaatgagtgggaggaaagtgtcttgttctcttcccaagggttgtttctcagggagatacccttcacttccatgcaagcctgttcctttggttgtttgaactctcaagttccaaggcaaggctttgaagacatgagagtttcttggcaagaagatgttctctgcggtagatgaaactttagatactcttttctgacggtagcaatgtaagcctgtgacagtctctactcctagatacatgcggcgctgtgagtgtgggaagtgggcaggctttggcattctgcaggaggggtctggaaggaaaacacgtagtgagcatctgtactggaggtcagcatgccctttgcttttcctacctgctttttactactccttagaacaaggggctacgtgccagtcagttaaatgtcattaggtccgctttaggctggctgagggggaaaggcagtttagcatgtaatttgtcatgtggaatattgggtcattgataaggcccctggacctcttgaggttgccccacactcccgtgaccccttgatgggcctgagattgggctgcactaatgagctaccttttgcccttcagcttccttccactgtatagcctgatgtgttttgctacgtgagtgtacgccctaggcttgtctccctggtcttgatccagtgtctcatctttgcacctctctcacaactcctatcagagtttgtttctaatggaagaggttcacatgataaagaacaaaccagccagtcctcacatcaagatagagatgaaaaatgccaccttggcatgggactcctcccactccagtatccagaactcgcccaagctgacccccaaaatgaaaaaagacaagagggcttccaggggcaagaaagagaaggtgaggcagctgcagcgcactgagcatcaggcggtgctggcagagcagaaaggccacctcctcctggacagtgacgagcggcccagtcccgaagaggaagaaggcaagcacatccacctgggccacctgcgcttacagaggacactgcacagcatcgatctggagatccaagaggtaagtggtccgccccctgcctccctgcccgcaccccaccaccccatgctgatctgccaccaataggcggctgctgttccttttcacaaagtgctttgtggctaggagtgattttgaactaaagagcaaattagaccagctctaactctaaaaaaaaaccaactaagcatttagcaacagaaatgaataacaactaatcttatgaggtgatcattttataagcaaggaaatgaaacattcaagaggattttccaggatttttccccaaagaggattctattttagttgtatgtgagctgtgacaattatttctgattgttacaagtctgtgagcgcccttgtgcactaggctgtgcatcatacctggcacatgataggtattctcagtgctactgtgacaacatttgtgttgtaatgatttattcttaatataagttaaggatcgttaacggtagatgatgtcacagcccaggtagcacaagattagtctcagagggcctcctatagggaatggtggaacagagatgccaggttcaaggcttttaaaatacagactatgtatttcggaaccagcaccatattcacaggtccgtgtcattagagggccccggatgtgtatatattcattcattcaacagccatttcatgagtatcaaactccatgccagatgctgtgatagggctgggcacagagccacaaaaacccaaacagacaaaaatcccgtccttcttggagtttacattctagcaggcacagacaggtcgtgagcaaatacaatatattgcatatcagatggtgataagggctatgacagaaggggacagaggctgggcatggtggctcatgcctgtaatcccagcactttgggaggccaaggtgggcagatcacttgagcccaggagttcaagaccagcctggccaatatgttgaacccctgtctctacaacaactaggaaaattagccagctgtacgcctatagttccagctacttgggaggctgaggcaggagaattgcttgagcccaggaggtgtaggttacagtgagctgagatcgcgctactgcactccagcctgggtggcacagtgtgagactcagagtgagtctcaaaaaaaaaaaaaaaggtgggtgaggagagagtgtgctggggcagggagcaggtgtggttacaacttgaataggctgcctgagggaatgccttatttaaaaagtagtatttgggcaaagatcaaaggagatgagggagagagctacctgggtatgggatgggtggggaagaacattccgggccaaaggaacagaaacacagaggccgcaagtggtgagtgtgtctgttattggagtggaatgagcatgggagagagtagtggatgccaagggcagaggtggtgcctgccagagcctctggtgagacttcagctttactccaagtgggaagaggagcctttggaggattcacagcagaatgacatgattggacttatgtatgaagaggatcattctggttgctgcaggggagacaaggaagcaaggagaacagtcaaggctctgttaccacagtaaccgggagaaagatgaggatgtcttagatcaaggttgctggtgggaggtagtaagaaatgtttgtccatgtaactggaagtagggaggaggtttgaatgcagtgtatatgaaaatcagcaactgaccagaggcatggtaagccaatccagaactagactgagaagaggacaaaaagcttccagcccttaaaagctatgagcaagaaggggacacagtctttagtgacaccacttgaaactatgagtgtcattgaagggcatgcaagtcaggtttttacttcagttaactttttttttttttttttttttgagacagagtctggctctgttgcccaggctagagtgcagtagcacgatctcggctcactgcaacctctgcctcccgggttcaagtgattctcctgcctcagcctcccgagtagctgggattataggcacgtgccactgtgcctggctaatttttgtatttttagtagagacggggtttcaccatgttggccaggctggtctcgaactcctcacctcaggtggtctgcctgcctggcctttcaaagtgtggggattataggcgtgagctgctgcatctggccttacttcagttaacgcctaacaggctttttatttagtaactattagcttgattattgaggcagctctaatacattgctatcagctctattagaaaatgattccacacgtgcagctaaaatgtattcttttgctttgtatgttgaccctcattttgcccttcagagcccacagacaatgggagacctttagccatttgaagagagatgccttaattctccctgggcctttgctttagggaagagaaggggaggtaatgtttgccaagtgtcttctgtgcaccaggcatttttctcatttttgatgtctcatttagtcatcatttaatcataagaatagcatttttctcatgtaaatctaactggcctgagcagaggttgaacctgtgacttgacctccttgttgccaccaggcagtaaaccattcagtactcgtggaccatgtcaaaaactatttgttcaactatcagacactgtacttagttttatgaggatactgcctttcctcaaggtgctcagagtccaaagaaggagacagacacagtattaggttaagtcacggggcctggatcacacagttagcaagtgctagtgaagttgggatttagataaagacccatctgcctccagaatccatgctccgtccacactaccactctcccttccttcctggggacacttgaactggcacggggttgtaaacaagtgacccttttgaagtcatctgtctgtcccttgaaaactttcaacaccactttgagaactctttatcttgcctaaggatactcagttaatcatagacttggtgttctacttttttgtgggattgatggtataaatattcctcagatttttggaaatgttttgcatgcaacagtgtccatggtttttattgaaaattaattatgtatacaccctggagaaaaatcataataaaatgatttttaagagtcctgccctctcttctggcaaacaacaaaaacaagtaaataaagaatatgggtggccaggcgtggtggctcatgcctgtaatcccagcactttgggaggccgaggtgggtggatcacttgaggccaggagtttgagacgagcgtgaccaacatggcgaaaccctgtctctactaaaaatataaaaattagctgggtgtagtggtgcatgcctgtaaccccaacaggagaattgcttgaacccggaagcggaagctgcagtgagccaagatcgcaccactgtactccagcctggttgacagagcaagactccatctcaaaataataataataataataaaatgatttttaaaagccctaccctgtcttctaaaaaatgacaaaaacaagtaaatgaagaacatgggttagcagcagaataggaaagaggctgggcctaagaatgacggtgggatactggaatgtgtgcggcatatttactttccccaaagggcttccattcctgttatctcaggtgtctccacagaaacccatgagataggcagctaatgagtgagaaaacaggtaagtggcctgctgagtcatcagggtgacagttctgtatgggtagactacagttaatgtgtttttcctcaagtccttagcgatgagtggttagtagtctctaaatgaccctcctctctgtgtgccttgtccagggtaaactggttggaatctgtggcagtgtgggaagtggaaaaacctctctcatttcagccattttaggccaggtaagatttttgttattgtccttttctgctgctttctctggtttgcaagagtctcaggaaaaacgaacaaatttcctggagagtcaggaaaggtggaaacaaatgaaccctcagcctgcattgtatgcccccaatcccccgcagttccccccagttctcccccttcacagccttctgcctggaaggaggcctggtgggcgcctgatggatgactgactgttgtcccagctggaaccatttggtctcatgccttctttcattcagcatgtatctattgagtgccacaggtatgcccgtgtattgaaaatgtcagagataagagatgagcagacaccctacactgcagcgctgccaacagagttaacctgtaaagaagcagggcggccagcactcccagcctctctgtcagacaggactgtcagggtttgatctagaagcaaagcccctctgttttctgcctaatccctgaaagagtcatgcccttggggagttcatggtccagtggggagcaaggccttgagaacacaacaagcacatctccaggcagggagtgaacagcgtgcagggcccagcacacggtggccagtgctgagagtgagggacaggatggggccggagtcatcccactgagacacactatcattgctgtgttttagaatcaaacaatccagaaaaaaaaaaaaaacaaggtgcccacatgcttttacattagaattaaattaacttgacttagatggttgagatgagcataaacttatgattatctctacaccctgatggataaggtccactgaattgaaatgaaacagagggggagcaggggtgcttttgtagcccccagattatggaatgctttcttgtcttgtttggcatcagctgtcacagttggtgagttgtggtcctccttgagggtggtggtgcctggggctgtctgagtcagatcatggcaggcatcacctccaccttctgctttatgacactctccagtggctgggcccagccattggtcttgtaaaaagcaccagacttcctaggtgatttatgatgaccaaccagatttggagggccagtgaggagagacagagatggggggagggggagaaggaaagaaaaggtcaattcgtaagtgctgctctgccatctagcaatgtgctcctttttccagggttgactaggcagtggttaggttgaaaaccaagtcaggctttgcttctggacaaatcctggcaaccctgtctctggcagggaaacgggttgggctggtcagccctgctttaactgtagtttacatctgttgatagcgctgcaatgtgcggtgtttgtgcagcagccagaagtgccggctttccacagtagaccccctggggacttctgaaccctttgaagtgcacatcagaatgctaccagtttgtggtgtacgtaggtacacctgtgtgtgtacacgctgtgtgagggtgtttgagaagaccagcttatatgaacaagtactgcacaggctggttagtgaaactttgcttcaaagctgtagcatccctaaaccaagacaaatgtctactatcagtcccaaacaaaagaaatcatggaagggggtaaaatggataagtcaattcatatcaaaccattgcaactgaacacaaacttcaaagcacatggttcatcactgcttgtgggcaggcaaggtccatcattggtaaatggacactgtgtatatattataaatactaggtgatgtctaacctggactttttttttcccttggtcctcatttcatagaagcaactggtctagccagcatcctaggtaattgccttggatgagttggcctgcccccatgttgaggcagggattagctggaaacccctacagcatcctctccaggagaattctgcaagaacctcttgcttgtgcttctcctaatttaaacagtttgcacacagcaaatgggctgcagagggaagtgtttgccttcaagttatgggttatgctgagctcccatcacacataagcaaggagaactttgattttctttgctgcttagctctctttggaattaaaggtggaatctggatttgggtccaaaaagcatcccgggaaattaccagagctagattccattgtggaaggtgggggttccgttggcatagggtgatggttttgagttatgatgccattggatggtgtctctctccctagatgacgcttctagagggcagcattgcaatcagtggaaccttcgcttatgtggcccagcaggcctggatcctcaatgctactctgagagacaacatcctgtttgggaaggaatatgatgaagaaaggcaaggaatgtttggcttctgtcatgctttccatcttggccgcgtgagatgcaaggcagccctagtcagcaggctctgctcccgccgtgtccctgacgctgtctctttgtgtcctccagatacaactctgtgctgaacagctgctgcctgaggcctgacctggccattcttcccagcagcgacctgacggaggtacaggccttccgcccctgaccaggcatttagcagagtggcagagctgggccagagctgctcctgggagtgcaactgaaatgcttgggagaagagcctcacagggagttaggctgtcattaggcctttgtgttaggaaagcatgtgtccattagggcagggatgttaacactgcttgttttaaggttgtaagtattttctgtgtcttggggattgtaaacaaaatcccattgttgactcagagttgatgttttttattctatccagatatttttaaaactacaagtaagcgtgtgcatgttgagcatcttccttgaacttgattttgccaacctccttaactcagatagtctgtagagagcccttttctattagaaagagcccttagaacaaatccacatttctttgggtctctgccctgcagcagtttccagaggcttgtctttggaactaatttgtgctcttcagtgttaaaacttgtctcccatgaattgccctgaaggtctctgggattggcacctttatttagctgatttcagttaaatccctcaaaccagatttggtgaatggtttaattactttagaggtccttaaatccatgtccccagatcagcagcatcagcatcagcatcatctgggaacttgttagaaacacaaattcttaggctgttctccagacctactgaatcagaaactctaggggtggggcgcaaaggtctgttttaacaaaccctgcaggtaattctgatgcaacttccagtttgaaaacctctgaattaattgaatatttgacaactgatttattcatttaatcatttagtaacatttattaggtgtttattatgtgccagtgacatgtgcagacactgtttggcactaagaatataaaggaataagacaataatctgcacgtaaagaagtgtacagttaagaggatgagatacccaaacaaataggcacaaaataatctgatgaaaagagccccatctctttggggtactagcgggaaagaggttgggggagatttcagaggagatgatgccagaactgagcagacaaagtagaggcaagcacatgacattgtcatgttcatagtatacacataatttcaaatggcttaggtcccaggatgtggaagggggattgtgcactggaggctgagaactgctggggaactgggtgacaaagggtctggtttgtatgccatgtttggatactcaaggtttatcctttgaggctcttgaagaattttaagcaagggtgggagatggtcagctttgtgttctggaaagatcttcctgccatgtggagaatggattggagggggagcatccgggtggactggcaagaccagatgtaggattgatcggtacccagatggcagtggtagaggaagaggcatctgggccaactcccccacttcgttgaaggatcagcatggcagttcatctgcggggaatcagcatggcagttcatctgcggggaattgacagaaggagctggtctgggtgggcaagaagagaagtgactgggtgacccctccacgctgttctggacttgcgctggaggcttcaccacacttctgggctcttgtagattggagagcgaggagccaacctgagcggtgggcagcgccagaggatcagccttgcccgggccttgtatagtgacaggagcatctacatcctggacgaccccctcagtgccttagatgcccatgtgggcaaccacatcttcaatagtgctatccggaaacatctcaagtccaagacagttctgtttgttacccaccagttacaggtatggttctttcttccctcggctgcctgcctgagtttgggaaatcagaaacagggaggtaggtttgctccaggtatccttgtgttataactagaaattcctggaatcaaggtttcattttcttagcaaattagccccctgtaccaataaagctcactgtaccagtgtaacagatggccatctaaatcagagatccttggagcatatcagcttctgcatatagatcagcaagtaaaagggctgagaggagcaggccaaaaatggagtttgggtataagatagtttggaaagcattgtgttaacatctctatgcaagtgggaactgttttgggaaaacaagcttttctccctctgccattccatcataagcaggcactttggagagcagctcaaggatgttgccatctggctcacatatgttgtcacgtttagggggcaaaccctccattctgccaaagaaagtcataattatgtatatttgtgagtgcagtgaaagggtgtaaatttaatgcagggctcatgtggctccatcagcagattcatgtgaaaaaccggagggactcggccaggcacagtggctcacgcctgtaatccctgcactttgggaggctgaggctggcggatcacctgaggtcaggagttcgagaccaactggtgaaaccccatctctactaaaaatacaaaaattatccaggcatggtggcacgtgcctgcaatcccagctactcaggaggccgaggcaggagaatcccttgaacccaggaggtggaggttaaagtgagctgcgattgcatcattgcactccggcctgggcaacaagagcaagactctgtcacaaaaaaaaaaaaaaaagaaaaaaactggaggaactgctccttatactatgtcacgaggcacaatacactgaagtggggttctcagtgttggcaccactgatgttttggaccagatagtccattgttgtgtggggctgctttgtgcacccctggcctctagccactagataccagtagagacagtcgctggcttacggttcaacttacagttttttgactttatgatggtttccacacaaccattctgtttttcactttcagcatagtattgaaaaaaattgcatgagatattaaacattttattataaaataggctttgtgttagatgattttgcccaactgtaggctaatgtaagggttctgagcatgtttaaggtaggctaggctaagctctgatattttcaatttacgttgggtttatcaggatgtaagcccattgtaaattgaggagcatctgtgtacctctcccccgagttgtgacaaccaaaaatgtctccagctgggcgcggtggctcaggcctgtaatcccagcactttgggaggccgagatgggcggattacctgtacggcaaaaccccgtctctactaaaaatacaaaaaaattagccagacatggtgctgcatgcctgtagtcccagctattcgggaggctgaggcaggagaatcgcttgaacccaggaggcggagattgcagtgaaccgagattgcgccaccacgctccagcgtgaacgacagagcaagactctgcctcaaaaaaaaaaatgtctccagatgctgccaaatgtcttctgggagcttaactcgtctcctgtagagaactactgaactaatgtatgggtttttgaatgtatttgcacaaacagcatattgtgttgtctctgcctttgccttcagtacctggttgactgtgatgaagtgatcttcatgaaagagggctgtattacggaaagaggcacccatgaggaactgatgaatttaaatggtgactatgctaccatttttaataacctgttgctgggagagacaccgccagttgaggtaagatctgatggtgtttgcgtgtgtccccttctgtctctgcaagggaaacacagccggagtgagtgatggagagacctcagctgaatccagtgtctgtgtcttattggcaggggccctgttttctggtgaacagactgctgtgccttagttcacacactgattctgctctaggagagcaggattgtggggctggtgagctgaggtcttctgtcactgagaacttactaatatgacaatggcagggagaaggatatgggctcagtgagggcagagaagatgtgtgctgctgttcattcacagcttagtttcctaagctccatccacctgattgaagcattatgaagctcttttttaaataaacaagtgaataaagtgccaaggtagggaaattaaatattgcatacatttgaaagcactcaggtcaggtgctgcggctcttgctggtaatcccagcatttttggaggctgaggtggacagattgcttgcgcccaggaattcgacaccagcttgggcaacatagagagaaaccccgtctttacaaaaaaatacaaaaattagccaggtgtggtggcaggcgcctgtaatcccagctacttgggagggtgaggcaggagaatcgcttgaacccaggaggcagaggttgcagtgagctaagattgcaccactgcactccaacctgggtgacagagcgtgattccatctcaagaaaaaaaaaagacataagagaaacttggaaaggagagcattaagtagtttctgttatctcaggtagaaccctgatggctgtttattgagtccctgtgtgccctgttataggcagttctcaggggtagggcctgtgcaggttgtaaccatgtgagagacatcatctctgtccttaagggactcacagtgttctagggaagaccgatgcttttatgctcttacaagcacttacaaatgtggcttacaagaccacatcacatgtatagtactaatggagttctaagggcgaatgggagggtgagctttccagggagtgtatgttgcctcatgaagaatggaagacttgaatctatctgaatggggacaactgtgactgcgattgggacaaggggaggggcattccaagtggaggaacgagtgtggaccaaagtagagaaatgggaaattgcagtgtggtgtaaggaatggtgtgaagtccagtgtggcttgagagtaggggctgtggacaccagtgagatgggagaggagcttgcaggattagggcagggccagaatatggaggtcctacagaaccaggtggaaaagcttatgtttatcctgtggtagcagtgggaaatgatcagatctatggatttggtttagtgatgtgggctcagagaggaggaatggaaatgaccccatgcctaatactttgtgcaacttggaatggacaagaacagaataaaggttactgtgtttggagtttagtgactggggagagcaaatgtcagtggactaaattttaaatcttaaaaatttaaggagatgaggaagtacaagaaatgagtataggtgacccttttaagaagttggatgtatcttttttcagtaatagcagtttaattgatgattccctaatatgtatcctgtggacattcatctggatggctaacatgactggagacttttttttttaaatattattagatcaattcaaaaaaggaaaccagtggttcacagaagaagtcacaagacaagggtcctaaaacaggatcagtaaagaaggaaaaagcagtaaagccagaggaaggtaatggccttttttgaaatttttagatttgtcatcaaagtttatcagaaataacttgtgtagtaagtaattcatgatgtttgatagcagtgtgtgtacaatataaatacttggtcttacatttctggaaaacaaagttcttatataatactgggagaccacgaggcaccttctgtttgcttaaacagaccagggcagtaagagtcaccttcagacccatgtcttctcctgtgcagggtggggtcaggtttaggtaattagaactgagtcatcctgagtaaggaaaaatcgaatggtgggtacaggtacacccttccatccagtgattcgcctctgctcatgaaaagtcccaaccaaatcagaggtgttctggctctaagaatatctgtgtcctcagaagcacccatgttagaacagtagactcgtcactttgtcttgacaatatagcaccaggactatgagtaagagtgacagagaggggtttttcctacttggcttttcctgtccagagcccttgatcctgtttcttaaaccctttatgttatcaacagtaacaaatcttgagagttaagggaagatatttgcaataatgtgggcattttcacctttgaattttaagttgcatgtcaatttaaatacacacaaacactgtgtgtgtgtgtgtgtgtgtgtgtgtgtgtactgtatagatgtagacatgtgtgttcttgttttaatctctttgttgcttcacctccttacctcacccttttgaatccagggactttcttgggtttgccattgctttggagacggagcctgttgctacttccttatccttaaaactgcaggaggtcaggcacaggtggcttatacctgtagtcccagtactttgggaggctgaggtgggaagattgctcgggcccaggagttcaggaccagcctgggcaacatggcacgccccgcttctctccaaaaaatataaaaattagccaaacgtggtggcacatacctgtagtcccagctacttgggaggccgaggtgagccactgcgctccagcctgggggaccgagtgagatcctgacaaaaaaaaaaagaggaaagaaactgcaggagatatttggtattgggagttgatcatcctgacttactgcctcttttatttctttttttaaaaggtatgggattttgaattcaggtatgagattttgaattcaagtgtggtttatgataccttattgacacaccccaaaaaacaaacagcacagaaggctgagacatttgttagttcttaccacgggcagtaaaaaatcagaatatcattagcaaacatatgttcttctgtacatagtcactaacctggctactcacaactcttaaagtgctcaaggcatgagggaggcttattctgagatttgtaaacattatttgtgtaaagagggaaaagccgggtactatgcttagtacctgggtgagaggatcattagtaacccagacctcagcgtcatgcaatatacacatggatctgcatgtaacagatgtaatatacacacggataagcatgtaacagatgtgatatacacacgaatctgcatgtaaccaatgtgatatacacacggatctgcatgtaaccgatgtgatatacacacggataagcatgtaccagatgtgatatacacacaaatctgcatgtaaccgatgtgatttacacacggatctgcatgtaaccgatgtgatgtacacacggatctgcatgtaaccgatgtgatgtacacacggatccgcatgtaaccgatgtgatgtacacacggatccgcatgtaaccgatgtgatatacacacggatccgcatgtaaccgatgtgatatacacacggatccgcatgtaacagatgtgatatacacacggatccgcatgtaacagatgtgatatacacacggatctgcgtgtaaccgatgtgatatacacacggatttacgtgtaaccgatgtgatatacacacggatccgcatgtaaccgatgtgatgtacacacggatccgcatgtaaccgatgtgatatacacacggatctgcatgtaaccggtgtgaggtacacacggatccgcatgtaaccgatgtgatttacacatggatctgcatgtaaccgatgtgatgtacacacggataagcatgtaaccgatgtgatgtacacacggatccgcatgtaactgatgtgatgtacacacagataagcatgtaaccgatgtgatttacacacggatccgcatgtaactgatgtcatatacacacggatccgcatgtaacagatgtgatatacacatggatctgcatgtaaccgatgtgatatacacacggataagcatgtaaccgatgtgatatacacacggacccgcatgtaaccgatgtgatgtacacacggacccgcatgtaaccgatgtgatttacacacggatccgcatgtaactgatgtcatatacacacggatccgcatgtaacagatgtgatatacacacggatctgcatgtaaccgatgtgatatacacacggataagcatgtaaccgatgtgatatacacacggacccacatgtaaccgatgtgatgtacacacggacccgcatgtaaccgatgtgatgtacacacggacccgcatgtaaccgatgtgatgtacacacggacccgcatgtaaccgatgtgatgtacacacggacccgcatgtaaccgatgtgatgtacacacggatccgcatgtaaccgatgtgatgtacacacggatccgcatgtaaccgatgtgatgtacacacggatccgcatgtaaccgatgtgatttacacacggatctgcatgtaacctatatgatatacacacggatctgcatgtaacctatatgatatacacacggatctgcatgtaaccgatgtgatttacacacggatctgcatgtaacagatgtgatatacacacggatccgcatgtaaccgatgtgatgtacacacggatccgcatgtaaccgatgtgatttacacacggatctgcatgtaacctatatgatatacacacggatctgcatgtaacctatatgatatacacacggatctgcatgtaaccgatgtgatttacacacggatctgcatgtaacagatgtgatatacacacggatctgcatgtaaccgatgtgatatacacactgatctgcatgtaaccgatgtgatatacacactgatctgcatgtaaccgatgtgatatacacacggatccgcatgtaacagatgtgatatacacacggatccgcatgtaaccgatgtgatttacacacggatctgcatgtaaccgatatgatatacacacggatctgcatgtaacctatgtgatttacacacggagctgcatgtaaccgatgtgatatacacacggatctgcatgtaaccgatgtgatttacacacggatctgcatgtaacagatgtgatatacacacggatctgcatgtaaccgatgtgatttacacacggatctgcatgtaaccgatgtgatttacacacggatctgcatgtaaccgatgtgatttacacacggatctgcatgtaaccgatgtgatttacacacggatctgcatgtaaccgatgtgatatacacacggagctgcatgtaacagatgtgatatacacacggatctgcatgtaaccgatgtgatatacacacggatctgcatgtaactgatgtgatatacacatggatgaacatgtaaccgatgtgatatacacatggagctgcatgtaaccgatgtgatatacacacggatctgcctgtaaccgatgtgataaacagacggagctgcatataactgatgtgatatacacatggatctgcatataacagatgtaatatacacacggatctgcatgtaaccgatgtgatatacacacggagctgcatgtaactgatgtgatatacacatggatctgcatgtaacagatgtaatatacacacagatctgcatgtaactgatgtgatttacacatggatctgcatgtaactgatgtgatttacacacggatctgcatgtaaccgatgtgatatatacacagatctgcatgtaaccgatgtgatatacacacggatctgcatgtaacagatctgcagatgtactccctgaatctaaaataaaagttcaaaaacaaaacagggaaaatcttcctgtatagctgtttctcttgcaaatgaaaaattaaattctgtgccctgcaactaactgaataaactctcctctaggccaagggtacccaatggaacctgaaaatctattcagaccatgaagggaagacaatgttggacgtgccttattatactcccctgcctttagagttcaggcacacaactgacgagcattaacatttatatagagatcctaagactgacagaacagtctctttgtagctgtaagatacctaattccaacctcactctattaaaataatagagcatcacaggacagatagcagggccctggaagaaatgcatattttgaaatgtctctgcaaagctgtctgttgaaggggaagttctgcattacgtagagaatctccttcctttactaggtctctccagagggtctgacacctttgataggagacattcacatctgttctctctgacgtctgctactgggaggcttcatctacatgacaagaaccttggcgtccacaccctgtcccccaccactcccccaccactcaagctaatttcaactcttcaggcagagcttaaccctttcaaccaattgccaatcagaaaatctttgaattcacctttgacctttaagctgcacctccctgccccatgttgccccacctttccggatcaaaccagtgattaccccacttatattgattgatgtctcatgtctccctaaaacataaaaccaagctgtaatccaactgccttgggcctgttctcaggacctcctgaggctgcgtcactggtcatgattcttaaccgtggcaaaattaactcctaaattgattgagacccgtctcaaggtactttctggtttacattctgtattctcatattagtgttaagaatctgagtgcgccagggagatcctcaggaatatatttgaaccttttctctcctccagcagccagccagttactatgtcctactgaatttacctcccgaaactccatcccaccatcacaaccccagttcaggcctttatcatctcttacctacagtgttacagctgcctcgttttgaacctgtcttccacacggtcagctgcgagatctagttaaaaacatgagaccagctaggtgcggtggctcatgcctgtaatcccagcactttgggaggctgaggcaggcagatcacctgaggtcaggagttcgagaccagcctggccaacatggtgaaacctcgtctctactaaaaatacaaaaattagccaggcgtggtggcgggcgcctataatcccagctacttgggaggctaaggcaggagaattgcttgaacccgggaaggcggaggttgcagtgagctgagatcacgccactgcactccagcctgggcgacagagtgagactctatctcaaaaaaaaacacacacacaaaacatgagaccaaccaactttcctgcatggagtctttcagtaaccttccattttcaaatattttccctgatagggcacatacagaaaaggctatttgtgtggaacacaggaggcatgaaagaggctgctcgctcccagaggcagctggtgtggcaatatcagccatcccaggtccttcctagcccaacagaagtcagacacacctgtcaccctttctgttgagaagttctttgtggggccaaaattcaaagcctttcttctgtgaccacagcctgcttagtcggcctcatctcctgccattctttaagtgcacatctgttccagctgtgccgaatcactgtggtggtgtgttttgctaccccgtgcctgtgcttgtgttgttttctctgcctgctctctcctttccccacccggtcatctgtggcttaccttttgagaagcaatacagaaagtcttacctgaaacatgcctgccaaccaccccacacctaagccaaataggtcaagtatgcctcccaggggttcccatgctgccctgcgtatagctctatcatcacattgagcacatttcactgtaattatgtgattattgatctgcctgtcctaccagtctgtggcaggctcctcagccaggtccctaggggtggggacctggtcttcatcctctttgctgctcctgggcttcatcctgggtctggtttgtggtaggtgctcagtaaatgttaaatagatgaatgaatgcttctgacaaagaggaaatctaatctagacccctgtgaagctgccggttgtccgattctgttgctctgcaggtgacttagttttatggaaatagttcttcccttctgagtccatgtttctttttttcttacctagggcagcttgtgcagctggaagagaaagggcagggttcagtgccctggtcagtatatggtgtctacatccaggctgctgggggccccttggcattcctggttattatggcccttttcatgctgaatgtaggcagcaccgccttcagcacctggtggttgagttactggatcaagcaaggaagcggggtaaggttactcataaatgggaaagttctgtgtctaagaatgtggccgtttctccctattccctggctattcttagggaaactgttctagttttcacttaaaagaagctgtaaagagagatttttccaggatgaaaagatgagtccctaatgtagcctcaccagaaggaaaaaaacgctgaccaacccacagggcagtagggcgtgcagtaggacacctgcaggctatctgttctcatccgttgtgtattagtccatttttgcactgctacagagaaatacccaagacggggtacttgacaaaggaaagagggttaattgactcacagttccacataactggggaggccccaggaaacttacaatcatggtggaaggcaaaggagaaggaggcaccttcttcacaaggtggcagaagagagacaagacagcgtgtgcgggaggacatgtcaaacacttttaaactgtcagatctcatgagaactcactgtcacgacaagaatagcatgggggaatccaccccacaatccggtcacctcccaccgggtcccttcctcaacacctgggaattacaattcaagatgagctttgggtggggacacaaagccaaaccatatgacattagaatagagagaaagagggctaggtgtggtggatcatgcctgtaatcccagcactttgagaggccaaggcaggtggatcacttggggctaggagttcaagaccagcatggccaacatggcaaaaccctgtctgtactaaaaatacaaaaattagctgggcatggtggtgcacacctgtaatcccacgtacttgggaggctgaggcatgagaatttcttgaactcaggaggcagagggtgcagtgagccatgattgcgccactgcactccagcctgggtgacagagtgagacactgtctcaaaaaaaaaaaaaaaaaaaagaggtggacaaagccatgaccaggtcccagggtgggtcattatcctgtaccctgccctgcccttgagctgagaatggcgctgagcaggggctcttggcagtcgttaggagtctggcctcatagaactttggcttcaaacagaacaccactgtgactcgagggaacgagacctcggtgagtgacagcatgaaggacaatcctcatatgcagtactatgccagcatctacgccctctccatggcagtcatgctgatcctgaaagccattcgaggagttgtctttgtcaaggtatgcattggtgggtggtctctgccctcctccctggtgacctgtggtcaggctttggtgtggcgtctctcagttcatgctgagtaggggagctcccttaaccaggatggccctggctgagatgactcatattccgttagcctccaccttttctcacttgccacctgtccctcctgacccctcacacctccccgctttgggagtggatgtgctgcggagcggttctctggaccagtaggaacagagccgtccctgggccctgaccactctgtgctctgctcctcagggcacgctgcgagcttcctcccggctgcatgacgagcttttccgaaggatccttcgaagccctatgaagttttttgacacgacccccacagggaggattctcaacaggttttccaaagacatggatgaaggtatttctcactgagcctttttttaatactctggagctcactgtgcttccagccttctagatgattctccaaatgtgcagatctgtctgtctgtagatcctgagagcacagtgactgctggtgttttcaccaggaacattgcaactgcattttctgtcttgtttgacctgaaaataaattcaatgaattgagttagcagaaaggctttgaacagaggcatctgagattctgaaacacacacagattttaaagcaatgcattggtttctggatgcctacaacctggcaggttttctggctgttgtatgggctgtgcctgcaccagaactgaaatactgtacccccacagttcagagtaacagtaaagcccctgacattgacagggggcttcctgtgtagcaagcagcatgctcagtgttttatgcatgttaccttaatccccgcagcaggcctgtcaggcgggtgttgtttcactccttgaataatgagaaagctgctatctggaaaggtcaaggaactggcccaagatctacagctattgagtgacaaagctgcaaattgaacccagatctttttgaccccaaagctaatgtttttaattgctgcactgtagctgccttcatggaaggggtttgtttcaggcattgataggccattgtaaacccatggccagaggtaacaagaaatcagaactatccctgatactcgaactgatacataacatgttcccatttctgctaaacacacacgcatgtgctcacacatgaatggaaaaaagaaaaaaagtaaataatagcaacatgtctgggatttgcatgaaaatactttaaccagaagaaaaaaggcggtggggtggggagacagccaaaaagagatgaaagttgataactgttgaagggtctgtgctcttcctttaatttttatgtatgtttaaaaattttgcaagacaaaaaatgtcttaaatgttaacagcagttcattggtattggtaagaatatagtttttgttttcttcttcacatatttattttccaaacattttaaaataagcataagttactttgtaaagggggaaaatgtttaaagcagtggggcaggaagggaaccaagaaaagggagtggagtaagaggattttcttgagacgaaaaaaaaaaatcagagcatccaggtttctaaatttttctttgatcagactgtttaaagacaacatcacaaacttcagatagagagtttgtggaacccctttttgtttttttcaattttcagttccatttttccaaaccatctgacacttgctcctttatttgtttccacagttgacgtgcggctgccgttccaggccgagatgttcatccagaacgttatcctggtgttcttctgtgtgggaatgatcgcaggagtcttcccgtggttccttgtggcagtggggccccttgtcatcctcttttcagtcctgcacattgtctccaggtaaataggaagcgttcatgtctgctggggccacggagaagcctcagttgctgggtaggtgctgtgacacggagctcattctctctccagggtcctgattcgggagctgaagcgtctggacaatatcacgcagtcacctttcctctcccacatcacgtccagcatacagggccttgccaccatccacgcctacaataaagggcaggagtttctgcacaggtttgtcctgatgggggctagaggcctcaaaggggagtcagcatcccagcgtttgatacttgtccgggaggctcttcaaggccagagatggggattataaacctcattaccaagggtattcatgatttaatggaataatctctgattaaaatccaattgcttggcgggactcctttctgagcaagtgagaaaacagaaatacagatttgggccgcatgcggcatcacgtgcctatagtcacagctactcaggaggctgaggctggaggatggcttgagcccaggtgttcaagtccagcctgggcaatatagtggaccccatctcaaaacaaaatacaaggaacaaaccccacagattaggagtctattggccttggccctgaaaagctatatttcatagagttttgctttttcttttaagtagtaaaaggtagtcatgacatttgagtagattttatttaagcatcgagtattgtttatttgtgaaacttatgtgcattgtcattgtggagctttgtattaataagagattggaactaaaatgttcttcaatataggacaggttgaataagctatggtatatccatagagtactatgtggcccttaaaaagaatgagggagctctataggtactgatagggaatgatctccagcatatattagtgaaacagcagagtacagatgtgtgtattaatatattgtatgctacctttgagtatgtgtttttatgtataacatttagaatatcaggctgggtacagtggctcccgcctgtaatgccagcactttgggaggctgaggtgggcggatcgcctgaggtcaggagttcgagaccagcctggccaacatggtggaaccttgtctctactaaaattacaaaaaaattaaccaggcgtggtggcaggcacctgtaatccagctactcaggaggctgaggcaggagaatcacttgaacccaggagacaaaggtttcagtgaggccagaccatgccattgcactccagcttgggcgacaagagcgagactccatctcaaaaaaaataaaaataaaaatttagaatatctctgaaaggattaaaaaaaaaacctgttagttgccactggaagggagaactgggtagctggaagatgggaatgagacagacttgacctttcatggtaaacctttggtaacttttaaattttctattctgtgtatatgttgcctattgcaaaagttgggtaattatttttagagagaaaatttagaatagaaagtttagaaaaaattattttcaaaatgttaaatgactcagaaaaataattcctaaactttaagcagaaaagaaagtgaaatgtactaaatacgtacatgtgtatatacctacacacagtaaatgtcagtgcattgaaaaaaactgctgggaggaaatgcagcggaatatcaactctggttttaacagggtgatgagattactggaattttacattttcctatttctattgcattttctaaattttctctaaagattacatattttattggaaagaggaaaagtgatttttcaaagcaaagcacatctgcgcagcaaaacttcctgctctggagttctagtcgtacatggtgcactgagccttcagaggggtctggtctgctctctgggacccctactgatggccgtgccatgctccttcagtagcagcagtaaacattgcctgagtcccttttgctgtggtttagcttgcttctcctggtgcttggctccatagctggggaacaagtgccattctgcatggtggcggcatgtgcacacacttatggtgttcccatattcactctgagtttctttttcctcgccttgaaccatttctgctgttggcgtttgtaacctttccttctttcagaaaatgccttctgacctaagatatttttctaaagtttaacacaagcctctttattcagtctcttttcccatgtttactctgtgctgagatagatgttttccataacatctttaataggatttttttttgtttttaaagagtaactaagattagaaaaacttaatgtcctcctatgcatgcggcctagaatacctccagaattcctagaataccctcctggagtttccagggcattctctcagttagaaacaggaagtatttaaatacgtgccctccatcatctgattcgctgaagctttgtccatgcgcggggttgtgtagtactttctttgcccattaagtgttgtctttctcacagataccaggagctgctggatgacaaccaagctcctttttttttgtttacgtgtgcgatgcggtggctggctgtgcggctggacctcatcagcatcgccctcatcaccaccacggggctgatgatcgttcttatgcacgggcagattcccccagcctatgcgggtctcgccatctcttatgctgtccaggtcagtctctgggataggagcgtcatctttgcttgtttgagcccttcctctgctgacgtaaaagagggatgattgtggggggctccaccctgagccattatttcacctctggacccctagaattgctcatggtctgatttgaccgtaacaatctggatttgactggggcaggtagggataggagagaggtaagtgtggaatccaggaataaaggaatcgaactctgttgcatgtgtgtgagaagtagatgctgttttcttcaaaaagaaatatgatcttgaaaatagtttcttaattgtgggtttctgtgttcaccaccatttcatctctggcctctttctagtcttctaagaaatgttatagactcaatatgcttcttacgtgcattttcttctcagggccctgattttcccaatactgttatatacataaaaccttctagcccctaggggtgattgagggtcttcaaatagctcagagaatagttgagaacttgagcactgactagatattttaagatgttgagtgattattattaccctctaaaataatggtattggaattatgtttttaaggagtctatattttagagaggtacaagctgaaatatttggatgagataagctctctgcgatttgcttccaaataatatggggggtgggggtaggaatggaagggaatacagatgaaacaatattgactgtaagttgatcatttttatggtagagttttggtacctgggagttcattatactactctttctactcttgtgtgtttgacatttttctttattgaaaagataaaaataaatagtcaaaggaaccccagagatatgtgtcttcacagataccccgagatgtccagccacattttgcaatttacttgacaactggttggggaagacaatgcattatatagactgtttttagactccgcagtctatggagcacaggggctccagactcactcatttcccagcattatgtatctgatttgactttcctggaaacattcttactagttgctcataggttgatatctccatttgttgtgactcccacaaacaggctcagatacaagtaggaagtccagaagtgaatcagttgcagatatgtgttattggaaatgtaaagatgaatagaaaggctttgggtacaaggaagtggttccagcagtgccatgatactgcccgcattcactgagcattgcagttgatggggtaacaggtatgccttaaaagccaagagaatgactaggtccctaagaccagctgctgcatgtgctcagttcttagtagtcctctagatgaaggaagttctccagcattggcctggcgtgtattgataatgaattatctctttgattgttgttttccattatcagttaacggggctgttccagtttacggtcagactggcatctgagacagaagctcgattcacctcggtggagaggatcaatcactacattaaggtcagactgctgtaggccttttaccgtgatctgactcctcttggagtcggtttaccctttgctgcctcagctgggtgtacaaggaggaggcttgtgttctctgcctatctaatcccacagaatctccagcaatctctcaaccgtgcttggaatgggaaagagattaccgtaagagtttctaagtatatttgtaaattatgtcgagctgagaacttcattggctaatttccagaatgttcagaaccttgtcagttcagcttaactgactaatggagcattttccttacactgtttaaaaccatgtattgttttaattcttactatgtccaattgttcttaatcagggatggccatcaggaccccctgctgagcttttggcaggacaaacgtggcctcatctctggattctgttgcagtggattggggtgggacccaggcttctatagtttgaaaagctccatagcgaattctaaactgctctcccaacttacaaacgagtaaatttaattgataccagagtatccagctcttcccacctttccccaggaaccccttccgtcttgccgtgggtggcaggcatcttgctgctgtcctaactggcactcttaaacaatttcctacagggatgtcttaatccatttcacactgctgtaaagaactacctgagattgggtaatttatgaagaaagaggtttaagtcactcacagttccgaaggcttaacaggacgcatggctgggaggcctcaggaaacttacaatcatagcgaaaggtgaaggggaaacaagcacatcttcccatggcagagcaggagagagagagaagggggaagtgccacacactttcaaacaaccagatctcctgagaactcactgtcacgggaacagcaagggggaagtccacccccctgattcagtcatctgccaccaggcctctcccctcacacatggggattattatacaattcgagatgagatttgggtgggaacacagagccaaaccacatcaaggggtgtccaatcatttggcttcccagggccacattggaagaagaattgtctcaggccacacataaaataatactaacgatagctgatgagcttaaaaaaaaagatggcaaaaaaaagtctcataatatgttaagaaagttgacgaatttgtgttgggccacattcaaagctgtcctgggctgcatgtggctcaagggccacagattggacaaatttgcttataaagaagcagcatcatgagtagttagattctcaaattgaactcaattcttaagagttatctattttattgaactgctgtgagactttacaagcatctgtgtcattgtttatatgtgaagagtatattctgagttcccaacacttgactttgaaacatagttttgaaaagttagctttttttctttttttccttttttaatttattttttatttttttattttttttgagagagggtcttattgtcacccaggcttgagtgcagtggcatgaatacggctcagtccagcctcgatctcccaggctcaagtgatcctcccacctcagccccgccaagtaactgggactacaggcatgcgccactaggcccagctcatttttgtattttttgtagagataggtttcgccatgttgtcccggctggtctcaaactcctgggctcaagcgatctgcctctgcctccacctcccaaaatgctgggattatagacaggagccatagtgtccggcctgaaaaattactctttcaattgggaactgagtgtacgtaaactggattctctaatagagatgtgcttcactgattgttttgacagtgagcctcattagtggtagaatatttcttaagcttacaaatgaataactttcttattctcagaaaggatggcaggtggctgcccagtgtatctagtaatagctcttctttcatgtttagaagttagcctctttgcacactgtcctggtgtgtagatgacccgtgtgtgtacatatgtgcagtgtttgagttaatgttatggttggcgagagccttgtgctggagaggttaggattacggtcagtggtggtacaaagtggaccctgctgaaaccggtcacatttcagaggcctgccctcccactgactgtcccaacacagagtccttccagcttggagttttagactttaggcttaaccccccagagtgctacagtctttggcccttacttccccccataaggctatatactccatggccaattgccagagagttttaaaagatcatgagatatgattgttgatgataaaaattacccaagcagttatatcacagcattttgagctggaatagattctcaagatcatctaatccagtccccacaatttgcagataagaaactaagatgcagaagaagtggtgatctgtccaggtcacacagtggcaaaattagaattagagtctgtgtctcctggattgaccaagacatgccagaatgccaggatccaatcagatgttcagtaaatattagttttcttcctttggatttaagccaatgattatcaaatggtagaatcctatctcaaagaatttcagtaaaaactgctgtggtggaggggtggaaggcctcatgtctgcccgtgttggttttcctttggcccccaaggcagctttgtggaatagttccttgagacaaaaggtagtctgaacaccacttccctccccaggctgctgctagtagccatgacacttagccattgtgctctgtctctgtcgagtttagtgatgataagcatttacttccaagggattctttcctagcaaggtgacagggtggcagctacctctgtgtggctactatggttgtcctggttttatttctctgtgacaaagcctgcagctccccaagaatctgtggtcagtctgaactggccacccttgtctccccagactctgtccttggaagcacctgccagaattaagaacaaggctccctcccctgactggccccaggagggagaggtgacctttgagaacgcagagatgaggtaccgagaaaacctccctctcgtcctaaagaaagtatccttcacgatcaaacctaaagagaagattggcattgtggggcggacaggatcaggtaaggatgtgcaaagccttctttgaatccattggaacgtagcagtttatgaaatatcactttcacccctttaaaccggatccttgtttgtttgatgagcaattagtgtctcagccccctactgaaaccaattttctaggtttattgttgaccccactttgatgacattgagtgcttttcacagtcataaatgtgcacattctcaatgcagaacactggggcacacagccaagtacgaaagaggagcagcacccacaactctgctacccagagagaagcactggtaacattttggtagctatcttgttaggcttcctctagtaatatgtaggtttacaaaaatgaggtcattgacacatgctgtttcatggccttcttttaaaactatcagtaggctgggcgcagtggctcatgcctgtaatcccagcactttgggagggcgaggcgggtggatcacctgaggagttcaacaccagccagaacaacatggtgaaaccccgtctctactaaaagtccaaaattagccaggtgtggtggcacatgcttgtaatcccagctacttgggaggctgaggcaggagaatggcgtgaacctgggaggcggaggttgcagtgagccaagatcacgccactacactccaacctgggtgacagagcgagactccgtctcaaaaaaaaaagaaaagaaatgcgtaactgtagatcctttagatttctagggtcaggacttgagtaatttacttctttttttttttgagacaaagtctcactctgttgccaggctggagtgcagtagcacgatctcagctcactgtaacctccacctcccaggttcaagcgattctcctgcctcagcctctcacgtagctgggactacaggggcgccagctaatttttttgtatttttagtagagacagggtttcaccatgttggccaggacggtctcgatttcctgacctcatgatccacccgcctcagcctctgaaagtgctgggattacaggtgtgagccatcgcacccggccccttttttctcactttcgttcctgaattgcattccaaagactgaacttgtcttcttttactgtcctttttatccttgtataagaggtatctttgattcagttttcattagttttctaggctccatgcttctttggcatcaaaactcttctagcttttttccttgccattaaaaaaaaaaaaaccttttgtcttttctggccaattgattttaaagaactttctaaggaagaaaaggaaaaagccatttcctgctttctgtttgagggaattacttcacgtcaaaacaagacattgctccaggtctttcatgctggaagggaatctttagccaagcagggtgactctccccaagcctttttactgttctctcccttgagcccatctgctgcattcgtccccaggggtacactgctcccctgaaagctgactgatgtcctttgttatgatttccctttaacacaggtgagataggccaaaacaagcaccacaacttcattaaacagtagttagtgacagaagagaaacaagaaaaagaacatagtggccaggtgcagtggctcacgcctgtaatcccagcactctgggaggcccaggctggtggatcacctgacgtcaggagttcaagaccagcctggccaacatggtgaaacctcatctctactaaaaatacagaaagttagctgggcgtggtggtggatgcctgtaattccagctactcgggaggctgaagcaggagaatctcttgaacccaggaggcggaggttgcagtgagctgagattgcgctattgccctccagcctgagcaacaagagcgaaactccatctcaaataataataataataataataataacctgatttacactccggttctaatagggcttcttccaagtttcacgggtaacttggaaactctcctgtggtcatgtcagtcaaggacaccatcttgaggacttcactgcctttcttaccagcacattccatcagtgcaaaggtagtcagattcagaggactctaaagtcttccagtccaggtggtccaaacctaggcaccttttgttaaactggaacaacttgacccattgtttcgggcaccattccttccttagcttagatcttaaagccctgcctcggcccagagggaatgtctcctcccctcctatctgggaaaggggccagtaactgagtcccccaaccctgaacagagtcattcattttttttttttttttttttttttttcctgagacagagtctcagtctgttgcccaggctagagtgcagtggtgcaatctcggctctggagtagctgggattacaggcacatgccaccatgcccagctaatttttttttttttttgtattttttagtagagacagggttttgccatgtttgccaggctggtctcaaactcctggcctcaagtaatccacccaccttggcctcccaaagtgctgggattacaggtgtgaaccgctgcgcccaccggcctggagtcactcatttctaggaggagaactatcctgctagacggaccaggtttcctaactcgtttctggtagaaggatgtgaggattgttgcattaggaagatgggtcctaatacagctttttccaagtttcctgggcgttacttcttccaagtcttatgggtgtttttcaggttcccattaggctgttagacagaggtatgcccagggggtagatcccgacagtggggtcgtggctgtagacactggggcaaggcaggctgtttgcgccctccatgagtgctgaagagacagcatcgtggtgatctcgatgaggccctcacaagaggtctttcatgacatggtggcacgagaaaggtaggagggtcaagaaccaggcgtacagccaaggaaaagtgattcaacagctaaaaccctgtagttctaaatctaaaccatggaaccaagttgcagaaaggtagacaggactatggcaaacttcttttctttttggctctgtagagagagcaccttttaaatgtttatatcctttgacacagtaatttcagttctaagattctttcccaaggaaattgtctgaggtggcagtaaagtttcagcactaagataataggacataacattattataagttttacataaactaaatgttgacccttagagggctggctgaacaagaatacatgcacatgatggaatgcaaccactaaaattttatcttgaaaatttttttaaaagatggttgactgagtgttatacaatgcttttgttttgttttgtttgaaacagagtctcgttctgtcgcccaggctggagtgcaatgatacgatcttggctcactgcaacctccgcctcccaggttcaagtgattctcctgccttagcttcccaagtacctgggattacaggcactcgccatcttgcccagctaatttttgtatttatagtagagacagggtttcaccatgttggccaggttggtctcgaactcctgacctcaggtgatctgcccgcctcagcctcccaaagtgctgggattacaggcatgagccaccgtgcccggccaatgcagtgttaagtgaaaaaagcaattacaatattgcatttctgatatgatctcaactctgaggaaagaccgaaaggaagtgtgcctaaaatgatagaagtgagattatgggagattgatgatgtcatctcgtattacttatgtaaacttttcaaatgaagatttggttaacctgttctgctgattactgtaataacactgatcccccaaacctgcttctctgccatagtttcctatcacagtagggccattgacagctactcattgagtcgaggcaaaacctccttcccgtatgtgtttatttatccctggaacttcttcaattccccagctgctgctgtggcaacaggaggccttgtcttagtctctctctcagccctaataagggggtagggagaaaaaagacatcttgtcctctggtttgcccctcaactgcttgctgtaagatctctgttctcctaactttgcctaagaagcattcagctctgtgcacctgttcctaaggtgaccaggaggcatttttccattttactctcatgaaaatggaatggtcagccaggcgcggtggctcacgcctgtaatcccagcattttgggaggccaaggtgggcggatcacgagatcaggagtttgagaccaacctggccaatatggtgaaaccccatctctactaaaaatacaaaaattatctgggcatggtgacgcgtgcctgtagttccagctacttgagaggctgaggcagaagaatcacttgaacccaggaggcagaggttgcagtgagccgagatcgcaccaccgcactccagcctgggcagcagagtgagactccgtctcaaaaaaaaaaatgaaaatggaatggtcccttcccttccttctcaggctgaagctgtgtaatttgaaggtgtctgcctggtatctcaggaaagttaattgcatttttctatcattttatacattatctcagttaatcagttgaaataacaactgaatagaaatggaaaaatagttggcattgccctgaggctaaaccagcattgtcctcacagactttgctaacagctcctctcttgcatgtcttctgactcatcagggaagtcctcgctggggatggccctcttccgtctggtggagttatctggaggctgcatcaagattgatggagtgagaatcagtgatattggccttgccgacctccgaagcaaactctctatcattcctcaagagccggtgctgttcagtggcactgtcaggtgaggacctgagcacctgcatgtctcgtgcgtcacttagaggccagatgagcatgtgggaccacatgatgctagcaccgccccctgggaccatgagctcaccatctctagtctggtgcttttcccactgcaccatgtgcttgctggtgcagaagggagaggcagcaccactcacaatgccacttggttgactgaagggtgcagggaggcctgcaacacagtgctgaagaggccagagaggtctgggcccagggctctgctccgtgacttcggacaagttatttaaccactcctgtgcctgtttcctcaaccataagatggggatgctttaaagacctgttgctgtgaaggttgaataagttcatgtaaattatataagcacagggcctggcaaatggtaagcattcagcaaatggtggctgctgtcatcagcctcattgacatcatcctcatctgccccccactccattctgtcatctctcctaggtgcgctgaaagttgcagtttttttgttctgtttgtttgagatggagtctcactctgtcacccaggctgaagtgcagtggcacgatcttgactcacggcaacctccgcctcctgggttcaagtgattctcctgccacagcctcccgaatagctgggattacaggcgccctcccccaggcccagctaatttttgtatttttagtagagatgaggtttcaccatgttggccaggctggccttgaacgcctgacctcaagtgatccacccgcctcggcctcccaaagtgctgggattacaggcgcgagccactgcacctggccaaaagttccagttccaatggtggctttcaggcattattactactcatgttatttcattttctactatcttcccctacctttgatactctggaattatgtcactttttgaaatctgccaggttgccagagataaaatccttcttcttggcctattaaaacagtccaaggagaaagcatcacattatctttcctaagcttacctgatcctacccttagccttaagcttcagcctcctgaaaacagtggatttccatcatttgtgtccctgtctattaaaaaatcattctggcctggcacggtggctcacgcctgtaatcccaacactttgggaggccaatgcgggcggatcacgaggtcaggagattgagatcatcctggctaacacggtgaaaccccgtctctactaaaaaatacaaaaaattagccgggcgtggtggtgggcgcctgtagtcccagctacttgggaggctgaggcaggagaatggtgtgaacccgggaggcagagcttgcagtgagctgagatcatgccactgcactgtagccagggtgacagagtgagactccatctcaaaaaaaaaaaaatcattctaaaagtaatttttagcagttttcagaaaaattggtaccaacctaatttcaaataatcataggcagtgttcagacttgttttaaaactatcccctccacctttggaaatggcattttgaactcaaggaactttggtagatatcttagtctgctcaggctgctgtatataccaacataccatagactgggtggcttaaacaacagaaatttatttctctcagttctggaggctgggaaggccggggatgggtgtctgctgagggccgtcttcctggtttgcagatggttgtcttgttctgtcctcatgtggcctttcctcggtgtgtgcctgtggtgcatgcctgtggtgtgtgcccgcggaaaggagagctcttgtgtctcctcttcttgaggccccaccctcatgatctcatctaaacctaatctcctccttacagccccacctccaaacaccatcacattggggtcagtgtttcaacagtttaattctaggggcacacaaacctgtagtccatagcagtaaatcagcagaattctcacctgtgtttgtgtagtgtcaacaccctagagtatgtttattttggtgtttctgtaattgaatctggacagcatgcactgtatctgtggttgataataaaccattctctttgggtattgaggtaataaggtcagacaagcaatatcagaagaaaattagaatttattggtcaggcgtggtggctcacgcctgtaatgccagcactttgggagggctaggtgggcggatcacctgaggtcaggagttcgagaccagcctggccaacatggcgaaaccctgtctctactaaattagccaggtgtggtggcccatgcttgtggtcccagctactccagagctccagaggctgaggcaagagaatcacttgaacctgggaggcggaggtggcagtgagctgagatcgtcccactgcactccagcctaggtgacagagcgagactctgtctcaaaagaaaattagaatttattgaagatgaaagcctaaaaataggccgagtgcggtggctcacacctgtaatcccagcactttgggaggctgaggcgggcggatcacgaggtcaggagtaccagaccagcctggccaatatgctgaaaccccgtctctactaaaaaatacaaaaattagccagtcttggtggcacacacctgtagtcccagctacacgggaggctgaggcaggagaattgctggaacctgggaggtggaggttacagtgtgccgagatcatgccactgcactccagcctggacgacagagcgagactccatctcaaaaaaagaagccattgcttggccaggcgtggtggctcatgcctgtaatcccagcactttgggaggccgaggagggcggatcacctgaggtcaggagtttgagaccagcctggctcttcccataaatctccctatttttagatgccacaggaacaccttgaaaaaaaaaattggccttacaatatttggctttggccataagaactagttttttaaatcatcatttggaagagaattaagaaataaagcacgttaaacttgagatttcttttgaaactgctgccaccaagaagcctcagttttaatttaacaattttatagcatttcatttgggtttgtgaaatgggggcttctagagttagtggttaacaactgaccatgaggccaggtgcggtggcttatgcctataatcccagcactttgggaggccgagacggaaggatcacttgagctcaggagttcgagaccaccctgggcaacatcgtgagacgtcgtctctgcttttttaaattatataaaatgttaaaagaaaaagaattgaccatgggcgcgtgcagctggtgtgggtagaacatcgtgcgcctgtagctttagtagaattggaaccatttgtctccagagaaagaaatgttgactgctttgtggctagctcagtagttggtacactgctgtcctgggtttgtagctactgagcttaggtgcagcttaggaagtcagctgtgcaaagtgagaaaatcatttcagttaaatttttgccagctctaattttggctttttagtctgtagtagacactgaggaagaattaaatgctggacttgtcttttatcccctaaggtttccttttatcctctcaggtttgttacggatcccagagaatgttcagctcttggtattcttttgtttttgagacagagtctcgctctgttgcccaggctggagtttcagctcactgcaacctctgcctcctgggttcaagtgatttgcgtgcctcagcctcctgagtcgctgggaccacaggcatgggccaccatgcccagctaatttttgtatttttagtagagacggggtttcaccatgttggccaggctggtctcgaactcctgacctcaggtgatctgcccacctcagcctcccaaagtgctgggattacaggtgtgagccaccgcgcccagccagtattcttttgctttagttagaagatagaaagcctatgatgagtttcccaaggcacaggcaggataaataagctgtttcctcagctgcctcctagagactctgaatctggaaaccgcgcctccaccaccattagccagtattgagggtgggtacctcttcttgagatacctgtaaacaattaaaacttgaaaggaattcttagaggaaaagcaaggtaaaaccaaaatcaaaccaacaaaactcagaaagtcacaagataaaaattgttgagttgttctgtgtacaaatataatctaatctaaatcataggccagataatttgggaccacaccccttccttagattagccagaatgtcattctagtacctgcatcctggccctcctttatctgcctgtgtgggcttgagctctccagcctgtgtttctgcagctccctattgttttgccctcatgattgcctccaagaagagaggccccttttcatccaggccttaaaacacttttgctggcctctgtctcatggccctagctttccccaccttctcccagagctccctgtgcttcctggacccaggaaacccagccctggcctctgtcctatcccccgcagctggagtgtttttcatcctgaggactgtctggagcctggctaggctgacagtgagctgtccccagctgtcactctggtatgtctcttgagtcttcgtcccctgtgagtgatgggtaccttgtctacccggagcacttctgcctggtgcccattcattagcaagaaacagtgttctcatttcttcttcttcaggtgccttctccttttgatctgctcattaaatttttttttttttttttttttttgagacagtctcgctttgtcacctgggttggagtgcagtgacatgatctctgctcactgcagcctccacctcccaggttcaagcagttctcctgcctcagcttccccagtagctgggattacaggcacctactaccacacctggctaatttctgtatttttagtagagatggggtttcacatagttggccaggctggtggtcttgaactcctgacctcaggtgatctgcccacctcggccttccaaagtgctgggattacagccatgagccaccattccccacctgtcataaccatcttaattgtatttaacaaatgctcaaaacttcataagacagacaccattgttatgcatattttattttaccaaatagtgaggtttcactatattgcccaggctagtcttaaactcctgagctcaagagattctcccacctctgcctcccaaagtgctgggattataggcatgagatgccgcccttggccattattcctgttttatatagatgatgaaactgaaatccagagagtgagagtaatttgcccaaagacacacagctaaaagtggcagagctaggatttgaacccaggctggccggctggctctactcattacactcactgcattgcctcctgaagcgtgtgtcacgaccccactgttaaccacgaccttgatattccatctctccaaaaaacagttagacgtgcctctttgtggatcttgacctttagttacatttcttttcccagcatcttcaaagtctcatctgccttcctcatctcaaaaacgaaaaaagaaagtcacacaatctatgccgttctctctagtatttttcatttgctctactttttcctcttaacttttttcacctaatctgactcttaacaactaaaagccaaaatcagtccgtatttctgcatacctcagaataagatttccttttgcttcctgatagaagaaggtatgtgagtcccaaaatctcctgctctgaaaaccaaggctactatgaagcacccagcacagatgacagggcagcatggtttactgcagtgttttctactataccgagggtgaattgctgtgttgtctcacactttgggagatattcttggcttcatttagcagtggtcaatgttgactattgctaaaaataaaatatgaagaaccaaagatgaaaatgtacctttggcaagatcaggactccaggggttctgattgttaaaaataattgccctcatgttcagacacttttctatccaatcacttaactgaatccttttgattaagtggatgcataactttgctttcatttctgtctgtgggtcagacccaggaccatctggcttctctaatgaggggagatatttttccattcctgattgagctccctgttgaggttggtctggtctgccttactgtgtaccacctacgagtgtatgcaaatattcattttctatctggaacccattgtttagtggtctgaggctccttcagctggtgtgatggacctgggtgaattgaatgttaagcctgggctgggcacagtggctcacgcctgtaatcccaacactttgggaagccaaggcggatggatcacctgagacctggagttcaagaccagcctggccaacatggcaaaaccctatctctaccaaaaaatacaaaagttagccaggtgtggtggcgcacacctgtagtcccagctacttgggaggctgaggcatgagaattgcttgaacctggcggggcagggcaggggttgcagtgagctgagatcatgccactgcactccagcctgggtgacagagcaagattctgtctcaaaaaaaaaaaaaaaaaaaagttaagcctgttgtcgtatttgcccatagaaaatctgatagggccggctactcagtgggcaggagaccgcgcttttgtgtacagcagttctcgcttctccatggtttcactttctgcagtttcagttacccatgatcaaccagggtccaaaaatattacatactatattttgcaagagacagaccacagtcaaataatgttcattacagcatattgttataattgcttgatttcattattgttaatctcttactgtgcctaatttataaattaaactttatcataggtatgtatatataggggaaaaaaacatagcatttatacggttcagtactatttgtggtttgaggcatccaccggggctccctggagcatatccttgtggatgaaagggggctccatgcctgctctttgatccagaggcatctgatggacttacttgctgtatgtgtttcctggggctgtcataaacagtttaagccacaaactggatggcttcaaacaacagaaatgtactatctcacagttccgggggctggaagtctaaaatcaaagtgtcatttgggccatgctgccactgaaccctatagggaaggacgcttccttgcctcttccagcttctggtagttgtggccatctttggcattccttggctttggatgcatccctctggcctctgcctccattgtcacatgatgccctcccagtgtttctctgccttcacgtggccatctctcataaggaccagtcatatgggattaagggcccacccttctctattactctggtatgacctcatcttaactaattacatctgcaaattaccctatttccaaataaggtcacattcttaggtacttaggtgtcttttggggagacacaggtcaacccattaaactgtaccatattaaacaacacttcctgggccaagggtagtgagaagcgagcatgttccaagcgggaaaaacgccgtgcaaagggcaagaggcgctggagagcaaggcgggtcagaatctcccaggagatcgagagatgcccagatagcaggaatgaggcggtgccggcctgctgtcctctcactagagttctgtgataatgacgtgattgtatttgcatgcctgtaattagtaaccccagatatggagacaggtgtgtggcatagagtaaaagtccatgtttctcccagagagtttcctgtttcccacatgccaggcataattttatgagcaaagcaaatatacttttcagattactagacctccaaatgttatgtgtagatcaagacaagccgtccaaaattactgtaacatcccagttttccaccaaatacctgttccaccaccaattctccaccctcatcctcagtggcaaagataattttctcctgtcctaaacatttctagtcctggccgggcacagtggctcatgcctgtaatcccagcattttgggaggcccaggtaggctcatcacttgagcttgagcactggaatttgagaccagcctgggcaacatggcaaaaccccatctctacaaaaaacacaaaaattacgtggcatgcgcctgtaaaaaaaaaaatttctagtctcgttcttttggtatcaactctgatttccttgaggtagatactgttggcacagtaagcaaaaatggtccccaaactggtcttctgtgccaggaaaattcctttttcttgacttgtcctttattctttctctccttcttcctcttcccttctactggatcagtttctttccctggtcaggccagctgtcctggagccccatactcaattacagggttgtgaaccaggtaaaccaagagaaagagggtgcatttctaagtttgtacgtatggagagatttattttttattttattttattttatttattgagatggagtctcactctgtcgcccaggctagagtgcagtggtgtgatctcagctcactgcaaccactgcctcctgggttcaagcaattctcctgcctcagctttctgagtagctgggattacaggtgcccaccaccacacctggctaatttttgtatttttagtagagacagggattcaccatgttggccaggctggtcctgaactcctgacctcaagtaatccacccgcctcggcctcccaaagtgctgggattacaaacatgagccattgcacccagccgaaagatgtattttaacaaatacacgcacaggaaaaaatctagaaggatatttgccgatatttgcatttataaattgttctataactagtattatttacatagtaaaaatagtaaaagaataaatcaagttttatggagctgaggaggtggcccagtgtgctgtcagagctcccatctgtctggttgtggaatgagccgtctgtgaccatcagggtttggagtcttctctccctatgcatgtgtgttaaacatcttccacagacagcctttgccaatgggtcgcttagggtgggaccactgagaaattcctgtgtttctccctagatcaaatttggaccccttcaaccagtacactgaagaccagatttgggatgccctggagaggacacacatgaaagaatgtgtaagtgaagagcttaggggaagccgtgctgagatggtgagggtggaagcacagcagtgcccttgccacaccccgtctgctctggccgtgcctccaggatgcctgtggacaaaggcttcgtggcagggctctccaagtctttcagatacctgggaaaagctgatccctctcaaccccaccgcccacactgcctacggtcatattggccttgcactatccattgattgaagatagtaatgacaactacttagaattaagtgatgcttttaatttattagtcataacagtgtaacatactttgaagcgtccacatatacgcaaaagatatataacgtggccgggcgcagtggctctcgcctgtaatcccagcactttgggaggccgaggcaggtggatcacctgaggtcaggagttcgagaccagcctgaccaatatgatgaaaccctgtccctactaaaaatacaaaaattagccgggtgtggtggcatgcacctgtaatcccagctactcaggaggctgagacaggagaatcgcttgagcccaggagacagaggttgcagtgagcgagagcgcaccactgcactccagcctgggcaacaagagcaaaactctgtctcaaaaaaaaaaaaaaaaagatacataacatattgagtctgcagaaagcacacagtgtgcatatggaccatggaccacagacattttgggacaactcagtaggccctcacaggccctcacgagcagctgcagtctacaggttgataccactggcctagggtgaggcttctgttatgcctgggttgagtcaggatccaggatcccctgccctaattcaactattagtagatgagttctgttttttcctctgctctatcgggattcttctcatttgaagaataagttctgcagcttacaaaaaatgtttcacaggcacgggcctacggctttggacttcagaaggagagtacttttccttactatactatttcctattgcaagaccatattttcagaaccaaaacttaaggcccactatgtgactggattttggggacatgaaagcgttgggatttctgggatgttttaatggtataaagctaacagaatagtctattggaatcagggactgccttggaagtgggtcctagcacgcatgatcagtacacctgcaccttcattccagatgagacaggttcttggctaatagttctttcatcgctttcagaatcatttctttctgtccttggattttcaggaaattcagcttagtttcttacccctctgatctctagtttctttctccctagattgctcagctacctctgaaacttgaatctgaagtgatggagaatggggataacttctcagtgggggaacggcagctcttgtgcatagctagagccctgctccgccactgtaaggtaaggcagtttggggttggcagcagcagagaatgggaatgttttagtgcagccttgccctgacacactggggtccaaaggtattcctggctctgatccctgttggcactttctaagagcatgaccagagataactctaaccctgacacaatttgggtatattggttctggggagggagaacagggttgctttgtttttaccttcatccaagaccaacttttgtttctggccattgagtagttgtacgactgcaaaccatagacatagaagattttttttttttttgagacggagtcttgctctgtctccaggctggagtgtagtggccaaatctcggctcactgcaacctccacctcccaggttcaagtgattctcctgcctcagcctcccgagtagctgggattacaggcgtgcgccaccatgcccagctaatttttgcatttttagtagagatggggtttcaccatgttggccaggatagtctcgatctcttgacctcgtgatctgcccgctttggcctcccaaagtgctgggattacaggcgtgagccaccgtgtctggccgacatagattttaaaattgcaagagactttaaggtcatccaatccagccccttcattttataaacaggaaaagaatgtccttttgtccagtatgttaccagccatattggattcaagggaaaaaaagaattaattgtacatgctcactgtcacagagcatgtaggggcaagtatttgattaaatccgtggttttgttttgttttgttttgtttttgagacagagtctcactctgccacccaggctggagtgcagtggtgtgatctcggctcactgcaacctccacctcctggattcgcgcgattctcttgcctccgcctcccgagtagctgggactacaggtgcgcgtcaccacgcccggctaatttttgtatttttagtagagacaggttttcaccatattggccaggatggtctcgatctcttgacctcgtgatccgcctgcctcggcctctcaaagtgctgggattacaggcatgagccactgcgctcagcctagatcagtattttacaaatatgctgttttggaaatcaaggcaaacatggttttgaaattgtatcacttctaagcaaaaggatgtttttacatatatgcgtgctttcttagaaaaaaaaaaaaaaaacaataggctgggcacggtggctcaagcctgtaatcccagcactttgggaggccgaggcaggtggatcgcaaggtcaggaggtcgagaccatcctggctaacatggtgaaaccccgtctctactaaaaatacaaaaaattagctgggcgtggtggcgggcgcctgtagtcccagctactcaggcggctgaggcaggagaatggcgtgaacccgggaggcggagcttgcagtgagccgagattgcgccactgcactccagcctgggcgacagagcaagactccgtctcaaaaaaaaaaaaaaaagaaagaaaagaaaacaatagatagtgtaaaacttaaatgaaatacattttagtaaaatctagattaaccagaatgctaaaggaatttaatcgagtttctttctcctctgcttctctggcagattctgattttagatgaagccacagctgccatggacacagagacagacttattgattcaagagaccatccgagaagcatttgcagactgtaccatgctgaccattgcccatcgcctgcacacggttctaggctccgataggattatggtgctggcccagggacaggtaccgagtccttcaggaactttggcttggcatgtctgggaggaaactggcccctggcagggatggactgattgccatctttgtagggttctgggcattcagataagcacttgcagcagcgctatttacttgctattgggagggatacagcctccgaatcacaagattactcaggcacctctgatggggttctcattttactttactaatttgtccttttgttgcttgtgagtagcgacactgacttaagtcagagagtacatgtacttagtgattcattcacatacacaatgatcacccctggcatacttaggccagagagtatagatacttgtgattcattcacatacacaattatcatccctggtacatgtacttagtgattcattcacatacacaatgattaccgctcccggaggcctactgagaccagccagcacatgtttgcttttttgcaatcacgcagcggcaccaaacttcttaccctgttgtttcaggcgttcccacagcctggccctagccttgccttcttcattttccactcttcctttgcaggtgcggttggctatagacatcttgcattctccaagctttttatctgtctttagtcagatagttccatctacctaaaaggccctttgcccttctctctcccatatccacctgctctcaacctgcctgtccctgaagaatgacatggcccagatgccaaagcctccatgaaaccccctggctgcctcagccgccctagactgtatctgtacctctcttgtagctcttctgtctcagttgataggaattgtgcaatgccctgtctccctagagaactccctgaacgctctctgagggcagagtcaccgctcattcatctttagggccccagcagtgcttagtactacagttctttatacaggtgatgttaagtacatttatgttagacaaatacctcttttgcatgcccctaggatacaagtaaattaataatttggaggaaatagcaagccatttataatgggtaacatgtcttctattgtagaagctcccacagtgacagctactataatagctacttctactgaatgtttactgtgtgtcaggcactgtgcttagtgctttacatataatctctcaacataccatcagtcatcacaacaacctagagaaagacatagcctggattctgctttacacatgaggagacaaagtctcagggaaagtccataggaagtggagtaggccgggcacggtggctcatgcctgtaatcccagcagtttgggaggccgaggcgggcagattgcctgagctcaggcgttcaagagcagcctgggcaacatgacgaaacgccgtctctaccaaaaatacaaaaaattagccaggagtggtggcacacacctgtaatcccagctactaaggaatttgaggtggaaggatcatttaaccctgggaggcagcggaggttgcagtgagctgagatagcgccactgcactccagcctgggtgacagagtgagacctcatgtcaaaaaaaaaaaaaaaaaaaaaaagcaaacagtaaaaattggtgggatttaaaaaaaaaggaagcggaggagatgggacaggactcaggccagcaaccgcactgccagcacactgtctaaattgtggagaaatattgagaaaaggttaaatagcgcaggttcagcctgggcttcaaagctgaattgagagaacttgggggctaaggatttttctcctcatcttgaaattattttcacactagtgttttttgtgactatctttgtttgccttaaactaagtgttgactgagattctgtcatacataagatacgttgagctactactttgtaagtaggtgttaaaatagagcctagtaaggtataatagatgggaccaagaacatcttctgggaaattctttttttctttttttgagccagagtctcgctctgtcgcccaggctggagtacagtggtgcaatcttggctcactgcaaccttcgcctccggggttcaagcgattctcctgcctcagtctcctgagcagctgggagtacaggcatgtgccaccatgcctggctaatttttgtatttttagtagacacagggtttcaccatgttggccaggctggtctcgaacttctgacctcagataatccgcccacctcagcctcccaaagtgctgggattacaggcacaagctactgtgcccagctggaaattttttcttaagaacacaaattgagacccctttctttcgatgggtggcttgatgttttggagtggggagcccattcactctttatgagggactctatccttctcttcccttaatttttttcttgctaattaaaatttccttgtaatttcaggaaagcctaaaaaaaaaaaaccacacacacaccagaaaagcataaaggcaaaaacaggatgataagccatttacccccagagacgagcattgtaatacactgacttaccccagctgtgtttttcttgcatctgcacacacagactccaacagatgggatgctctctgccgcagacacaaaataccagactaaaaggggtttggaggatgggattttgttatcccacatgggttggtttttgtgcagctcagcagtgtggggctctgtatcactctcagccagtactcaccttcccctgctggtacaggatgcctgctcaagcacccaaccaaaggaaggacacgtgtccaaaggaaggacacgcttatgttctccttgtggcctgtccactgagcaggacaccctctcctaaagcaccaaggagacttcctcttacatctccttaaacaaggttatgttccatgcctttgccctgtggcgggggcggctgagaaagttgagtacatgcatttcagcctctgccacaggaggtgggttctgccagcgtatcattcagggttctgctgccacatgattttccacggctacatagaagtccatcataggaatggccacctgactaagtcactccctgacttcctttttctcccctgacaactagacattctgagctcttccatttccctctataaggttagatcagcttgcataacaaaatggcatttgtctggtgtgcccttgacttgagctgcaacttctctcccctgcagtttatttattttattttgtttatttatttatttatttttttgagacggagtttcgctcttgttgcccaggctgggagtgcaatagcacgatctctgctcaccacaacctccgcctcccgggttccagcgattctcctgcctcagactccccagtagctgggattacaggcatgcaccaccacacccagctaatttttgtattttcactagagacagggtttcaccatgttggtcaggctggtctcgaactcctgacctcaggtgatccgcctgcctcgacctcccaaagtgctgggattacaggcatcaaccaccgcacccagcctgttgttttttatttatttatttatttatttatttatttatttatttatttattattttgaggcagagtctcgttgtgtcgcccagcctggcatgcagtggtacaatctcagttcactgcaacctccacctcctgggttcaagcgattctcctgcctcagcctcccaagtcactgggattgtaggcacccgccaaccatgcccagctaatttttgtatatttagtagagacagggtttcaccatgttggccaggctggtcttgaactcctcacctcaggcagtctgcccacctcagcctcccaaagtgttgagattacaggcgtgagccaccagcctcctgcagtttatagacctggttggttggttccttcactcccaaggctgaaggaatttggatttatgtgaaggaggtctggaagtcgttttctttttttttttttgctatgatactactttattaggcaaaaccacatactacaaaaatgctggaagtcattttctctgtcctttcccttactccctggatagttgaaaataaaaaaataaggggggaggtgcacgcagggctagttgaattgtccccagattctaccctcagagggcactggcacttactgagccgtggatcctctgaatcaccctgcatgacccagagctgtgtcctgacggcgtctccttcttttgcaggtggtggagtttgacaccccatcggtccttctgtccaacgacagttcccgattctatgccatgtttgctgctgcagagaacaaggtcgctgtcaagggctgactcctccctgttgacgaagtctcttttctttagagcattgccattccctgcctggggcgggcccctcatcgcgtcctcctaccgaaaccttgcctttctcgattttatctttcgcacagcagttccggattggcttgtgtgtttcacttttagggagagtcatattttgattattgtatttattccatattcatgtaaacaaaatttagtttttgttcttaattgcactctaaaaggttcagggaaccgttattataattgtatcagaggcctataatgaagctttatacgtgtagctatatctatatataattctgtacatagcctatatttacagtgaaaatgtaagctgtttattttatattaaaataagcactgtgctaataacagtgcatattcctttctatcatttttgtacagtttgctgtactagagatctggttttgctattagactgtaggaagagtagcatttcattcttctctagctggtggtttcacggtgccaggttttctgggtgtccaaaggaagacgtgtggcaatagtgggccctccgacagccccctctgccgcctccccacggccgctccaggggtggctggagacgggtgggcggctggagaccatgcagagcgccgtgagttctcagggctcctgccttctgtcctggtgtcacttactgtttctgtcaggagagcagcggggcgaagcccaggccccttttcactccctccatcaagaatggggatcacagagacattcctccgagccggggagtttctttcctgccttcttctttttgctgttgtttctaaacaagaatcagtctatccacagagagtcccactgcctcaggttcctatggctggccactgcacagagctctccagctccaagacctgttggttccaagccctggagccaactgctgctttttgaggtggcactttttcatttgcctattcccacacctccacagttcagtggcagggctcaggatttcgtgggtctgttttcctttctcaccgcagtcgtcgcacagtctctctctctctctcccctcaaagtctgcaactttaagcagctcttgctaatcagtgtctcacactggcgtagaagtttttgtactgtaaagagacctacctcaggttgctggttgctgtgtggtttggtgtgttcccgcaaaccccctttgtgctgtggggctggtagctcaggtgggcgtggtcactgctgtcatcaattgaatggtcagcgttgcatgtcgtgaccaactagacattctgtcgccttagcatgtttgctgaacaccttgtggaagcaaaaatctgaaaatgtgaataaaattattttggattttgt

SEQ ID NO: 15298 - DNA, 97951 bp, Homo sapiens
atgctcgggagcgtggttgagcggctggcgcggttgtcctggagcaggggcgcaggtaggtgatggctgctgccgcacccctgccctccagctcggttgtcacggggatcacccctttgcatttcctcggggcgtggcgggatgtggccagggctgcgagcagttcgggggacactggagacttggggaacggcgtatggcctccccctggtctcctgccgccgcctcctaggcctgtgagcccggggtctggtgacggggtcgtgtgctggaagacaggcaggtaggatcgggatgagcgggcagggacgcgggctacgtccctggccgcggccgccagggggcgctgcgcccgcgggccgtgggtgtgggtcgcgctcgcctgggcaggccggagcgggctgtgggaacgccctagggcccgggcatcccaggcgaagcgggtctgagagaaacgcccacctgggaggctgtgcagcgggtggctcggggcaccctgctcaacccgcagcggagccgccagcgaccttcgaagtaagtcatccccttcgtttttgcaagcgggtaaatggaggtacgtgacataagcacgcgcagcaaagccgtggctgtgccgggaacgcagcccagatctctccacggtcatccagtgctcttttcgcttctgccacacagagccgcgggtggctttgtgtttatcacacaggggccatttggtttctgcacagacggagaggctggaggcaggtgggcacaggaacgacggggaaagtttcaggaggtcttggaggaggagatggctaggttttactgtggtccgcagcgtgtatgaaaggtgaggctgcttggagacgcaacaagtggattacagtgggtgtggtaaatacgtatccctttagcgtggtgtcttcctcgtgcagcttgagggcctggaggtgatggaaacctactcatgagtgttgggatgactgcagcttgcacacaccagtctggtaatcccgtgcaactctcctcctgccatgcagttgaatcagtatcattgtgcagggagagtgtctacacttttatcagtggaaagagaatcttggtaaaaaagggcagctgactaagtggcctcaaccctattgggcacttctttggggttctcccacgttgattattctgcttctacccttgtacatgtctggacaacaggtttgttttttacaaacaaaaatcccttctctttcttcctctcttgatagctgaggcaagtgagcatttaaaaaagatattccaacaactttaaaggaggacacgagaagatagggaaatataaatagtatcagtaaaatggctggcctggggatccatccttgcttgcttgcttgcttcagactggggctttgtttctttccaaacctgtcaggattcccagctcttcgccggcctccacgtggggtgccctcttttatgttccagatacacagacgatggtgtccttatgttcaaggccacagacagtaactttgtgcctactttgggcctgcctgctctcctgattgtgcctctttttccaggaaagtagagatgagtgtgttagagataatggaacactgttccccacacccttcatacatagaataacttagtcccttaggatagtttagcagtgtctaccacagcagtcactgtaggcacaaaacagtcattatttgtgtcataacagggaagtcgttttgtccctgcctctctctgctcctgtgctccactgattctacttcatcctttgaaataaaagtggttgaaagaatctttggttatcatgggtgcttagataattaagattatgttcgtgttcttcttgatgtggcatttcatattgtggatgagttccagtgacctcctctgtttcaaactgctcaccgccccaacccccaccttttaaaaaggtagtactaatcttttcctcttccagataatcagctaagctagggaacccttgaaggggaaggttagaatttcgtgattcccgtaagaaggttactctgatctacagctacagctcaacactggggacactggcagatgccaggtctgtttatagtttagccttaatgaggtctcaatgacgtgattgctgcactctggcttggtgagccgctgttctttatggtgtagtttgtcattggacaaggtgactttttttttttttttaaagataagtaacagctatatcaacttagggtacttgaaccagaattctgaaaggcaagaaatcaagctttctttggactggaaacctgtctttgcataggagatttagtcctttttattcagaggattagtaagtgttctctttttatctgacactttaaaaattgcattataatggttagaattttgtgctgcagaagtagtagttttaagtcacagcgatagccagggatttatggaatccagaaggcgacacggctacacgtctttaatttccgttggaggctagtatgaaaggtgttttctcagcttgtctctgggaggctgtgacccttcttagaggggggaaacattttggagaagtatgtatgtgttttttgtttttaagtgacctgagttgatacagcatattgattagacttagccaggcaagcagtggtttagaatagagtttcaggtaaaaactaggtaagacttagtaatacagggtggagaatttgtttttgttattgttttttactaacagctttgttgccataggatttatatgacatgaaattcactcttttaaagtataaattcagtgtgttttttttcaatgtattcactgcattgtgcaaccattaccactatctagttttagaacattttcagtacccagggaatttgtgtttgaagttaagttataacattgttttaactggataacttcatggagctttaaaataacaccagctaacccattagttaattataaaaaggcagagatggaatatatcattggtagaataagtgtttggtaagtttttatttagtaaaatttagtagaagaaatgatgtccactttaaaattgtggagtttttaatacttgggacaaactgaaattgtttctagaaagtctttaaaaaaaaaaccaacctttctattgtatacactggatttgagcttagttgaagagaatgggtgtctctttactagtgtgtttactgtttctaattttttttcccttagagttgggagaaggtaatttttcttgattctcttatactgaatctttttctttaaaaaaatgaaatcaaaatctttgaactttttttgaaaattaatttttgtagctataacagtagaaagctttagtacttttgccttttttttttttttcctatttttaaggcacttgagcttatggttaagtactgtttaggaaataatctatttcttgatgaatttttaatttcaggaattctgatgtgaaactaacagtctgtgagccctggaacctccactcagagaagatgaaggatatcgacataggaaaagagtatatcatccccagtcctgggtatagaagtgtgagggagagaaccagcacttctgggacgcacagagaccgtgaagattccaagttcaggagaactcgaccggtcagtttcctttcctaagagtctcttacctgcttgttgtactaaaacacatcttttttcgtataatgggtaatttagaaacttattttttggccgggcgcggtggctcacgcctataaacccagcactttgggaggctgaggcgggtggatcatctgaggtcaggagttcgagaccagcctgaccaacatggtgaaaacctgtctctactaaaagtacaaaaattagccaggcgtggtggcgggcgcctataatcccagatacttgcgaggctgaggcacgagaatcgcttgaacccaagaggcggaggttgcagtgagctgggatcatgccactgcactccagcctgggcgatagagcgagactcagtctcaaaaaaaaatgtgtttttctttattggctttaggttactgttaagaatttatggttattgataagtctctggtccatagtaagcactcaataagtggaagagaggctggctgtcaccctctcacccggtctgttctgagcattctcctctttttcacttttattctatgttggtgccttctgaaaaggctatacttaacagaagacaacttattgagggggagggggtcatggggtcaatgacagggaatataaagccaattaagcttcattcatgtacctaaacaaaattggtgttttcttctactttctgtcatgtgtgtttaaaatgtgaacctggccaggcacagtggctcatgcttgtaatcccagcactttgggaggttgaggtgggtgggtcacttgaggtcaggagtttgagaccagcctggccaacacggtgaaaccctgtctctgctaaaaatacaaaaattagtgaggtgtggtggtgggcacctgtactcccagctactcaggagggaggcaggagaattgcttgaatccaggaggcagaggttgcagtgagccaagatcacgccactgcactccagcctgggcaacagagtgagactccgtctccaaaaaaataaaaaataaaataaaatgtgaatcctttggagagactcagatttcagaacaattctagatagttgtgggattatcagtatgtttttcaagcgaattcataagttaagcagtctttagataataatctaatttcctccaagggaaataatgaagatgcgtttttacctcgagaaaatattctttttcctgaggaaaaaaagcattataccttttcttacaaaagtacctaataaggcagaatggactaggtttaggaagttgaggtttttgttggtgtatttgttatgtgaaaatttgagaaagataatggactttgcagctgacactggcctttccttagcctgatactacctttccctctttggttgtgttaaagccattgctttattaatgaacattttcttgctaatgagtcttttctgtaccctactgtgtattatagaatgcttttccattcaggtttaacttcagagaaacaggcttaatgtaatcagtgtcaaatgcttctcgtggtgccagttttataacttcctcatgtccttttgtctagaccttatgttgattaaacatctatccattacatctgagtgctagacacatttagtgtaacagttaagtctggaaaaagtcagaaggtaacattggggcagggccttaaagggtgattaggtggggaggctttttaggcggtacaagtacagacccaaaggtatggaaagagcgtgtgacatattgggactttggataagctacttacgtcatttgtatataaaatggggttgacagtagtacctgactcatgggatcactgaggagtaaatgagataatacatataaaatatttaaaatggtacctggcacatggccagtgctcaataaatgttagctcttagaactagttgttcagggcataggatgtgtaaagagattataggtcgggtgaaattctgcatgccatgctaagaaatatttcactgtgggcattagggaactattggaagttaatgagattaaaaaaaaaaacctttttattttgagctaactgtagatttacatgcaattataaaaaataatatagagatcctatatattcttcatccagtttcccccagtggtaacatcttgcataactatagtccagtatcacaacaggataatgattgacattgatacaatccattgactttaggatttcaccagttttatatgcactcatttgtgtgtgtgtgtgtgtgtgtgtgtgtgtgtgttgtgttctatgcattttttaaaggtgtaaatttgtgtgaccgcttccacagtcaggatgcaaaggttccatcacaaggatctctcgttacccttttatagccacagtcatgtcccctcaaccccagtctctggcaactgctaatcttttctccatttctgtaattttgtcattttaagaatgctatatacattgaatcatatagtatataacctttcgagattgcttttttcactcagctgaactcccttgatagccatctaattttgttgtgtgcatcaatagttctttcctttgtattgctgagtagcattccgtgttatagatgtaccatagcttctttaaccattcatttgttaaaggacatatgggtcatttccagttaatggcaattatacataaaggtgctctgaaccttcagttacaggattttgtgtgaacataagcttttatttctctggattaatgcccaggactgcgcttgctgggtcatatggtaagtgcatatttagtttgtaagaaactgcagtactctttcccagagtgtctgtgccattttacattcccaccagcaatgatccagtttttccacattgttgccagtactcaatgttataatgtttattttagccattcctatagatgtgcctggtatctgattgtggttttaatttgcagttccctaatggctacgatgtttgagagtagatttttatcttagattagtcttgaagcaatgcagaaaaaaacctgtacaggagaaagagaccaaatataaagagcattcaggaagcggctctgcctatccatgtcagagaggccagggttctgttgtaaagcacagaagtgaggatggaggaaaggcgtttctagaagatagggaggcattggggtgtctgggattgatggtaaggatttaaacctattcgtggacataagaaaaggagattggggagatattaagaatgagtttgggccgggcacggtggctcacgcccgtaatcctagcactttgggaggccgaggctggtggattgcctgagctcaggagtttgagaccagcctgggcaacacagtgaaaccccatctacttgggaggttgaggcaggagaatcgcttgaacctgagaggcggaagttgcagtgaaccaagatcgcgccattgcactccagcctgggcaacagagtgagactccatctccaaaaaaaaaaaaaaaagaagaagaatgattttgattttgaagatgttgaatttgaagtgcatatgggtaaaattatcagtaggtagagcatagacaagaagtagtgtaggaaaaaacatttagagcctttagtgtgtccacataggtgaagctgtgagagtgagcaggcttacccaaggatggcttgcagagcaggagaaggtggaggctgtggagctggtgtgtggtcctgtgaaatttctggggatagggtccccagcttgtgagagtagagttgacatcagggtttgcagtggcagcagcgagcttttcctctacgaagtggagaagaacagcaggtaggcaccgctgggctttgagtaccctaaaggatatggagtcagccaccactgtagcaggttttcaacatgccactgaagccttatctcagagaaatatgaaggctaataccacttttataaaatttcaggaatccacatgaattttatgaattttatttttattattctttcatgtttcctaaactttttttttttttttttttttttgagacgaagtctccttctgtcacccaggctggagtgcagtggtgcaatctcagctcactgcaacctccacctcccgggctcaagcaattctcctgcctcagcctcctaaacagcaggtgcctacctgctgttctctgttaccacattggccaggctggtcttgaactcctgagctcaagtgatccgcctgccttggcctcccaaagtactgggattacaggcgtcagccaccacatctggccatgaacttttattttttattaaattttttttgtttgtttttttgtagaggcactctcactgttggccaggctgttgttgaactcccagcttcaagcaagcctcccgcctcagcctcccaaagtgctgggattacaggcatgtggcaccacaccctgcccctaaactttgaaatttgagtactgttttcctgatttttactgtatccttgtaatctctgaacttttttaaaagatttcttttattctactctctttctgttacttagtctagacctagcaaaacaacaacaataagcccataggtttattcaagctatttttgtatatacattaaaatgaatgcatcgctactaagtatttttgtaagttcagacaccatctagaatctgcttgaccgttacctgtcaaaaaacaaaatttctcagatgtatttatctttaacttgtcttcatgttacaagtttgctgacagaagcaaccagcaagatgacaagaaattttgtggtctgagaaaattgtataaatggtataaaatggataatgtaagtagttgggaagcagaattcctgtataagcatatagtttttctttttttaaagtaagcagttaattgggcagagattgcaatttcatgtcacatcatcattaccatcatttttatatttgttagagaggaaatctgggacaggatctcccaggatgccaggtatgcctactatctgtcaaaaatttaaaacaaacaacaaaaaagcctctaagtaacaaaagataaggatacatctatggctcttatgtggaaagcaaggtttcattcagcactattagcctttaacacgtggaattaaccgagaagcaggagacctgtgctgctggtgcctcacgcctgtagtcccagcactgtgggaggccgagggaggaggctcgcttgagcctgggagtgcaagaccaacctgggcatcatggtgagacctgtctctacaaaaaaataaaaataaaaataaattagctgggcacaggggtttgtgcctgtagtcccagctacttgggaggctgaggtgggaggatcacttgagcccaggaggtccaggctacagtaagctgtgattgtgccactgcactccaccctgcgtgacagagcgagaccctgtctcaccaaaaaaaaataaagaaagaaagaaaagaaatggtgtcaaacagaagtcagaagcaaagcaccaaagaataagttctgactttgagcaggccagtgcttttcttcttcaaggtgtaagtgaagatgcagattacatggtttgcccatttctcagtattgtgaccaaatcattcttttggaatatgacttggaaaaattgctctattagtcacatcttcaaatatttataatttctcacgtatgcttagaaataattagggttgaaataaagcattcgcacatctacccactttcttcgggactgtaatgttaatgcttgtggccacacacaatttgaggcttagcaggcatcctttaatcctgaagtgttaataaagtggtggtttctgttgctgttagttctttgagcctgagtactaactttggctggcattaggctggcgttacttcagctaacatgaagttttatacctaggctgctcctaaacactgttcctttgcctgaggcatgattattcaggcatggttcctttttttaatcctatttatatatgcacatgtagatcatatgactccacgagccctgatttttttttaagatgcagtcagtgtttattcatttttttaaatttagcaaatatttgaacactcttcaagatgcatgcacagcactgaaccgagtggtctggtgcagataaagataaattggtgctgggcctgcttgtccaccaatagaagcttaaactcacaacacgtactctacatagatgactgtaatttagatgctgtgggaattagtaaaaggagaaagtgcttctctctcagggaactctttaggaggaggtatcatttggctggaaacttgaggaatggatagaatttggagaaatgaagaacttgccaggcaaaagaaagagttgtgggatagggatacctagtccttgttggtattgagcatcaaatgtgtgaagtcttagctatagtgcaatacctcagtgaatttcacattatgtgtggggtttttttgttttttgttttttgtttttgaggtagagtctcactctgtagcccaggctagagggcagtggtgcgatcttggctcactgcaacctccgcctcccaagttcaagcgattctcctctctcagtctcccaagtagctgggattacaggcacatgcaaccacacccagctaattgtttgtatttttagtagagatggggtttcaccatgttagccaggctggtcttgaactcctgacctcaggtgatccctccgcctcagcctctcaaagtgctgggattacaggtgtgagccactgcgcctgggcatgtgtgttcttgaataataagccaaggagtttggattttaattgctttaaattaatatttaagcaaaagcaagacaaagcttgtcagatgcttttatgagctttattttattgtggtggtggtttgttttcttagtgctctcaggcaaaggtaagggtgccttgtttttcattagcatgtctaatctgggaaagaaggaagaatggaaaaataagcagaagtgggccgggcgtggtggctcacgcctgtaatctcagcactttgggaggccgaggcgggcagatcacaaggtcaggagattgagaccatcctggctaacatggtgaaaccctgcctctactaaaaatacaaaaaattagctgggcatggtggcatgcacctgtagtcccagctactcgggagactgaggcaggagaatcgcttgaacccgggagccagagtttgcagtgagccgagatcgcaccactgcactccagcctggggaacagcaagactctgtctcaaaaaaaaaaaaaaaaaaaaaaaagcagaagtaaactaaagttcatgtaccattattactggcacatgaactttagttattttttccccttctctcaaaagtgtgtcattggtgggattttcttcctaccaaattagaatatcctgtgtctaggaaaggtaacaaagcaagtattcataaaatccagggctcttacttagtatttccttagttctgtggtaggctgaccctttaatcttggttggagttttcataattaatgctttgaaatattttggtgagctcaagttgtatcttagggatcaaagatgtgggtctaatctcttaccagaaatgattcgaagatgtattgttaggaaagaaatatgggctcattatagaaaatgtacaaagtgtgtaaagttgtagaaaaaaagtaaccacccttaattcctctacccagagacagccattgttttcataaaatagttttgtctagtacattgtacttttagagtttgctcctgaaagcttttctttacagactaaggacgtgtgaatttgtctatgcccttgtgttttccaagtcaagagtattacctgtgagtcggcttgctgttaggaaggagagcaggaggaaggagattagcattttgcagctctgcattatttttctcttgattgatactcggtgactcagcagattttctggacagggttaagataagtaagaatacctgcctttttttttttttttttttcttctctccctgtaggcatccataaagctttatgaggcacagtagtctcttaggcgctgctgggtgtgacaccgtatctggtctggtgccaggtgttggtctccaatagcagcccagagatctccggctgaggtaacaacagtgtgcgattggtgtggagcccaggtggctctcatgcttggtaactgcattgacagctcgctggggctcttgaggttgggctgctgccgggatcatcagctctcttatgccgtttgctgcaagactgccgcggctttcctaggaagtgctgcttaagggaaataaatatagcctgttggcatgagttaaaggaactttctgtcaaaggggaagaaaagtgttggaattagcttcctgttttttttttttttaagtacctaaatctttatttggttaagataacttggaagttacaaatggttaatgaaaactttttcaatgaaatattgtttccacagttaggtgggtttccgttaatgctttcttttttttagttattattatactttaagttctagggtacatgtacacaacgtgcaggtttgttacatatgtatacgtgtgccatggtggtgggctgcacccattaactcgtcatttacattaggtatatctcctaatgctatccctcccccctccctgttcatgctttttttaatgtcttaccgtttttccctctcttttagtcaaaaataaaaaggtcaacgcaaagaaacagggactccagaaggctttgcaatggttaaacctgtcattattaaactcacagactaatgtgaagttaatttggtgcactgaagtccactaatgagcagaattaaatttatccttttcctccctgccccccttttaaggagttagcctatttagataattagatgttatatatgttttaactatttaagattattttatgaattagctgttcaaagaatcaattgttactagatatcagatgagaacttccacttaccaaagcctgctcatggaggtagaaagcaagactgacatgtgtactttaaaagatggatggaacctcaaaggccgtcttgcccagtccccatttagcctcacctctctgtaggtgaggcccaggagagacacttactaggcagactatgctggggctgggtgagcttcccaaggatgttctttctggaattcggtggctcagaatacagcacttggctcctctttgaagcatgatggctctgttgcctgtctctggcccagtgtgctgggctgctgaaaagagcatggaaccacccaggagacgccacgacactgacagctgtacctgacctgagggttcaggatatgttttcaaaagcaaatctcgctaaaaaggatttgtatgttattatgaaatctatatttatgtggtggaaatagacacactcaggcttttagagataaactacacagaatgggttacaataaatgcttataattgtttggcttttttaagaatcctgttaacttgacaaccttctgtttacttttctttggtattatgcaggtatgatattgagcagtcacttagttttcttaaatgttgtgtctcacagtagaaaaatagccaaaccactcagcccctgacctttgtgtttgcttctcacggtgatcagcagttctggtctgctctgcagtatggtggtcacatgatggaacccagaaagccttgtactaagcatttaacacacattgtgttaggcactggaggaagtttcatttacaaattatattttggcctttttttttttttttttttttgagacggagtctctgtcacccaggctggagtgcagtggcatggtcttggctcactgcaacctctgccttctaggttcaagcaattctcctgccctcagtctcccaagtacctgggattacaggtgtgcaccaccatgcctggctaatttttgcatttttagtagagacaggatttcaccatgttggccaggctggtctcgagtcctgacctcaagtgatccacctgcctgggcctcccaaagtgctgggattataggtgtgagccactgtacctggcctttttttttttttttagctaaagcctgaaaatcttgttgaagggattttgtcaaatgcaaaagaccaatattcacaactctctaaatcagtggttttcaggccaggctgaatgttaaaatcacttgaagaatgttcaacaaataccagtgttggggtcctattccagaccaattaaatcagtctctgggatagaacccagacattggtattgttttaaaactcctctggtgattctagtaggtaggcagtgctgggaatctctagatctcatggaataaagtctgttctctcccctcactcaatggctccaagtgtttcctgtaaatcccgttttacccctgtgattcattttcagtttaatcctttgaaaccttaccatgctattaacaaagttaatcttagacccaacataacaggaactttgaataagttccttggaatttagcttatgaaacaactgaaagccctcaaattcctggtgattatggagtaatgctagattatcaactgcagacaaatacctgttttactgtggtggtggagatatgtttgtgaattgtattgctagctgatcatcggcttgagagtaacatagcacagctacagataagtgagctgatgctcaagttaattcttttctcagtgtagtatagctgttgagtgataggactgagtttagcagcttccctgacttggaataatagctctttcttttgtattctgcttcttccccatataggttgggttctagaattttgctgatcctcttgactgaaatggctactatttggaagttcttaagggaagagcttaagatggtcagggttgtgataacaacccactggggagtaaggatgtggtgggaattgcagaggaaacgtgcttggtaggtttctttaacttgttggagattaggaagggcgggaaggcctgaagtcagccggtcttgggaggacatcagtttttgatctttttaaatttaaaagtgaattttaattcacttttaaatttaatttctaatattctgagtcccttaagaagtatatctagtggcacaacagttccccttaaaagtttgtctttctagatgtttgtcataaaggctgcgtgggcctgggacatctgtagaaatggttttcttggccagaaggatgtatttgaagaggcgcccattgtcttgtttgtcttaaggtcttgtgaatgaggagaggagaggaagacagtgttgtgagatctgaggcctgttgattccgattgtgccccagataccgctttatttgaggggtgtgccagacaggagcaggcagcctttaacccccttggaaaccgaggtacctctctgttgccagttgacacctgcagtctctgccttcaggaacaacttggttgaatcctcagcccgaggcttattaggcaggctaccctgctgttgtccggcctccaggaagggattggattgttcagacggggaacgatttctggcccctggtatctgtcccagaggcctccgtgcaggggaaaagcccttggttgccctgtcagcaggcatttgctctggcagcctgttaaaatgagatgggacagctggagaagtggtggccatggggtgtgataggtgcgctgattatctgaggcctgaggatggcgttagcgcccgcagaagcgtcttttgcaagagcagatctgtctgcttatgaatcgaatgttacctgtttttcataccagaggtgtctatgaatgtgtgtttccctgatctttgtttgaaccttgacagaatctgaattgctttttgttattgttgtttttgtttttctcttttttttttttttgagacggagtctggctctgttgcccaggctggcgtgcagtggtgcgatcttggctcactgcaccctctgcctccttggttcaagcaattctcctgcctcagcctcctgagtagctgggatgacaggcatgcatcaccatacccggcttatttttgtatttttagtagagaccgggatttcaccatgttggccaggctggtctcgaactcccaaccttaggtgatcctcccaccttggcctcccaaaatgctgggattacaagcataagccaccccacccggcagaatctgaacttcattgtccctctttagcttccctgtgaccttactcctgccccattgccattaccttggtaggaaaaatgctgagtatcctagtcacatagtcatggggaagatataaatggcagtcatacttcctcgtttgatatttttctcagctcctggatctgccagtatttttccctttaagacaaagcagctgctgtgggtgcctttctgtgtggctgggtcgtctggccactgacagcctttcagtgtgctgtgctccttaagagaaatgggtcccctcatcttgtttcaggggaaactttaaaaagttacttgtaaaagggattgaaagcatcataacaaaaaacaaatggcctcataaaatacattcctctaggtcagcctatatcagtactaactgtgttagctcttcagctatctagggttaccttagtacgattgacattttgggccacataattctttgttgtgggggctatcctgtgcattgtaggatgttcagcagcatccctggactttacctgctagagctagtagcacccctcaaacatttccagatattgccacatgtcctctgggcaagcaaaacaccctcacttgtgaactcctgggctgcaccgtgcgacacagtactattgtggctattaagcatttgacctgtggccagtctgaactgagatgtgctgtaagcataaaatacctgatttcagagacttagtacgaaaaaagaaatacctcgtttgtaaaatacctaataatttttcacattgattatatgttaaaaaagataatactttgcattgggttaaatgaaatatattatttaaattaatttaccttttactttttatttttagagtcagagtctcactctgtcacccagactgtagtgcggtggcatgaccatggctcactgcagcgtcaaacacctgggctcctgtgatcctcctgcctcagcctcctgagtagctaggactacaatctcgtgccaccatgcctggctaacttttaaattttttatagtgatggggttttggagggttacacagactagtctcaaactcctggcctgaggccatcctcccacctcagcctcccaaagtgttgtgatgacaggcataagccactgtacactgcctactttttactttttaaatgtggctactagaaaaatttaaattacattatgtggcttacatttgcagcttgcattatatttctattggacagtgctgaactagagtgttgatctactgtaggttagccattgattttgtattaggcatttagatccctgtaagctgttgggtttaatgattttttcctttggaagattttcctttatgcagtaaaattatggagacacagagtatgtagtattacatattaccagtttgctctcctgaatccctgctggtagcatattaaaaatcagtttaatgttcagaccgtgtatgtttgtctatatttctctcctttccatattgcattttcttttccatattagattttatctcttttaaggcttatgtggttgtatcttaaatttaatttgtatttctcgattggtgacattgggtctgtgtgttctctcctgtatctagaacagtgcctggcacatagtaggccctcagtaaggactagttgaatgaatggatgaaaaaatactgtattttactttttcagtacaagtccactactcgaaatatattattatgttagctacttggttacttcttatttttatttatttatttatttatttagagacagggtctcactctgtcacccaggctggagtgcagtggcatgatcttggctcacttcagcccgatggtcctggctcaagcgatcctcccacctcagcttcctgagtagctggggctaacggtgtcccttttttgtatttttttgtacaggcggggtttcatcatgttgcccaggctggtctcaagctcctaggctcaagcgatctgcccgcttgagcctcccagagtgctgggattgtaggtgtgagccgccgcgcccagccacttggtcacttctttagctttatcttcccttctcttaatgctaatttccttacgcaaaaaagtttccttttcatgtttgaacctctcttccctttgatacatttctgcttgttgggtgtaaatggaggctgtcccccatcatagctggactaagtatgctatataatttatgtcatcatttttaatgtaatttttgggaggttaattccagatggattaatgtatgatatgaaacctggatatcaattaattcatctccaatctggttagttggtaggaaggtaggtagtaggtaggatgtgagtgactgtctctgtcacccaggctggggtgcagaggtgcaatcatggctcactgtaccctcgacttaccaggatcaagcgatcctcctgccttagcctctcaggtagctggaccacaggtgtgcaccaccatgcccggctagttttaaaaaatgctgtatatagatgggttctcactttgttgcccaggctggtcttgaactcctgggctcaagcgatcctcccactttggcctcccagtgctgagattacaggtgtgagccagtgcacctggcccaatctggtatttatttgtcccaacaatattcactgactcatgattccctaccttgttatattatttatgcttttgtatagtaagcccttatagcttgaatatattaagtcttttctcttggttcattgccatttttaatccattcaaccttagaatgttgataactcactttatggaatgttaactgtggtagaaaatatttatttttaccttcaaatagacatacttttttttttttcctggcatgcttggccatgtgagcttttttaggaagcctagagaggaagagaagttagacatccaagcatatagttagtttcaagtgggagacatctgtgcagttactggcaggttagtataaagatgctgttattttatgtttctttttttttttcttttttttttttgagacagagtctccctctgtcacacaggctgcggttcagtggcgcgatctcagctcactgcaacctgcacctcccaggttcaagcaattcttctgcctcaccctcccgagtagctgggactataggcatgtgccaccatgcccgcctaatttttgtatttttagtagagatgaggttgcaccatattggccaggctggtctcgaactcttgacctcaggtgatccacccgcctcagccttctaaaatgctgggattacaggcgtgagccactacgcctggccctgagtcattgtttatcttaatctggtattcaccctggggaagagagaagagccatttatgaggtacacctgggatcattttgtacagttatggtttatttgcttggttttgttttttgtttttttgttttttttgacaggcccatagcatagtgatcaagacccttagctcaaggctggattgaaatccctgctgtgacctaacatcggtgtgcctcagtttccttagctgtaaaacagggatactagtacctacctcaaagggttgttatgaggattaaattagttagtatctgtaaaccatttaaaacagtgtctggcacatagtacatgctatgttggtttgttataaatttgtataaattttcttaattacctttaagtgaaaagcttgcctttataaatgcatactagtcgtgagatttggctgtacacaaggaagattgctatagcttcctttatttcttgctaatgtcaagacaacctgaggtccacaaaatagaagtgaaagtactaaagttaatagcaattctcttttgcaataatactggagcacatatcctgtaataaagttaattggggcaaactgggtagaagtctaattgctaggagctacatttttttaatcctgtaaccccagggatagaatttatcctaaataatctagaaggagaaaaataaaactataattgtatattatactattaataataagcaaaagctgggtgtggagactcatacctgtaatcccagcactttccgaagccaagaatggaggattgattgcttgagcccaggagctcaagaccagccttggcaacatagtaagaacccgtctctacaaaaaataaaaaaattagccagacatggtggtagtgcatgcctgtagtcccagctactctggaggctgaggtgggagattgcttgagccagggaggtcaaagctgcagtgagctatgattgtgccactgcattccagcctgggtgacagagcaaaatcctgtctcagacaaaaataataataagcaaaacagctagagaatctaaacagaagtggaatgggtaagatcgcctcagtggtatatcatgtagcattaattgatgatatgtagaatgtaagggaaagaaggtattttgaaggtgttttcattgacgtttgaatactgggtgccaaactctctactatgccagaggccagggatataaacaagaggaagacagcttgccctctaggagctcttaccagaagcattgggctgtggtggtataggtacagggaagacataggaggaaggaagtaagttccccgaccttgaaagagtcagggaaaactaaaggaaagaagaaatcgttgagacagaccctaagatttattggctaagtaaattgggataatatagctaacatgtattgaatgtttattatatacccaatattttgctaagcacttttaattatcccattaattcctctcatccctatgtggtagatgcatgtatcattgtaaaaatgagtaaactgaaacttaaatctgtatctatcttctaaaattcatgtttgaaatcactgtatttactatggcttccagctgtgggaaaattctgcctgtggagatcttcatactttaaggccataagaaaaaatagttttgttggagtaagagaattattttctcttgtttttattttttatttatttatttttcatgttaacatttgaaagttcttgccaacagctgaatatctgttgcttattgttttgagagacctgtctctgaaggaggtaggtgcaaatatggagtaggacagtggttccttcaaaggagaagatcctgtatcatatcctgtatttccatcagatatttcattttcctgacttgggcaatgtgtaaagatatgacaacaagattgacaatttgggaaaacgtttaggaaagaataacagggacaggatgtgacttggaaagttcgttgcttagagtagcaaggtttgattctttttgatcaacaatatagacttttccatcctcttactgtgagaatttctactccatgctttgttacatgagaattctgagattagtgctatttcaaccacttttatgggggtttgttaggataaaattgcactgagtgcctgttctaaaaccaaaggcagcaggagagccctgagtctctgccatcagtagtgccactgcagtactcacgagaaacctggggaatgaagacttgcctggcagctttcatttgaatctttttaaaaagagcctttgattttgatgttttccaatataggaagtaacttactacctaggaggtggtgaaacatgacatagttatatatagtaaaaagaacaaaaaccatgcaatcagaggattttaaaaatattaagtccatttagttttctatgaataggttttagtgaaaactgtcactaggcattttagaaatgaagaaaatgaaatcagtgtgttatacacataggaactggcatttttttggttcccaccatctggaatagtcttacagatcggaggcactcggtaagttatttgtggaaagaatggatgaaagctgtgaagattctggtttcctattaatgctaatatgccatgctcatgtaaacatactgatggattgcttgccaagttttcctcttctgatgcttctcaaacatcaaagatgtttatagaacccttctggccggacacggtggcttacacctgtaatcccaacactttgggaggccgaggcaggcggatcatgaggtcaggagatcgagaccagcctggccaacacggtgaaaccccatctctactaaaaatacaaaaaattagccgggcgtggtggcgggtgcctgtaatcccagctactcgggaggctgaggcaggagaatggagtgaacccgggaggcggagcttgcagtgagcttaggtcgcaccactgcactccagcctgggcgacagagtgagactctgtcttaaaaaaaaacaacaacaagaaaaccccttctaactcttgaacttggttcacctggaaaagcaaaagaactagaatagctaaaacaattttgaaaaggaaggataaagttgaaggcatcacactatccaattttaagacttagtttgtagctacagtaatcaagtcagtagtatcaatgtaggggtagacaaatagatcaatgaaatagagtctagaaatagactcacacaggcatggccaacttttcgacataagtgcagcacacctcactggagaaatggtaatcttttcaacacatggtactggaacaaccggacatctgtaggcaaaaaagtgaacctttgccgaaaccttacactttatacaaaaattaactcaaaatgaaccatagatttaaatataaaatgtaaaactataaagcttttaagagagcacataggagaaaatcttcatgacctgggggttggaagaagagttcttaggcatgacactaaaagcacaattgtaaaagaaaaaaattggtaaattagacttcaaaattacaaacttttgctgcatgaatggccctaattaggaggatgaaacatggccataaaatgggagaaaatatttgcaaatcatatgacaaagaactttaatccagaatatataaggaacttgctaaactcaataataaaaaaaaaaattcacttagaaaataagctgtaatttcagcactttgggaggtcaaggtgggaggatcgcttgagcccaggagttcaagaccggcctgggcaacatagtgctgtctccacaaaataaaaataattagctgggtgtggtagcacgtgcccgtagtcccagctacttgggaggtgggaggatcacttgagcctgggagttcaaggctgcaatgagccgtgatcatgccattgcactcccagcctgggcaacagagcaagaccttgtcttaaaaaaaaaaaaaaaaaaacatagaaaatgggcaaaagacttgaacagatacttcagcaaaaagaatgtaggggtgacatataagtacacatagatgttaaacattattcgttcaccattagggtagtgcaaattaaaaccacaataagataccataccacacctattagaatggctaaaataaaatataatgccaatactggccaggtgcggtggctcacgcctgtaatcccagcactttgggagcccaaggcaggcggatcactaggttaggagttcgagaccagcctgaccaacatggtgaaaccccgtctctactaaaaatagaaaaattagccaggcgtggtggtgggcatctgtaatcccagcaactcaggaggctgaggcaggagaattgcttgaaccctggaggcggaggttgcagtgacccgagattgcaccactgcacaccagtctgggcgacagatcaagactccgtcttgggggtaaaaaaaaaaatgccaataccaagcactggtgaggatgtggggaaactagatttctcatccattgctagtgggaatgtaaaatggtactgtggtcaagtaatttcaatgacaactaatatttgaatcataaataatgtcaagctgctttatatacttcttgtgctatcaaaagttaaacaagaagtgagatctccacttgaagtcaggagtttgagactagcctgggcaaaatggcatctctactaaaaatacaaaaattagacgggttggtggtgggcatttgtaatcccagctacttgggaggctgaggcaagtgaattgctggaacccgggaagcggagattgcagtgagccaagattgcgccactgcactccatcctgggtgacagagcgagatgctgtctcaaaaaaaaaaaaaaaaaaaagtgagatctccattccagtacaaatttgtagtggatatatttttcaaactgaaattacagttctagtagtgatttttagacctcgatgatgtatgaggcaaatttccatatttcaagatccgtgtattttggaaatagtggcaatggttgtatagtattgtgaatataattaatgcctctgaattctatacacttaaaatggctaaaatggcaaattttatgttatatatattttgccacatagaaataatccatttaactgtggcatttagttgcttccacataactttccattgaaagtgattaatctgcagtggggtgcatgcatgtaatgatatgataaaggtaaatgtcaagagaggaatctaatagaattctataatgtcttccatgagataaaaggctcaattaaaaatgtgtattcctggatttagctcagtatttggaagttcctgtctttttttttttttttttttttgagacagggtcttgctctgtcacccaggctggagtgcagtggcacaatcttaactcattgcaatctctgcctccctggttcaagagatcctcctacctcagcctcctgagtatctgggactataggtgtgtgccaccacgccctgctaatttttgtatttttggtagagatggggattcaccatgttgaccaggctggtttcagactcctgacctaaggagtctgcctgcctttgcctcccaaagtgctgggcttacaggtgtgagccactgcgcccagcccggcagtaccttcacgaagacatttgcaaaagtggaattgtagactctcattgcaaatcagcattcatagatgaagatttgcaatcaattttgatgaaagggaaaactattttaaaccccagttaagtgaaatgttattcccccataaaagaatttcattcttctcatcagtagacctgcattacaaaaaattgtactcaattattataatctgaattgtgtcaacattttgtggagatttgttttctcttgtaataggagtacctacttaatatctttgattttgcctcttagcccacaaaactgaaaatatttacctctggccttttacagaaaatgtttgtcaacccctagcttaaagcattgatttttctctttttcttcttttatttttttattttttattttttttttgagacggagtctcgctctttcgctcaggccggagtgcagtggcgctatcttggctcactgcaagctccgcctcccaggttcacaccgttctcctgcttcagcctcccgagtagctgggactataggtgcctgccatggcgcccagctaattttttgtatttttttttagtagagacggggtttcaccgtgttagccaggatggtctcgatctcctgacctcgtgatccgcccaccttggcctcccaaagtgctaggattacaggcgtatatgctttgaaagcgatgaaaatctcaccttattctctgttttagctgcatcccagagatgttgatgtattgcagtttcatactgtttagcacagaatatgttctggtttccatttaatgccttctttttatttattaatttaaagagatagagtcttgttctgttgcccagtctggagtgtagtggtgagatcaaagttcactgcagcctcaaactcctgagctcaagcaatcctcccacctcagcctcctgagtagttgagattatataggtacaaattgtcatgcccgtttgatgttttctttcacttacattacttagaagtatattgcataatttctgaacattcagatattttaaaaatctttgttactgaactctaattaaatcctaaagtggtcagagtgcatgtatacatgatgtcagtcttgagatttgttgaggtttgctttatagcccaatgtatagtccattttggcaatgtatttgaagtgacatttttcagatcttttgtcatcttctgaagctttggatatccaaataaggctggtccctgtaacattctgtacctactctgtacagattcccagtttctactcacttaaagtaggtgtgcttgtatttttagtgtatctttctctctcaatccaggaggttttttccttccccttgtgattatatgcagctcataggtaagaaaaacctttgtaatgtacttaaatctcagcagtcctcagctcattatcaagtgccgtagtccctaaccactaaattaagtgttgaccttatacataaggacttcatttaagagcgagttcgttcttgttgttgactcctgtcatgttgtaccattattctcttgaaactggtctgacttgcctttgacaaaaggaaaggagtgtgctttgcagggctatgtgctttcctaataccagaagttatctaaagatacttaactgtgctgtgaactaaagctattgtgtttgatctgcccaggcatccagctgactcctgtatacaaaattctacccgttcagttctgttaatgtttaagttcccgctgttctttggtgggaaaggaggtgatgtataaaaatcaactgctttgtataaggcttggtgtgttaggtgctaaaccacttaactttttcttgatttggggatctattctccttgtttttttgtttgtttgtttgttttttgttttttttttccttcttttagagacagagtcttgctctgtcacccaggctggagtgcagtggtacgatcatagctcattgcagcctccaactcctgggctgaagtcatcctcctgcctccatctcccaagtagctggtactgcaggcacgcatcaccatgcctggctgattttttttttttactttttgtagagatggtgtgttgctgtgttgcccagggtggtcttgaactcctgagctcaaccgatccttccaaagtgtcaggattacaggcgcgagccaccatgcccagctgagatctgttttttactgtttcacaataattgctggaaatatttgtaataatgtgactttcactgctaagacagaaaaggaagataaggaaattgaggaaaatgaagcttctgcttctacaacaggaaagcataaacgtttgagttacttttagagtaaacgggggataagtgtgtctagattcttgacccaccctcttctgccacagtcagacttagaatgcacttttgcatgcacttttgttaatctaatgaacgaacatttatacactttctagttagtaaatacgtgtaactttatatttcagctcatgagatcctttgctgcgtgctgcagggaagtgtagagctcttcagctgtgcagccaggataagaactcacgttctgttctccctgctgctgctgtgacaggggaggcacgtgtacatccaggctctttctgtgtggcagggctgtttaattggggctgatggaaatttttgtcataggaaatgggcaatcagattttcagttagtagtgaaataattgactctcaatccatattgggaaacagaagataaaacatttggtaataaaaatgtaaattttagaacatagaacacaaagagtggtccataagctgggcgcggcagctcacacctataatcccaacactttgggaggctgaggtgggcggatcacgaggtcaagagatcaagaccatcctggccaacatggtgaaaccccgtgtctactaaaaatacaaaaattagctgggcatggtggtgcacgcctgtaacccccctactcggaggctgagacatgagaattgcttgaaccggggaggctgagattgcagtgatccaagatcatgccactgcactccggcctgggcaacagagcgagactccatctcaaaaataaaataaaataaaaacagggccgggcgcggtggctcatgcctgtaatcccagcactttgggaggccaaggcaggtggatcatgaggtcaggagttcgaaaccagcctgaccaacatggtgaaaccccacctctactaaaaatacaaaaattagccaggcatggtggcacatccctgtaatcccagctactcaggaggctgaggcaggagaattgcttgaacccgggaggtggaggttgcaatgagccgagattgcgccactgcactccagcctgggtgacagagggagactctatctcaaaaaaacccaaaaaaacaaagagcggaccctaatgtaacctatggacttcagttaataatgaatctgtattggctcatcaattgtaacaaaggtaccacactaatggaagatgttaataataggaaaaacagatgaggaggacgggagaggtacagaggtatatgggagcattctgtactatctgattagtttttctgtaaaacctaaagatgctaaaaaaaaaaaaaagaaaactgtttaaaatttttaaatatctagcttaatgttccccaatgggttcaaatcatacaaagttagtgtttaacctcctgacccttgcttggaatttctcagttaagatgagtccagtttgcagtttgagctgtttcatcagttccgtttgcctctcgcctgtgtattaactgtgctcttgcctttctccctatctgctggaacagttggaatgccaagatgccttggaaacagcagcccgagccgagggcctctctcttgatgcctccatgcattctcagctcagaatcctggatgaggagcatcccaagggaaagtaccatcatggcttgagtgctctgaagcccatccggactacttccaagtaagatgccgtgctgagtgatgacagtgaagcatcaaaggcctttttttttttttttttttttttttgagatggagtcttgctctgtcgccagtggcatgatctcggctcactgcaacctccgcctcctgggttcaagtgattctcctgcctctcagcctcctgagtagctgggactacaggcgtgcaccaccaccaagcccagctaatttttttgtatttttagtagagacggggttacaccatattggccaggatagtctcaatctcctgacctcatgatctgcccgcctcggcctcccaaagtgctgggattacaggtgtgagccaccgcgcccggcccatcaaagccgttttagaacattcaggctaagattagatcatctggggagactggtctttagctaagagctgtgttcactaaacagtgtccattaaacacgggctgccctctccgtgcgtgttgatagctttgtgatttcggttttctctccttagacaccagcacccagtggacaatgctgggcttttttcctgtatgactttttcgtggctttcttctctggcccgtgtggcccacaagaagggggagctctcaatggaagacgtgtggtctctgtccaagcacgagtcttctgacgtgaactgcagaaggtaggcgcctctggtccaccctcatctcccccatgccgggtgggcagggcctgagctaggagtgtgaagtccacagctctgtgtctttaaagagccgagctgtccagtggagggcgggcggcctggggatgactttctctttgctcttttgctttatctcctatttcacctttgatcctgttttaaccacgggctttctctctctctctcagccccgcttctcttcctgagtctgcagggagattatgttgctgccttgtgacagaatacatttttgtggtagctgattgtcatgattaaaatgtagtttacaactttacattttaccacaggaaccttcagaaagggttgggggcccctgaaaaagaaagttcttattcacaaattgcattcagggatcattttcctgggtggaaagaaaggcttttgctctcatcattttctgtatcctgggaggctccttatacagggtaaatgtgtagttccctaggaagggtattttttcccagaaggtgaagactatgtacataattttaaaggagagacttgtgtgagtggtggcaaaacctggagacaaaaagtggtggcaggcggggagctaggtgtgcctttcccccgaggagatgtgtaacgaggacgtgtgcccttgttaagactagagagactgtggcaagaagagctgaatgaagttgggccagacgctgcttccctgcgaagggttgtgtggatcttctgccgcaccaggctcatcctgtccatcgtgtgcctgatgatcacgcagctggctggcttcagtggaccagtaagttctaaccatcctttccgacagtctccaggggcccggccacggccagctctaacactcttattctgttgcagaggttgtgctcagctttgggctaggtagcagtcttagagatgccttcaggtctgttgaaaggggtcgatggattttggcaacagctggaaggatgaaagggcagtgttgccagagaagaaatggaactggcttgatttctgggtgggggtgaaatggaactgactccagttctgcacaggactgtgcttctcggttgtgtgttaacatgaactgacagtcggtgcaggcagatgtgtcttgcagtgctatgagtgggtgagagcacgttgtgtggcccgggctggtgagccagcaccgggaacataccaagtgcctggaggcagttatcacatgtttggcaggtctgtggcaaataagccctgagaaaactagaggactgtcgaggattttagagtctgacctggagtccgtttaagtttggcttatagtgtgactgtgtggcaagtgttggggtggcagccgtggttttccccagtctgtactgatgcagagtagacaagagagcctttgacgttcactctgtttcctgggcacctgtttcttacacctgctgtgctgccttacacttgagaccttgattaaatctattctctacacatttgccttgaggcatcggagcagtagtactgcttgtactgtgcgttttccatatgtgggtaagctggaggttcatggttttggtaagtatgtgcctaagatgcatggcaattaggtaaaactaatttgcagttttgtttttgtttttatttttttaacgtttgatgcctcttgttaaagttttgatctcttttctgaagcagagaacactacttttctggtattgggtttctatattattaataattgaccaactaacatactttatataaaagttttaagtaagaaggaccatgtaactgaaatgttgtgttatgtaatttaccaaaatggcaaacattttcatagagccagcttcccccaagaagagcttctgtcattgtttcactacagggctggtggctgctctgatctcatagaattcattcctctgggtagcaccatatgcaggctttgcgaataaagtgatcatgggctttcttgattccatttggccaatgcaagaacttcattggctcccctctaaaaaaaattccatggattgctgggatttttattttttattttttgaaaaaaatggtacctatccgtattcagcttggtggcttcacagtccctcccctgaacatccgtatattccttattctctcatttatggtgcagaacactggggtactaacctctaggaaactgttctagctgccagggaaagctaagagccctcctttaacaggaaagcagcagcatgctttttcttctctctgccgtttcagggaagagcaccttaaggccagtgttatttcatgggattctgccctagagctgagaaagtaatggactcatccataatctcttttatagatttgaaagtgtaaacaatacacacttccttttttggaactccaattctaatatgtttctttttcattggaaattgaaaaaccaggctggttttgagattagtactagcagtgagtaaacctcctgtctgtggacttaaatccttttgaggaacatttcgttttagatttttacaagttttctaatctggcacgactttcaaactagcttaatctgttcttacagaaacctgtgtaaggacagactgcccacatacgggctccccaaataaaatggcatttttatttcttgtccctgctcgggtttcaccgaaccttggtagccataatcagaacaaatgaaacacagtcaagttgttgtgttctgtttgtttttacctgccagccagctgatgctgacatttatacaccaagatgatccaaggttttggtgacgccggtggggactgccgctatatgtgcagggtgcccgggggtcatagtaatgttaatggagtaccagaatctctaacagtgtggtcctgtgtagccacattgctacacttacagagatgctttggggcctttttggattaagacagttctaaaagaccaggcctcacctatgatctgtgtataaagaattagcatcgcactgtagatctgcaagagaaggccgcctcctgcagtgctctctcttggtgaatgctaactctgctcgagggccttttggggaaaggacagtgtaaaacccttagagaggtaagtttcccacccttccaacctctctccacctgcagcttgcttggtgctgtcaggatctggatttggggggagtctctctgtagtggaaccagtgacagaagctgttctttagaattttcaggatggctgtattctgcggtcagaatgagagagtcaagctgggcagaatctctcgccaagagttcaggtaaggtaatgtttattcactgggaatgctttccacagccagacagctatgctaacagtctcaagttttcttccagtttgtttagatttaaatgatacatttgtaactttttaaaaactaaattttggttggatttttcatgaaaacctcttttttctttatcccctaaaaaatggtttgaaatgtcattgttatttaaaaacccgatgtgttggaacttctttaatctgctgtttcctctttttccccccctttgaaagtttcgcatagtgtaaacattcactatgtcttttaccttccctgctcctcccatctgggaggcgctgatgctattacccagtgctgaaaaatggcactctaaaggtatgggaaggaaggagcccaaggcaaccacctgctgtcctttcagccttcctttggagactgctccatcagtgccgaggtgtgtgggaacaggcttcactgcaccgccatcttactgagttgcttcacgtgaggaaaagggggctttggccctgtgactcagttccacattttggattgcatactggaaaagaagccaatcttcttgctagtaaaccagcaacccggctgtatacagtggtgacccaagcaatggatataaacctaaaaatctgagggaggggagaggtggaatacagtagttcttggaatctgaagtctcctatttgatcaggttatttcctgggacttggcaaaaatctgattggtggggatctcctaggacctagtggacatctggtattaatttaatctcaggaaaaacaagaaattaacccagagagagtctgggttttggaattcagcgtagctacctccagaccgtggtgtctggcctccatttttgtctgtcattcagctctgacttacagctgcagtcacctttgctataaggcacctgggtagaagggtggatgggcttcacatcaatttttttcttcctttagggtgggggattggtttggctttcttttgttgtggttttttgttttatttttgtcaagattgatttttagatgcaaggacttgaaaagacccagaaggatgccaccagtttttccttgaggcctaggattttttattctgtcccgagcagaggtaattcctcacaacttagtgcaccagtagcaccagccattttgagcagagtacctctttggggagcttttcgttttgttttgtttttaattctctttccttagcagcaaggtcttttttcctagagaatctactccgttgcagaatcattgcaacctcaggagccctcactgattgagtgctgtcagcctgatatactactttggactctggaaacagatatgggttctattctctatttctactgtgtgtcgttaaacaaccgtcggagaccagatgacctgttagatggctagtcctgtataactcgactctgtatgtttcaatgtatgttactgcaatgcttcacctgctgtacagtgtttgtgagatgctctttgaagatggtacttttatattttttcattttcaataaaagtacattccttcccacttcctggtatttaatactgttgctgaatgtgccttgtgtgagtgtgtgctccggcgttgcaggacctcagctggaggtggcactcggtggttcttgggggctggccgccttccctctgcaggtggtgttagacatatgctacctgaggtaacatgttttcatttttgggagggagtcgggagtggggcgggcccatgggagggtctctggatttttgatagcctgctttgtttgctctcttctgtactattaaactgctgatgtttattttcaggaatgttttgcaaatgcacttctcactcttccccagtacaactgtaggtacactgttcctttttatcaaataagcacgtttgaaacgatccaaaaaaaaggtcttaatttcatgtaaacaaatgtatccatgtgtggagatactggaataaggtcaaagctatacttttgaatgaccatgtgtttagagttaatttcagctcattgataggtttatgttacattagaaagagtaatggttttgatgatgtcctgtaaggaagaaagtttgcaattagacctagctcctgcagaatgccctgagtaagttactgcaggcagcttgtaataattgggtcttccaaagttttgctttgcttgcgcactggtccctgagtggagctgcctactctttctaacttaacataaaactatggcattgtgtgtgagtgccgtggagatgttgacagtggtgtgtgtctctccctgtaggccttcatggtgaaacacctcttggagtatacccaggcaacagagtctaacctgcagtacagcttgttgttagtgctgggcctcctcctgacggaaatcgtgcggtcttggtcgcttgcactgacttgggcattgaattaccgaaccggtgtccgcttgcggggggccatcctaaccatggcatttaagaagatccttaagttaaagaacattaaagagaaatccctgggtgaggtgagtgaggggtgtttgcttcacagcagagagcaacttcctagcttgaggttcattcctctagggccctgccttatcctttatcttcctcctgagacaaatgaaccgtgtccttgcagggtcccctcactactctttgtatcttatagctcatcaacatttgctccaacgatgggcagagaatgtttgaggcagcagccgttggcagcctgctggctggaggacccgttgttgccatcttaggcatgatttataatgtaattattctgggaccaacaggcttcctgggatcagctgtttttatcctcttttacccagcaatggtgagtaagcctcccagctgaatcctggcagcttctccttaggagatgagttacttccattgggttatagtaggcattgctgaggtctcacagctctgattggaaatttcctcaaagcaggttcaatctagagctcgatagtgcttgctctatagggacagaattttgacttgagaggaggtaaggtgtcacttgcatgaaagagagtctgaatgagaaggtcagctggtgaaccctgtcccacttgacataggagtgtttgagtcactgcgttggagttggtgctaagtgatagggccctcctgcctcccctttggaagcactcagtctctgtggtcactattgagaataaatactttcttgtcttcattgccttataaagagataagaattcagtaatgttttattacaattcaataggtcacttttattaaagacagtacgattacataacatttggcccatcctagcaagcaggattatatgctcattttattgagaatgaccttaagcagattaggtagttctcaagtttgaatgagctttaatttggcgtggcatcgcttttcctttcagatgtttgcatcacggctcacagcatatttcaggagaaaatgcgtggccgccacggatgaacgtgtccagaagatgaatgaagttcttacttacattaaatttatcaaaatgtatgcctgggtcaaagcattttctcagagtgttcaaagtgagtttaaagattttgtatgtgcatgtggtagaaggaccttggattctttgggtcttataattcacacactttgctttctgagcacattacgtactaggactagtgtctagtatcgtaggacataatatcatagaatctttgtgttcaaaagggatcttagaggtttgaacccataacctcatctcactgatgaggaaattgagacctgggaaaatgttgatttttcccagttaaaacacagctagttaggaataatccagtttcgaagccccctgtgtatattctcatcctgcccatgattttccagcctggtcatgaggctttcacagaagacaatatcaaattactactgagagcatcacctttgcccactctactctgtggtttcacgggaaatagtttgtggcccttgaggtaaactgggagtcaggatggctggatgctggtcctagctctgtcaaacgtgtaagtgcccacaaagctaggagaaatggcacagatggggcattcagaaagatctcaacacaaattgaaccagtgtgccttgaaacaggtgaaatttaagtagtagataattaaaaacaaacacatagatacttaatttaaataaaagagatgaggctgttggtggaccataacctcatcaggagctgagtccagtgctgtgaaacagtcaatgcattatagttggagtagaaatacagtgttcaggccaggcgccagtggctcacgcctgtaatcccagcagtttgggaggctgagttacgtggatcacctgagttcaggagttcaagaccagcctggccaatatagtgaaaccccgtctgtactaaaaatacaaaaataagctgggtgtggtggtgcatgcctgtaatcccagctattcgtgaggcagagacaggagaatcgcttgaacccaagaggcggaggttgcagtgagctgagatcacaccattacactccagcctgggtgtcgcagcgagactgtctcaaaaaaaaaaaaaaaaaacaaaacagtgttcagagcaaggcagctgttgttttcctttcattgagtaaccttcaggaacatgatgtccaattctggaatctacatttgatttatgagggctgttaagctaagaagcatccagaggagatgagcactcaagaggtgcccagcagtggacggggctgccttgttaagcagtgagtttgtttctactagagtggaacaaatggattctgaatggacatctgccagcaggttgatggcaggatggctgccactggtcccttctggctctctgattctgtagttttatgatcttttttctgaaatttccctcatccatcagcccctgactggttatctttacctgtatgtattaatttgaaaagagtgttcttactcattatagacatggccaaggtgtataatacatgttcaagtaaggagttcagtgtttttatgtgacttacaagctagctgtgaagatagttcccaatgccttaggcagtggtaatacctttaaggtcagtgtataccctcttagaagaattaagtatttgccaggtacagtggtacatgcctgtaatcccagcactttgggaggcctaggcgagtagatcacctaaggtcaggagttcaagagcagcctggccaaaatggcaaaaccccgtctctactaaaaatacaaaaattagctaggcgtggtggcacagcctgtaatcctagctactcaagaggccgaggcaggaggatcacttgaacccaggaggcagaggttgcagtgagctgagatcacaccactgcactccagcctcggcaacagagtgagactcccgtcttaaaaaaaaaaaaagtattggccgggcgaggtggctcatgcctttagtctccacgctttggaaggagagacaggatcactagagcccaggagttcaagaccagcctggacaacgtactgagacctcctctctacaaaaaataaaacataactgggcatggtagtgcacatctgtggtcccagctacttgggaggctaagatgggaggatcacttgagccatggaggttgaggctgcggtgagccgtgattgtgccactgcactccagcctgagcaacagagcgagacctcgtctgaaaaaaaagtatcttattgttctgcttcctgctccacggtcttcagtacactatggttgctttgctaatatgggggttgattttgcaaatatttaagaaaaatcattctgcctatagaaattgtatttcacctatcttcttccggttgtcattactgcatttttatatggaagcttctatcccactgccaacatacagcaggcactctgggaaatgttagttccctccccactgccccttttttttttttttttgagataaggcctggctttgtcacccagtctggaatacagcggtgcaatctcggtgcactgcaacttccacctcccaggttcaggcaattctccggcctcagcctcccaagtagctgggatcataggcgtgtactaccacacccggctaatttttgtatttttagcagggacggggttttgccgtgttggccaggctggtctcgaacacctgacctcaggtgattccccctgctttgggcctcccaaagtactgggattataggcatgagccaccgcacctggcctcttagtccctccctttttaattctccagtgccattgtgttgtctttcctattaattccttaggcaaaaagtcaacaacaaccaggtaagcaaacacaactgccaattatagatacaattaatgtgttcattccttctcaacctaagaaatttacaagaagaatcagaaaaaggtatcatagaagatgatgattgagttcatacatagtgactgctttctgttagattcattcctgtcacttgatccatttcaaacctcagccttttataccagctttagtggtagagttgatagtcataggtgttgaagggtggctggagacctacagagtcttgtttggaggtggaggaacaacatccctaggcttcttttaacttgctttgaaattggcttgctttttattcatagaaatccgcgaggaggagcgtcggatattggaaaaagctgggtacttccagagcatcactgtgggtgtggctcccattgtggtggtgattgccagcgtggtgaccttctctgttcatatgaccctgggcttcgatctgacagcagcacaggtcagggaaccctcagggatggggaacattttagaaataccacatttgctggaggctgaggcaggaaaatcacttgaacccaggtggtggaggttacagtgagccaagatcatgccattgcactccagcctgggggacagagcaagactccatctcaaaacaaaacaaacaaacaaacaaaaaaaaaataccacatatggagatgatgctgtggtcctctccttactggacctggaggttcccccaagaattagtaggtattttttcattcatgggattaagctgagaagcagaagagtggggagccagcccttatgcacaaatagtgtatgagttgtttttagtcaacataagtttgagtttaattctgaaattacagatcatcctgtggttcatatttactgacaattttaattgaaggtctcaaaaactctacttaaaaaaaaatgtggccaggcatggtggctcacgcctgtaatcccagcactttgggaggccgaggcgggcggatcacttgaggtcagaagtttgagaccagcctggccaacatggtgaaaccctgtctctactaaaaatacaaaaattagctgggcatagtggtgcatgcctgtaatcccagctactcgggaggctgaggcaggagaattgcttgaacctgggaggtggaagttgcagtgagccaagatcgtgtcactgcactccagcctgggcgacagagcgagactccgtctcaaaaaaaaaaaaatgtaattgacttgtaataacagctgaccgtgaagttgcagccttcctagcgcctgagaggaaattcatggtgtcaggttacttcagttgcatagcatcattaggcacagtttcttctcttctcctattttcaggctttcacagtggtgacagtcttcaattccatgacttttgctttgaaagtaacaccgttttcagtaaagtccctctcagaagcctcagtggctgttgacagatttaaggtaagtggctccttcccctgcccccgtgtcaggagccctccccacacaactaactgctggctctgttcaaggggccacccaggctggcctcactgggcttaagcttggctttggccttttggcaagttggtaagaaaaagggggcagtggaggagactgaattgagggatgagacttgtcaccttttttaattaatgtgaatttttaccttttgtgaacggccatgatctgggctcccaggattgcagagttcccctttagagctagccccttccacctgggcctgacatggatgtgtcgcaactcactgggccttgaagtggcttaaacctagaagaccagcactgtggggcatcttccccttgatctttgctactgtcactttgattgattgacatgctgaatcctttttgatactttctttttcctgccctgtggtgctactcacgatgcagggaaagcagttacatggaaatagtcataaaactaggtcatgttgagaagtgcagttaagtaagtctcagcttcttttcttgcaggtggttagttgatcataccttggctgtgttctttgttccttcagaatactacacatacatgatacaaaagggagtatatttgggagggtggagagaaatagatatttgatagtggttaatacttaacaaaaaaagggatgccatgtgggctggaattccttgatgttgccactgcatagattagctcctatgtccctgcttgtctttattggccagtgagaggaataagaaagcaattttggtgatgtgaaggcttgaagctcacatgtttgagggatgaatataatcatcttggaggttcaggagaaaacaaattggattttcttcttaagaaacatggaaactcagttcccgagatttgtttgtattctacttgtttacagttgaccgggtgacttttatttggtcaagaaagctagtcctggctgggtgtggtggctcacacctgtaatcccagctctttgggaggctgaggcaggtggctcacttgagcccaggagttcaagaccagcctgggcaacacagcaagaccccgtctctacaaaaaaataaaaaaatagccaggtgcagtggtgtgcgcccacagtcctagctacccggggggctgaggtgggaagattgcttgagcccaggaggtcgagcctgcagtgagttatgatcatggcactgcactccagcctgggcaacagaatgagactcttatctgtgtttttgtttttttttgttgttgtttgtttgtttcttacaaaaagagaagaaagaaaaaggaagggagggagggaagagagagaaggaaggaaggagagaagagagaaaggaagaaagctagtcttcgaatgtgcccctcccccaccccaacgtggccacttcttagaaaaccaagagctgagtcatatgaaaaaaaatggcctaatgggactcagagctttattttgctgaatccgcaataaccagtcgtggatgaaagcaaatgtttgaccataagttctccctgctgttcatttctatattcttgttagtgaatggatttggtagcactttggataaagtaagggcatgtagtgtaggttggtcctccccttgtttttcgagggctctcatctcctgcttattagtgaggacttggattagcaggtggctttcacatcataggtccctcctctctccaggaagcctcagaattaatagtagaagcagcaccacccacagctctatttgatgccccatgagactttagaccccttctatcttacttctcttggtggtctcagtctctttttttccttgttattctttttttaattagatgcttggcacaagataacaagtatttatggccagccttggtggctcacgcctgtaatcccaacactttgggaggctgaggtggttggatcacttgaggtcaggagttcaagaccagcctggccaacatggtaaaaccctgtctctactaaaaatccaaaaaattagccaggtgtggtggtgtgtgcctgtagtcccagctactcgggaggctgaggcaggagaatcgcttgaacctgggaggtaggggttgccatgagtcgagatcgcgccactgcactccagcctgggcaacacagcgagactctgtctcagaaaaaaaaagataacgagtgtttattacttaattcctcccgaactctaagccggttctttcttcttatcttcagatgtctattaattagaattacattgactttatgagggttggggggctgttttttaggtgtaaggcaactgtttattatgtttctgagtacgttaaaggaagtttgcctcaatcttgggggaccatctaaggcagccttttgaaaacaacagaactgttcctgggattgtatctccccaaaagcatctgccctctcatcatttttagaagatggaatatagaataacaaggatgagacttgcttctttgattcattttacagaccttgaaactcactgacgatgttgcagagccctgcttttcaccctgtgtcttgttttacatcattttctttctttcttttttaaattggagttggagatctgacagatttgcaagtatagtcttttctctatttcacctaccctgcaagtgcatatggcaggagaacttgttgcttcctgttgggtagtatgcataaagaataggaaaagagatataaaatttatttatgtaacctgtaatttattgatttgataacctgtagaaaggcagtgtgaagctgcactgattgtcaccagtggaatagggtggcttgctctagcaaatacagacacaggacacccagtgaaatactgcatggaatatacttatactgaaaaattattattgtttttctggaattaaatttaacgggggcccggcatggtggctcacgcctgtaatcctaagcactttgggaggctgagcaggtggatctcttgaggccaggagttcgagaccagcctggccaacattatgaaaccccgtctctactaaaaatacaaaaattagctgggtgtggtggtgggcacctgtaatcccagctactcaggagggctgacacaggagaatggcatgaacctgggaggcagaggttgcagtgagctgagattgcgccactgcattccagcctgggtgacagagtgagatcctgtctcaaaaaataaataaatacattaattaattaatttaactgggcatcttatatttatctggcaaccctgtgagtagtcccctcttctgttctcaacagattcattctgatttgattcttctagtgaatgaatagtgttttcatggtcagtgtcctgtgataaagttgaggcttatggtttataggtttatatggttataggtttatgttatatctaagattctgttgttctgacaggtgcaaattcaagtagatacaagttcaagtatggggaggcccttctctgcctcttagcacgtcagggcagagtgatctgaagccgaaactctcctggtagaagggagggtaaggctgcggggagtaggaaggaaacatggggctggagctgtgaaaaccagtaggtactggcatgtttcttaatagttcattgaggcctaaaagaccttcatcctttgaataactctttaagggagagaaatgatggaaattctgtcggcatgtggttttactctgtgaaggtgatcaaaatgtttggcatgttactcttagttcaatctctcaggaaggctttgaacaaatgaaagcagcagccatttcagcaagcgggggccacacctaaggttactcgagagtgaagattatctcagaagtttagaatcatgacacttcggggaagataggatcagggatgaatgggagacgggggcttaagggagagcttagaagtttagaatctaagagagaaagggtttgtttttggggagagggattatgtatgatatttaatagcacctgcaaactttaagatagctggggggttctcagtaactaaggagggtcctgaccctaaaagctatcttttctctaaagattttgtaatgtttaaaatttttttaaattaagataaatatattttaaatcatactgtgaatccaactggtatagcattctgtagagaagatcactggcttaagaggattgttagaaggtggctcacacctgtaatcccagcactttgggaggctgaggcgggtggatcacgaggtcaggagatctagacatcctggctaatatagtgaaaccctgtctctactaaaaatacaaaaaattagccaggcgtggtggcgggcacctgtagtcccagctactcgggaagctgaggcaggaaaatggcgtgaactcaggaggcggagcttgcaatgagccgagattgcaccactgcactccagcctgggcgacacagcgagactccatctcaccaaaaaaaaaaaaaaaaaaaagtggattcaaagtcttacgggaaaatcctgggctgtgatttattgtgatcagtgttttacatcttaatttcagaaacatttccctcttcaagagttcattcttcagctgggtgcggtggctcacgcctgtaatcccagcactttgggaggctgaggcaggcagatcacttgagcccaggagctcaagaccagcctggccaacatagtgaaaccccatctctacaaaaaaatacaaaaattagccgggcatggtggcacgtgcctgtaatttcagctacttgggaggctgaggcatcagaatctcttgaacctgggaggtggaggttgcagtgagtcgagatcgtgccactgcactcctatctgggcaacagagcgagactccatctcaaaaaaaaaattatttttcttttaacataactcaggggtctctgggaatgagtgggaggaaagtgtcttgttctcttcccaagggttgtttctcagggagatacccttcacttccatgcaagcctgttcctttggttgtttgaactctcaagttccaaggcaaggctttgaagacatgagagtttcttggcaagaagatgttctctgcggtagatgaaactttagatactcttttctgacggtagcaatgtaagcctgtgacagtctctactcctagatacatgcggcgctgtgagtgtgggaagtgggcaggctttggcattctgcaggaggggtctggaaggaaaacacgtagtgagcatctgtactggaggtcagcatgccctttgcttttcctacctgctttttactactccttagaacaaggggctacgtgccagtcagttaaatgtcattaggtccgctttaggctggctgagggggaaaggcagtttagcatgtaatttgtcatgtggaatattgggtcattgataaggcccctggacctcttgaggttgccccacactcccgtgaccccttgatgggcctgagattgggctgcactaatgagctaccttttgcccttcagcttccttccactgtatagcctgatgtgttttgctacgtgagtgtacgccctaggcttgtctccctggtcttgatccagtgtctcatctttgcacctctctcacaactcctatcagagtttgtttctaatggaagaggttcacatgataaagaacaaaccagccagtcctcacatcaagatagagatgaaaaatgccaccttggcatgggactcctcccactccagtatccagaactcgcccaagctgacccccaaaatgaaaaaagacaagagggcttccaggggcaagaaagagaaggtgaggcagctgcagcgcactgagcatcaggcggtgctggcagagcagaaaggccacctcctcctggacagtgacgagcggcccagtcccgaagaggaagaaggcaagcacatccacctgggccacctgcgcttacagaggacactgcacagcatcgatctggagatccaagaggtaagtggtccgccccctgcctccctgcccgcaccccaccaccccatgctgatctgccaccaataggcggctgctgttccttttcacaaagtgctttgtggctaggagtgattttgaactaaagagcaaattagaccagctctaactctaaaaaaaaaccaactaagcatttagcaacagaaatgaataacaactaatcttatgaggtgatcattttataagcaaggaaatgaaacattcaagaggattttccaggatttttccccaaagaggattctattttagttgtatgtgagctgtgacaattatttctgattgttacaagtctgtgagcgcccttgtgcactaggctgtgcatcatacctggcacatgataggtattctcagtgctactgtgacaacatttgtgttgtaatgatttattcttaatataagttaaggatcgttaacggtagatgatgtcacagcccaggtagcacaagattagtctcagagggcctcctatagggaatggtggaacagagatgccaggttcaaggcttttaaaatacagactatgtatttcggaaccagcaccatattcacaggtccgtgtcattagagggccccggatgtgtatatattcattcattcaacagccatttcatgagtatcaaactccatgccagatgctgtgatagggctgggcacagagccacaaaaacccaaacagacaaaaatcccgtccttcttggagtttacattctagcaggcacagacaggtcgtgagcaaatacaatatattgcatatcagatggtgataagggctatgacagaaggggacagaggctgggcatggtggctcatgcctgtaatcccagcactttgggaggccaaggtgggcagatcacttgagcccaggagttcaagaccagcctggccaatatgttgaacccctgtctctacaacaactaggaaaattagccagctgtacgcctatagttccagctacttgggaggctgaggcaggagaattgcttgagcccaggaggtgtaggttacagtgagctgagatcgcgctactgcactccagcctgggtggcacagtgtgagactcagagtgagtctcaaaaaaaaaaaaaaaggtgggtgaggagagagtgtgctggggcagggagcaggtgtggttacaacttgaataggctgcctgagggaatgccttatttaaaaagtagtatttgggcaaagatcaaaggagatgagggagagagctacctgggtatgggatgggtggggaagaacattccgggccaaaggaacagaaacacagaggccgcaagtggtgagtgtgtctgttattggagtggaatgagcatgggagagagtagtggatgccaagggcagaggtggtgcctgccagagcctctggtgagacttcagctttactccaagtgggaagaggagcctttggaggattcacagcagaatgacatgattggacttatgtatgaagaggatcattctggttgctgcaggggagacaaggaagcaaggagaacagtcaaggctctgttaccacagtaaccgggagaaagatgaggatgtcttagatcaaggttgctggtgggaggtagtaagaaatgtttgtccatgtaactggaagtagggaggaggtttgaatgcagtgtatatgaaaatcagcaactgaccagaggcatggtaagccaatccagaactagactgagaagaggacaaaaagcttccagcccttaaaagctatgagcaagaaggggacacagtctttagtgacaccacttgaaactatgagtgtcattgaagggcatgcaagtcaggtttttacttcagttaactttttttttttttttttttttgagacagagtctggctctgttgcccaggctagagtgcagtagcacgatctcggctcactgcaacctctgcctcccgggttcaagtgattctcctgcctcagcctcccgagtagctgggattataggcacgtgccactgtgcctggctaatttttgtatttttagtagagacggggtttcaccatgttggccaggctggtctcgaactcctcacctcaggtggtctgcctgcctggcctttcaaagtgtggggattataggcgtgagctgctgcatctggccttacttcagttaacgcctaacaggctttttatttagtaactattagcttgattattgaggcagctctaatacattgctatcagctctattagaaaatgattccacacgtgcagctaaaatgtattcttttgctttgtatgttgaccctcattttgcccttcagagcccacagacaatgggagacctttagccatttgaagagagatgccttaattctccctgggcctttgctttagggaagagaaggggaggtaatgtttgccaagtgtcttctgtgcaccaggcatttttctcatttttgatgtctcatttagtcatcatttaatcataagaatagcatttttctcatgtaaatctaactggcctgagcagaggttgaacctgtgacttgacctccttgttgccaccaggcagtaaaccattcagtactcgtggaccatgtcaaaaactatttgttcaactatcagacactgtacttagttttatgaggatactgcctttcctcaaggtgctcagagtccaaagaaggagacagacacagtattaggttaagtcacggggcctggatcacacagttagcaagtgctagtgaagttgggatttagataaagacccatctgcctccagaatccatgctccgtccacactaccactctcccttccttcctggggacacttgaactggcacggggttgtaaacaagtgacccttttgaagtcatctgtctgtcccttgaaaactttcaacaccactttgagaactctttatcttgcctaaggatactcagttaatcatagacttggtgttctacttttttgtgggattgatggtataaatattcctcagatttttggaaatgttttgcatgcaacagtgtccatggtttttattgaaaattaattatgtatacaccctggagaaaaatcataataaaatgatttttaagagtcctgccctctcttctggcaaacaacaaaaacaagtaaataaagaatatgggtggccaggcgtggtggctcatgcctgtaatcccagcactttgggaggccgaggtgggtggatcacttgaggccaggagtttgagacgagcgtgaccaacatggcgaaaccctgtctctactaaaaatataaaaattagctgggtgtagtggtgcatgcctgtaaccccaacaggagaattgcttgaacccggaagcggaagctgcagtgagccaagatcgcaccactgtactccagcctggttgacagagcaagactccatctcaaaataataataataataataaaatgatttttaaaagccctaccctgtcttctaaaaaatgacaaaaacaagtaaatgaagaacatgggttagcagcagaataggaaagaggctgggcctaagaatgacggtgggatactggaatgtgtgcggcatatttactttccccaaagggcttccattcctgttatctcaggtgtctccacagaaacccatgagataggcagctaatgagtgagaaaacaggtaagtggcctgctgagtcatcagggtgacagttctgtatgggtagactacagttaatgtgtttttcctcaagtccttagcgatgagtggttagtagtctctaaatgaccctcctctctgtgtgccttgtccagggtaaactggttggaatctgtggcagtgtgggaagtggaaaaacctctctcatttcagccattttaggccaggtaagatttttgttattgtccttttctgctgctttctctggtttgcaagagtctcaggaaaaacgaacaaatttcctggagagtcaggaaaggtggaaacaaatgaaccctcagcctgcattgtatgcccccaatcccccgcagttccccccagttctcccccttcacagccttctgcctggaaggaggcctggtgggcgcctgatggatgactgactgttgtcccagctggaaccatttggtctcatgccttctttcattcagcatgtatctattgagtgccacaggtatgcccgtgtattgaaaatgtcagagataagagatgagcagacaccctacactgcagcgctgccaacagagttaacctgtaaagaagcagggcggccagcactcccagcctctctgtcagacaggactgtcagggtttgatctagaagcaaagcccctctgttttctgcctaatccctgaaagagtcatgcccttggggagttcatggtccagtggggagcaaggccttgagaacacaacaagcacatctccaggcagggagtgaacagcgtgcagggcccagcacacggtggccagtgctgagagtgagggacaggatggggccggagtcatcccactgagacacactatcattgctgtgttttagaatcaaacaatccagaaaaaaaaaaaaaacaaggtgcccacatgcttttacattagaattaaattaacttgacttagatggttgagatgagcataaacttatgattatctctacaccctgatggataaggtccactgaattgaaatgaaacagagggggagcaggggtgcttttgtagcccccagattatggaatgctttcttgtcttgtttggcatcagctgtcacagttggtgagttgtggtcctccttgagggtggtggtgcctggggctgtctgagtcagatcatggcaggcatcacctccaccttctgctttatgacactctccagtggctgggcccagccattggtcttgtaaaaagcaccagacttcctaggtgatttatgatgaccaaccagatttggagggccagtgaggagagacagagatggggggagggggagaaggaaagaaaaggtcaattcgtaagtgctgctctgccatctagcaatgtgctcctttttccagggttgactaggcagtggttaggttgaaaaccaagtcaggctttgcttctggacaaatcctggcaaccctgtctctggcagggaaacgggttgggctggtcagccctgctttaactgtagtttacatctgttgatagcgctgcaatgtgcggtgtttgtgcagcagccagaagtgccggctttccacagtagaccccctggggacttctgaaccctttgaagtgcacatcagaatgctaccagtttgtggtgtacgtaggtacacctgtgtgtgtacacgctgtgtgagggtgtttgagaagaccagcttatatgaacaagtactgcacaggctggttagtgaaactttgcttcaaagctgtagcatccctaaaccaagacaaatgtctactatcagtcccaaacaaaagaaatcatggaagggggtaaaatggataagtcaattcatatcaaaccattgcaactgaacacaaacttcaaagcacatggttcatcactgcttgtgggcaggcaaggtccatcattggtaaatggacactgtgtatatattataaatactaggtgatgtctaacctggactttttttttcccttggtcctcatttcatagaagcaactggtctagccagcatcctaggtaattgccttggatgagttggcctgcccccatgttgaggcagggattagctggaaacccctacagcatcctctccaggagaattctgcaagaacctcttgcttgtgcttctcctaatttaaacagtttgcacacagcaaatgggctgcagagggaagtgtttgccttcaagttatgggttatgctgagctcccatcacacataagcaaggagaactttgattttctttgctgcttagctctctttggaattaaaggtggaatctggatttgggtccaaaaagcatcccgggaaattaccagagctagattccattgtggaaggtgggggttccgttggcatagggtgatggttttgagttatgatgccattggatggtgtctctctccctagatgacgcttctagagggcagcattgcaatcagtggaaccttcgcttatgtggcccagcaggcctggatcctcaatgctactctgagagacaacatcctgtttgggaaggaatatgatgaagaaaggcaaggaatgtttggcttctgtcatgctttccatcttggccgcgtgagatgcaaggcagccctagtcagcaggctctgctcccgccgtgtccctgacgctgtctctttgtgtcctccagatacaactctgtgctgaacagctgctgcctgaggcctgacctggccattcttcccagcagcgacctgacggaggtacaggccttccgcccctgaccaggcatttagcagagtggcagagctgggccagagctgctcctgggagtgcaactgaaatgcttgggagaagagcctcacagggagttaggctgtcattaggcctttgtgttaggaaagcatgtgtccattagggcagggatgttaacactgcttgttttaaggttgtaagtattttctgtgtcttggggattgtaaacaaaatcccattgttgactcagagttgatgttttttattctatccagatatttttaaaactacaagtaagcgtgtgcatgttgagcatcttccttgaacttgattttgccaacctccttaactcagatagtctgtagagagcccttttctattagaaagagcccttagaacaaatccacatttctttgggtctctgccctgcagcagtttccagaggcttgtctttggaactaatttgtgctcttcagtgttaaaacttgtctcccatgaattgccctgaaggtctctgggattggcacctttatttagctgatttcagttaaatccctcaaaccagatttggtgaatggtttaattactttagaggtccttaaatccatgtccccagatcagcagcatcagcatcagcatcatctgggaacttgttagaaacacaaattcttaggctgttctccagacctactgaatcagaaactctaggggtggggcgcaaaggtctgttttaacaaaccctgcaggtaattctgatgcaacttccagtttgaaaacctctgaattaattgaatatttgacaactgatttattcatttaatcatttagtaacatttattaggtgtttattatgtgccagtgacatgtgcagacactgtttggcactaagaatataaaggaataagacaataatctgcacgtaaagaagtgtacagttaagaggatgagatacccaaacaaataggcacaaaataatctgatgaaaagagccccatctctttggggtactagcgggaaagaggttgggggagatttcagaggagatgatgccagaactgagcagacaaagtagaggcaagcacatgacattgtcatgttcatagtatacacataatttcaaatggcttaggtcccaggatgtggaagggggattgtgcactggaggctgagaactgctggggaactgggtgacaaagggtctggtttgtatgccatgtttggatactcaaggtttatcctttgaggctcttgaagaattttaagcaagggtgggagatggtcagctttgtgttctggaaagatcttcctgccatgtggagaatggattggagggggagcatccgggtggactggcaagaccagatgtaggattgatcggtacccagatggcagtggtagaggaagaggcatctgggccaactcccccacttcgttgaaggatcagcatggcagttcatctgcggggaatcagcatggcagttcatctgcggggaattgacagaaggagctggtctgggtgggcaagaagagaagtgactgggtgacccctccacgctgttctggacttgcgctggaggcttcaccacacttctgggctcttgtagattggagagcgaggagccaacctgagcggtgggcagcgccagaggatcagccttgcccgggccttgtatagtgacaggagcatctacatcctggacgaccccctcagtgccttagatgcccatgtgggcaaccacatcttcaatagtgctatccggaaacatctcaagtccaagacagttctgtttgttacccaccagttacaggtatggttctttcttccctcggctgcctgcctgagtttgggaaatcagaaacagggaggtaggtttgctccaggtatccttgtgttataactagaaattcctggaatcaaggtttcattttcttagcaaattagccccctgtaccaataaagctcactgtaccagtgtaacagatggccatctaaatcagagatccttggagcatatcagcttctgcatatagatcagcaagtaaaagggctgagaggagcaggccaaaaatggagtttgggtataagatagtttggaaagcattgtgttaacatctctatgcaagtgggaactgttttgggaaaacaagcttttctccctctgccattccatcataagcaggcactttggagagcagctcaaggatgttgccatctggctcacatatgttgtcacgtttagggggcaaaccctccattctgccaaagaaagtcataattatgtatatttgtgagtgcagtgaaagggtgtaaatttaatgcagggctcatgtggctccatcagcagattcatgtgaaaaaccggagggactcggccaggcacagtggctcacgcctgtaatccctgcactttgggaggctgaggctggcggatcacctgaggtcaggagttcgagaccaactggtgaaaccccatctctactaaaaatacaaaaattatccaggcatggtggcacgtgcctgcaatcccagctactcaggaggccgaggcaggagaatcccttgaacccaggaggtggaggttaaagtgagctgcgattgcatcattgcactccggcctgggcaacaagagcaagactctgtcacaaaaaaaaaaaaaaaagaaaaaaactggaggaactgctccttatactatgtcacgaggcacaatacactgaagtggggttctcagtgttggcaccactgatgttttggaccagatagtccattgttgtgtggggctgctttgtgcacccctggcctctagccactagataccagtagagacagtcgctggcttacggttcaacttacagttttttgactttatgatggtttccacacaaccattctgtttttcactttcagcatagtattgaaaaaaattgcatgagatattaaacattttattataaaataggctttgtgttagatgattttgcccaactgtaggctaatgtaagggttctgagcatgtttaaggtaggctaggctaagctctgatattttcaatttacgttgggtttatcaggatgtaagcccattgtaaattgaggagcatctgtgtacctctcccccgagttgtgacaaccaaaaatgtctccagctgggcgcggtggctcaggcctgtaatcccagcactttgggaggccgagatgggcggattacctgtacggcaaaaccccgtctctactaaaaatacaaaaaaattagccagacatggtgctgcatgcctgtagtcccagctattcgggaggctgaggcaggagaatcgcttgaacccaggaggcggagattgcagtgaaccgagattgcgccaccacgctccagcgtgaacgacagagcaagactctgcctcaaaaaaaaaaatgtctccagatgctgccaaatgtcttctgggagcttaactcgtctcctgtagagaactactgaactaatgtatgggtttttgaatgtatttgcacaaacagcatattgtgttgtctctgcctttgccttcagtacctggttgactgtgatgaagtgatcttcatgaaagagggctgtattacggaaagaggcacccatgaggaactgatgaatttaaatggtgactatgctaccatttttaataacctgttgctgggagagacaccgccagttgaggtaagatctgatggtgtttgcgtgtgtccccttctgtctctgcaagggaaacacagccggagtgagtgatggagagacctcagctgaatccagtgtctgtgtcttattggcaggggccctgttttctggtgaacagactgctgtgccttagttcacacactgattctgctctaggagagcaggattgtggggctggtgagctgaggtcttctgtcactgagaacttactaatatgacaatggcagggagaaggatatgggctcagtgagggcagagaagatgtgtgctgctgttcattcacagcttagtttcctaagctccatccacctgattgaagcattatgaagctcttttttaaataaacaagtgaataaagtgccaaggtagggaaattaaatattgcatacatttgaaagcactcaggtcaggtgctgcggctcttgctggtaatcccagcatttttggaggctgaggtggacagattgcttgcgcccaggaattcgacaccagcttgggcaacatagagagaaaccccgtctttacaaaaaaatacaaaaattagccaggtgtggtggcaggcgcctgtaatcccagctacttgggagggtgaggcaggagaatcgcttgaacccaggaggcagaggttgcagtgagctaagattgcaccactgcactccaacctgggtgacagagcgtgattccatctcaagaaaaaaaaaagacataagagaaacttggaaaggagagcattaagtagtttctgttatctcaggtagaaccctgatggctgtttattgagtccctgtgtgccctgttataggcagttctcaggggtagggcctgtgcaggttgtaaccatgtgagagacatcatctctgtccttaagggactcacagtgttctagggaagaccgatgcttttatgctcttacaagcacttacaaatgtggcttacaagaccacatcacatgtatagtactaatggagttctaagggcgaatgggagggtgagctttccagggagtgtatgttgcctcatgaagaatggaagacttgaatctatctgaatggggacaactgtgactgcgattgggacaaggggaggggcattccaagtggaggaacgagtgtggaccaaagtagagaaatgggaaattgcagtgtggtgtaaggaatggtgtgaagtccagtgtggcttgagagtaggggctgtggacaccagtgagatgggagaggagcttgcaggattagggcagggccagaatatggaggtcctacagaaccaggtggaaaagcttatgtttatcctgtggtagcagtgggaaatgatcagatctatggatttggtttagtgatgtgggctcagagaggaggaatggaaatgaccccatgcctaatactttgtgcaacttggaatggacaagaacagaataaaggttactgtgtttggagtttagtgactggggagagcaaatgtcagtggactaaattttaaatcttaaaaatttaaggagatgaggaagtacaagaaatgagtataggtgacccttttaagaagttggatgtatcttttttcagtaatagcagtttaattgatgattccctaatatgtatcctgtggacattcatctggatggctaacatgactggagacttttttttttaaatattattagatcaattcaaaaaaggaaaccagtggttcacagaagaagtcacaagacaagggtcctaaaacaggatcagtaaagaaggaaaaagcagtaaagccagaggaaggtaatggccttttttgaaatttttagatttgtcatcaaagtttatcagaaataacttgtgtagtaagtaattcatgatgtttgatagcagtgtgtgtacaatataaatacttggtcttacatttctggaaaacaaagttcttatataatactgggagaccacgaggcaccttctgtttgcttaaacagaccagggcagtaagagtcaccttcagacccatgtcttctcctgtgcagggtggggtcaggtttaggtaattagaactgagtcatcctgagtaaggaaaaatcgaatggtgggtacaggtacacccttccatccagtgattcgcctctgctcatgaaaagtcccaaccaaatcagaggtgttctggctctaagaatatctgtgtcctcagaagcacccatgttagaacagtagactcgtcactttgtcttgacaatatagcaccaggactatgagtaagagtgacagagaggggtttttcctacttggcttttcctgtccagagcccttgatcctgtttcttaaaccctttatgttatcaacagtaacaaatcttgagagttaagggaagatatttgcaataatgtgggcattttcacctttgaattttaagttgcatgtcaatttaaatacacacaaacactgtgtgtgtgtgtgtgtgtgtgtgtgtgtgtactgtatagatgtagacatgtgtgttcttgttttaatctctttgttgcttcacctccttacctcacccttttgaatccagggactttcttgggtttgccattgctttggagacggagcctgttgctacttccttatccttaaaactgcaggaggtcaggcacaggtggcttatacctgtagtcccagtactttgggaggctgaggtgggaagattgctcgggcccaggagttcaggaccagcctgggcaacatggcacgccccgcttctctccaaaaaatataaaaattagccaaacgtggtggcacatacctgtagtcccagctacttgggaggccgaggtgagccactgcgctccagcctgggggaccgagtgagatcctgacaaaaaaaaaaagaggaaagaaactgcaggagatatttggtattgggagttgatcatcctgacttactgcctcttttatttctttttttaaaaggtatgggattttgaattcaggtatgagattttgaattcaagtgtggtttatgataccttattgacacaccccaaaaaacaaacagcacagaaggctgagacatttgttagttcttaccacgggcagtaaaaaatcagaatatcattagcaaacatatgttcttctgtacatagtcactaacctggctactcacaactcttaaagtgctcaaggcatgagggaggcttattctgagatttgtaaacattatttgtgtaaagagggaaaagccgggtactatgcttagtacctgggtgagaggatcattagtaacccagacctcagcgtcatgcaatatacacatggatctgcatgtaacagatgtaatatacacacggataagcatgtaacagatgtgatatacacacgaatctgcatgtaaccaatgtgatatacacacggatctgcatgtaaccgatgtgatatacacacggataagcatgtaccagatgtgatatacacacaaatctgcatgtaaccgatgtgatttacacacggatctgcatgtaaccgatgtgatgtacacacggatctgcatgtaaccgatgtgatgtacacacggatccgcatgtaaccgatgtgatgtacacacggatccgcatgtaaccgatgtgatatacacacggatccgcatgtaaccgatgtgatatacacacggatccgcatgtaacagatgtgatatacacacggatccgcatgtaacagatgtgatatacacacggatctgcgtgtaaccgatgtgatatacacacggatttacgtgtaaccgatgtgatatacacacggatccgcatgtaaccgatgtgatgtacacacggatccgcatgtaaccgatgtgatatacacacggatctgcatgtaaccggtgtgaggtacacacggatccgcatgtaaccgatgtgatttacacatggatctgcatgtaaccgatgtgatgtacacacggataagcatgtaaccgatgtgatgtacacacggatccgcatgtaactgatgtgatgtacacacagataagcatgtaaccgatgtgatttacacacggatccgcatgtaactgatgtcatatacacacggatccgcatgtaacagatgtgatatacacatggatctgcatgtaaccgatgtgatatacacacggataagcatgtaaccgatgtgatatacacacggacccgcatgtaaccgatgtgatgtacacacggacccgcatgtaaccgatgtgatttacacacggatccgcatgtaactgatgtcatatacacacggatccgcatgtaacagatgtgatatacacacggatctgcatgtaaccgatgtgatatacacacggataagcatgtaaccgatgtgatatacacacggacccacatgtaaccgatgtgatgtacacacggacccgcatgtaaccgatgtgatgtacacacggacccgcatgtaaccgatgtgatgtacacacggacccgcatgtaaccgatgtgatgtacacacggacccgcatgtaaccgatgtgatgtacacacggatccgcatgtaaccgatgtgatgtacacacggatccgcatgtaaccgatgtgatgtacacacggatccgcatgtaaccgatgtgatttacacacggatctgcatgtaacctatatgatatacacacggatctgcatgtaacctatatgatatacacacggatctgcatgtaaccgatgtgatttacacacggatctgcatgtaacagatgtgatatacacacggatccgcatgtaaccgatgtgatgtacacacggatccgcatgtaaccgatgtgatttacacacggatctgcatgtaacctatatgatatacacacggatctgcatgtaacctatatgatatacacacggatctgcatgtaaccgatgtgatttacacacggatctgcatgtaacagatgtgatatacacacggatctgcatgtaaccgatgtgatatacacactgatctgcatgtaaccgatgtgatatacacactgatctgcatgtaaccgatgtgatatacacacggatccgcatgtaacagatgtgatatacacacggatccgcatgtaaccgatgtgatttacacacggatctgcatgtaaccgatatgatatacacacggatctgcatgtaacctatgtgatttacacacggagctgcatgtaaccgatgtgatatacacacggatctgcatgtaaccgatgtgatttacacacggatctgcatgtaacagatgtgatatacacacggatctgcatgtaaccgatgtgatttacacacggatctgcatgtaaccgatgtgatttacacacggatctgcatgtaaccgatgtgatttacacacggatctgcatgtaaccgatgtgatttacacacggatctgcatgtaaccgatgtgatatacacacggagctgcatgtaacagatgtgatatacacacggatctgcatgtaaccgatgtgatatacacacggatctgcatgtaactgatgtgatatacacatggatgaacatgtaaccgatgtgatatacacatggagctgcatgtaaccgatgtgatatacacacggatctgcctgtaaccgatgtgataaacagacggagctgcatataactgatgtgatatacacatggatctgcatataacagatgtaatatacacacggatctgcatgtaaccgatgtgatatacacacggagctgcatgtaactgatgtgatatacacatggatctgcatgtaacagatgtaatatacacacagatctgcatgtaactgatgtgatttacacatggatctgcatgtaactgatgtgatttacacacggatctgcatgtaaccgatgtgatatatacacagatctgcatgtaaccgatgtgatatacacacggatctgcatgtaacagatctgcagatgtactccctgaatctaaaataaaagttcaaaaacaaaacagggaaaatcttcctgtatagctgtttctcttgcaaatgaaaaattaaattctgtgccctgcaactaactgaataaactctcctctaggccaagggtacccaatggaacctgaaaatctattcagaccatgaagggaagacaatgttggacgtgccttattatactcccctgcctttagagttcaggcacacaactgacgagcattaacatttatatagagatcctaagactgacagaacagtctctttgtagctgtaagatacctaattccaacctcactctattaaaataatagagcatcacaggacagatagcagggccctggaagaaatgcatattttgaaatgtctctgcaaagctgtctgttgaaggggaagttctgcattacgtagagaatctccttcctttactaggtctctccagagggtctgacacctttgataggagacattcacatctgttctctctgacgtctgctactgggaggcttcatctacatgacaagaaccttggcgtccacaccctgtcccccaccactcccccaccactcaagctaatttcaactcttcaggcagagcttaaccctttcaaccaattgccaatcagaaaatctttgaattcacctttgacctttaagctgcacctccctgccccatgttgccccacctttccggatcaaaccagtgattaccccacttatattgattgatgtctcatgtctccctaaaacataaaaccaagctgtaatccaactgccttgggcctgttctcaggacctcctgaggctgcgtcactggtcatgattcttaaccgtggcaaaattaactcctaaattgattgagacccgtctcaaggtactttctggtttacattctgtattctcatattagtgttaagaatctgagtgcgccagggagatcctcaggaatatatttgaaccttttctctcctccagcagccagccagttactatgtcctactgaatttacctcccgaaactccatcccaccatcacaaccccagttcaggcctttatcatctcttacctacagtgttacagctgcctcgttttgaacctgtcttccacacggtcagctgcgagatctagttaaaaacatgagaccagctaggtgcggtggctcatgcctgtaatcccagcactttgggaggctgaggcaggcagatcacctgaggtcaggagttcgagaccagcctggccaacatggtgaaacctcgtctctactaaaaatacaaaaattagccaggcgtggtggcgggcgcctataatcccagctacttgggaggctaaggcaggagaattgcttgaacccgggaaggcggaggttgcagtgagctgagatcacgccactgcactccagcctgggcgacagagtgagactctatctcaaaaaaaaacacacacacaaaacatgagaccaaccaactttcctgcatggagtctttcagtaaccttccattttcaaatattttccctgatagggcacatacagaaaaggctatttgtgtggaacacaggaggcatgaaagaggctgctcgctcccagaggcagctggtgtggcaatatcagccatcccaggtccttcctagcccaacagaagtcagacacacctgtcaccctttctgttgagaagttctttgtggggccaaaattcaaagcctttcttctgtgaccacagcctgcttagtcggcctcatctcctgccattctttaagtgcacatctgttccagctgtgccgaatcactgtggtggtgtgttttgctaccccgtgcctgtgcttgtgttgttttctctgcctgctctctcctttccccacccggtcatctgtggcttaccttttgagaagcaatacagaaagtcttacctgaaacatgcctgccaaccaccccacacctaagccaaataggtcaagtatgcctcccaggggttcccatgctgccctgcgtatagctctatcatcacattgagcacatttcactgtaattatgtgattattgatctgcctgtcctaccagtctgtggcaggctcctcagccaggtccctaggggtggggacctggtcttcatcctctttgctgctcctgggcttcatcctgggtctggtttgtggtaggtgctcagtaaatgttaaatagatgaatgaatgcttctgacaaagaggaaatctaatctagacccctgtgaagctgccggttgtccgattctgttgctctgcaggtgacttagttttatggaaatagttcttcccttctgagtccatgtttctttttttcttacctagggcagcttgtgcagctggaagagaaagggcagggttcagtgccctggtcagtatatggtgtctacatccaggctgctgggggccccttggcattcctggttattatggcccttttcatgctgaatgtaggcagcaccgccttcagcacctggtggttgagttactggatcaagcaaggaagcggggtaaggttactcataaatgggaaagttctgtgtctaagaatgtggccgtttctccctattccctggctattcttagggaaactgttctagttttcacttaaaagaagctgtaaagagagatttttccaggatgaaaagatgagtccctaatgtagcctcaccagaaggaaaaaaacgctgaccaacccacagggcagtagggcgtgcagtaggacacctgcaggctatctgttctcatccgttgtgtattagtccatttttgcactgctacagagaaatacccaagacggggtacttgacaaaggaaagagggttaattgactcacagttccacataactggggaggccccaggaaacttacaatcatggtggaaggcaaaggagaaggaggcaccttcttcacaaggtggcagaagagagacaagacagcgtgtgcgggaggacatgtcaaacacttttaaactgtcagatctcatgagaactcactgtcacgacaagaatagcatgggggaatccaccccacaatccggtcacctcccaccgggtcccttcctcaacacctgggaattacaattcaagatgagctttgggtggggacacaaagccaaaccatatgacattagaatagagagaaagagggctaggtgtggtggatcatgcctgtaatcccagcactttgagaggccaaggcaggtggatcacttggggctaggagttcaagaccagcatggccaacatggcaaaaccctgtctgtactaaaaatacaaaaattagctgggcatggtggtgcacacctgtaatcccacgtacttgggaggctgaggcatgagaatttcttgaactcaggaggcagagggtgcagtgagccatgattgcgccactgcactccagcctgggtgacagagtgagacactgtctcaaaaaaaaaaaaaaaaaaaagaggtggacaaagccatgaccaggtcccagggtgggtcattatcctgtaccctgccctgcccttgagctgagaatggcgctgagcaggggctcttggcagtcgttaggagtctggcctcatagaactttggcttcaaacagaacaccactgtgactcgagggaacgagacctcggtgagtgacagcatgaaggacaatcctcatatgcagtactatgccagcatctacgccctctccatggcagtcatgctgatcctgaaagccattcgaggagttgtctttgtcaaggtatgcattggtgggtggtctctgccctcctccctggtgacctgtggtcaggctttggtgtggcgtctctcagttcatgctgagtaggggagctcccttaaccaggatggccctggctgagatgactcatattccgttagcctccaccttttctcacttgccacctgtccctcctgacccctcacacctccccgctttgggagtggatgtgctgcggagcggttctctggaccagtaggaacagagccgtccctgggccctgaccactctgtgctctgctcctcagggcacgctgcgagcttcctcccggctgcatgacgagcttttccgaaggatccttcgaagccctatgaagttttttgacacgacccccacagggaggattctcaacaggttttccaaagacatggatgaaggtatttctcactgagcctttttttaatactctggagctcactgtgcttccagccttctagatgattctccaaatgtgcagatctgtctgtctgtagatcctgagagcacagtgactgctggtgttttcaccaggaacattgcaactgcattttctgtcttgtttgacctgaaaataaattcaatgaattgagttagcagaaaggctttgaacagaggcatctgagattctgaaacacacacagattttaaagcaatgcattggtttctggatgcctacaacctggcaggttttctggctgttgtatgggctgtgcctgcaccagaactgaaatactgtacccccacagttcagagtaacagtaaagcccctgacattgacagggggcttcctgtgtagcaagcagcatgctcagtgttttatgcatgttaccttaatccccgcagcaggcctgtcaggcgggtgttgtttcactccttgaataatgagaaagctgctatctggaaaggtcaaggaactggcccaagatctacagctattgagtgacaaagctgcaaattgaacccagatctttttgaccccaaagctaatgtttttaattgctgcactgtagctgccttcatggaaggggtttgtttcaggcattgataggccattgtaaacccatggccagaggtaacaagaaatcagaactatccctgatactcgaactgatacataacatgttcccatttctgctaaacacacacgcatgtgctcacacatgaatggaaaaaagaaaaaaagtaaataatagcaacatgtctgggatttgcatgaaaatactttaaccagaagaaaaaaggcggtggggtggggagacagccaaaaagagatgaaagttgataactgttgaagggtctgtgctcttcctttaatttttatgtatgtttaaaaattttgcaagacaaaaaatgtcttaaatgttaacagcagttcattggtattggtaagaatatagtttttgttttcttcttcacatatttattttccaaacattttaaaataagcataagttactttgtaaagggggaaaatgtttaaagcagtggggcaggaagggaaccaagaaaagggagtggagtaagaggattttcttgagacgaaaaaaaaaaatcagagcatccaggtttctaaatttttctttgatcagactgtttaaagacaacatcacaaacttcagatagagagtttgtggaacccctttttgtttttttcaattttcagttccatttttccaaaccatctgacacttgctcctttatttgtttccacagttgacgtgcggctgccgttccaggccgagatgttcatccagaacgttatcctggtgttcttctgtgtgggaatgatcgcaggagtcttcccgtggttccttgtggcagtggggccccttgtcatcctcttttcagtcctgcacattgtctccaggtaaataggaagcgttcatgtctgctggggccacggagaagcctcagttgctgggtaggtgctgtgacacggagctcattctctctccagggtcctgattcgggagctgaagcgtctggacaatatcacgcagtcacctttcctctcccacatcacgtccagcatacagggccttgccaccatccacgcctacaataaagggcaggagtttctgcacaggtttgtcctgatgggggctagaggcctcaaaggggagtcagcatcccagcgtttgatacttgtccgggaggctcttcaaggccagagatggggattataaacctcattaccaagggtattcatgatttaatggaataatctctgattaaaatccaattgcttggcgggactcctttctgagcaagtgagaaaacagaaatacagatttgggccgcatgcggcatcacgtgcctatagtcacagctactcaggaggctgaggctggaggatggcttgagcccaggtgttcaagtccagcctgggcaatatagtggaccccatctcaaaacaaaatacaaggaacaaaccccacagattaggagtctattggccttggccctgaaaagctatatttcatagagttttgctttttcttttaagtagtaaaaggtagtcatgacatttgagtagattttatttaagcatcgagtattgtttatttgtgaaacttatgtgcattgtcattgtggagctttgtattaataagagattggaactaaaatgttcttcaatataggacaggttgaataagctatggtatatccatagagtactatgtggcccttaaaaagaatgagggagctctataggtactgatagggaatgatctccagcatatattagtgaaacagcagagtacagatgtgtgtattaatatattgtatgctacctttgagtatgtgtttttatgtataacatttagaatatcaggctgggtacagtggctcccgcctgtaatgccagcactttgggaggctgaggtgggcggatcgcctgaggtcaggagttcgagaccagcctggccaacatggtggaaccttgtctctactaaaattacaaaaaaattaaccaggcgtggtggcaggcacctgtaatccagctactcaggaggctgaggcaggagaatcacttgaacccaggagacaaaggtttcagtgaggccagaccatgccattgcactccagcttgggcgacaagagcgagactccatctcaaaaaaaataaaaataaaaatttagaatatctctgaaaggattaaaaaaaaaacctgttagttgccactggaagggagaactgggtagctggaagatgggaatgagacagacttgacctttcatggtaaacctttggtaacttttaaattttctattctgtgtatatgttgcctattgcaaaagttgggtaattatttttagagagaaaatttagaatagaaagtttagaaaaaattattttcaaaatgttaaatgactcagaaaaataattcctaaactttaagcagaaaagaaagtgaaatgtactaaatacgtacatgtgtatatacctacacacagtaaatgtcagtgcattgaaaaaaactgctgggaggaaatgcagcggaatatcaactctggttttaacagggtgatgagattactggaattttacattttcctatttctattgcattttctaaattttctctaaagattacatattttattggaaagaggaaaagtgatttttcaaagcaaagcacatctgcgcagcaaaacttcctgctctggagttctagtcgtacatggtgcactgagccttcagaggggtctggtctgctctctgggacccctactgatggccgtgccatgctccttcagtagcagcagtaaacattgcctgagtcccttttgctgtggtttagcttgcttctcctggtgcttggctccatagctggggaacaagtgccattctgcatggtggcggcatgtgcacacacttatggtgttcccatattcactctgagtttctttttcctcgccttgaaccatttctgctgttggcgtttgtaacctttccttctttcagaaaatgccttctgacctaagatatttttctaaagtttaacacaagcctctttattcagtctcttttcccatgtttactctgtgctgagatagatgttttccataacatctttaataggatttttttttgtttttaaagagtaactaagattagaaaaacttaatgtcctcctatgcatgcggcctagaatacctccagaattcctagaataccctcctggagtttccagggcattctctcagttagaaacaggaagtatttaaatacgtgccctccatcatctgattcgctgaagctttgtccatgcgcggggttgtgtagtactttctttgcccattaagtgttgtctttctcacagataccaggagctgctggatgacaaccaagctcctttttttttgtttacgtgtgcgatgcggtggctggctgtgcggctggacctcatcagcatcgccctcatcaccaccacggggctgatgatcgttcttatgcacgggcagattcccccagcctatgcgggtctcgccatctcttatgctgtccaggtcagtctctgggataggagcgtcatctttgcttgtttgagcccttcctctgctgacgtaaaagagggatgattgtggggggctccaccctgagccattatttcacctctggacccctagaattgctcatggtctgatttgaccgtaacaatctggatttgactggggcaggtagggataggagagaggtaagtgtggaatccaggaataaaggaatcgaactctgttgcatgtgtgtgagaagtagatgctgttttcttcaaaaagaaatatgatcttgaaaatagtttcttaattgtgggtttctgtgttcaccaccatttcatctctggcctctttctagtcttctaagaaatgttatagactcaatatgcttcttacgtgcattttcttctcagggccctgattttcccaatactgttatatacataaaaccttctagcccctaggggtgattgagggtcttcaaatagctcagagaatagttgagaacttgagcactgactagatattttaagatgttgagtgattattattaccctctaaaataatggtattggaattatgtttttaaggagtctatattttagagaggtacaagctgaaatatttggatgagataagctctctgcgatttgcttccaaataatatggggggtgggggtaggaatggaagggaatacagatgaaacaatattgactgtaagttgatcatttttatggtagagttttggtacctgggagttcattatactactctttctactcttgtgtgtttgacatttttctttattgaaaagataaaaataaatagtcaaaggaaccccagagatatgtgtcttcacagataccccgagatgtccagccacattttgcaatttacttgacaactggttggggaagacaatgcattatatagactgtttttagactccgcagtctatggagcacaggggctccagactcactcatttcccagcattatgtatctgatttgactttcctggaaacattcttactagttgctcataggttgatatctccatttgttgtgactcccacaaacaggctcagatacaagtaggaagtccagaagtgaatcagttgcagatatgtgttattggaaatgtaaagatgaatagaaaggctttgggtacaaggaagtggttccagcagtgccatgatactgcccgcattcactgagcattgcagttgatggggtaacaggtatgccttaaaagccaagagaatgactaggtccctaagaccagctgctgcatgtgctcagttcttagtagtcctctagatgaaggaagttctccagcattggcctggcgtgtattgataatgaattatctctttgattgttgttttccattatcagttaacggggctgttccagtttacggtcagactggcatctgagacagaagctcgattcacctcggtggagaggatcaatcactacattaaggtcagactgctgtaggccttttaccgtgatctgactcctcttggagtcggtttaccctttgctgcctcagctgggtgtacaaggaggaggcttgtgttctctgcctatctaatcccacagaatctccagcaatctctcaaccgtgcttggaatgggaaagagattaccgtaagagtttctaagtatatttgtaaattatgtcgagctgagaacttcattggctaatttccagaatgttcagaaccttgtcagttcagcttaactgactaatggagcattttccttacactgtttaaaaccatgtattgttttaattcttactatgtccaattgttcttaatcagggatggccatcaggaccccctgctgagcttttggcaggacaaacgtggcctcatctctggattctgttgcagtggattggggtgggacccaggcttctatagtttgaaaagctccatagcgaattctaaactgctctcccaacttacaaacgagtaaatttaattgataccagagtatccagctcttcccacctttccccaggaaccccttccgtcttgccgtgggtggcaggcatcttgctgctgtcctaactggcactcttaaacaatttcctacagggatgtcttaatccatttcacactgctgtaaagaactacctgagattgggtaatttatgaagaaagaggtttaagtcactcacagttccgaaggcttaacaggacgcatggctgggaggcctcaggaaacttacaatcatagcgaaaggtgaaggggaaacaagcacatcttcccatggcagagcaggagagagagagaagggggaagtgccacacactttcaaacaaccagatctcctgagaactcactgtcacgggaacagcaagggggaagtccacccccctgattcagtcatctgccaccaggcctctcccctcacacatggggattattatacaattcgagatgagatttgggtgggaacacagagccaaaccacatcaaggggtgtccaatcatttggcttcccagggccacattggaagaagaattgtctcaggccacacataaaataatactaacgatagctgatgagcttaaaaaaaaagatggcaaaaaaaagtctcataatatgttaagaaagttgacgaatttgtgttgggccacattcaaagctgtcctgggctgcatgtggctcaagggccacagattggacaaatttgcttataaagaagcagcatcatgagtagttagattctcaaattgaactcaattcttaagagttatctattttattgaactgctgtgagactttacaagcatctgtgtcattgtttatatgtgaagagtatattctgagttcccaacacttgactttgaaacatagttttgaaaagttagctttttttctttttttccttttttaatttattttttatttttttattttttttgagagagggtcttattgtcacccaggcttgagtgcagtggcatgaatacggctcagtccagcctcgatctcccaggctcaagtgatcctcccacctcagccccgccaagtaactgggactacaggcatgcgccactaggcccagctcatttttgtattttttgtagagataggtttcgccatgttgtcccggctggtctcaaactcctgggctcaagcgatctgcctctgcctccacctcccaaaatgctgggattatagacaggagccatagtgtccggcctgaaaaattactctttcaattgggaactgagtgtacgtaaactggattctctaatagagatgtgcttcactgattgttttgacagtgagcctcattagtggtagaatatttcttaagcttacaaatgaataactttcttattctcagaaaggatggcaggtggctgcccagtgtatctagtaatagctcttctttcatgtttagaagttagcctctttgcacactgtcctggtgtgtagatgacccgtgtgtgtacatatgtgcagtgtttgagttaatgttatggttggcgagagccttgtgctggagaggttaggattacggtcagtggtggtacaaagtggaccctgctgaaaccggtcacatttcagaggcctgccctcccactgactgtcccaacacagagtccttccagcttggagttttagactttaggcttaaccccccagagtgctacagtctttggcccttacttccccccataaggctatatactccatggccaattgccagagagttttaaaagatcatgagatatgattgttgatgataaaaattacccaagcagttatatcacagcattttgagctggaatagattctcaagatcatctaatccagtccccacaatttgcagataagaaactaagatgcagaagaagtggtgatctgtccaggtcacacagtggcaaaattagaattagagtctgtgtctcctggattgaccaagacatgccagaatgccaggatccaatcagatgttcagtaaatattagttttcttcctttggatttaagccaatgattatcaaatggtagaatcctatctcaaagaatttcagtaaaaactgctgtggtggaggggtggaaggcctcatgtctgcccgtgttggttttcctttggcccccaaggcagctttgtggaatagttccttgagacaaaaggtagtctgaacaccacttccctccccaggctgctgctagtagccatgacacttagccattgtgctctgtctctgtcgagtttagtgatgataagcatttacttccaagggattctttcctagcaaggtgacagggtggcagctacctctgtgtggctactatggttgtcctggttttatttctctgtgacaaagcctgcagctccccaagaatctgtggtcagtctgaactggccacccttgtctccccagactctgtccttggaagcacctgccagaattaagaacaaggctccctcccctgactggccccaggagggagaggtgacctttgagaacgcagagatgaggtaccgagaaaacctccctctcgtcctaaagaaagtatccttcacgatcaaacctaaagagaagattggcattgtggggcggacaggatcaggtaaggatgtgcaaagccttctttgaatccattggaacgtagcagtttatgaaatatcactttcacccctttaaaccggatccttgtttgtttgatgagcaattagtgtctcagccccctactgaaaccaattttctaggtttattgttgaccccactttgatgacattgagtgcttttcacagtcataaatgtgcacattctcaatgcagaacactggggcacacagccaagtacgaaagaggagcagcacccacaactctgctacccagagagaagcactggtaacattttggtagctatcttgttaggcttcctctagtaatatgtaggtttacaaaaatgaggtcattgacacatgctgtttcatggccttcttttaaaactatcagtaggctgggcgcagtggctcatgcctgtaatcccagcactttgggagggcgaggcgggtggatcacctgaggagttcaacaccagccagaacaacatggtgaaaccccgtctctactaaaagtccaaaattagccaggtgtggtggcacatgcttgtaatcccagctacttgggaggctgaggcaggagaatggcgtgaacctgggaggcggaggttgcagtgagccaagatcacgccactacactccaacctgggtgacagagcgagactccgtctcaaaaaaaaaagaaaagaaatgcgtaactgtagatcctttagatttctagggtcaggacttgagtaatttacttctttttttttttgagacaaagtctcactctgttgccaggctggagtgcagtagcacgatctcagctcactgtaacctccacctcccaggttcaagcgattctcctgcctcagcctctcacgtagctgggactacaggggcgccagctaatttttttgtatttttagtagagacagggtttcaccatgttggccaggacggtctcgatttcctgacctcatgatccacccgcctcagcctctgaaagtgctgggattacaggtgtgagccatcgcacccggccccttttttctcactttcgttcctgaattgcattccaaagactgaacttgtcttcttttactgtcctttttatccttgtataagaggtatctttgattcagttttcattagttttctaggctccatgcttctttggcatcaaaactcttctagcttttttccttgccattaaaaaaaaaaaaaccttttgtcttttctggccaattgattttaaagaactttctaaggaagaaaaggaaaaagccatttcctgctttctgtttgagggaattacttcacgtcaaaacaagacattgctccaggtctttcatgctggaagggaatctttagccaagcagggtgactctccccaagcctttttactgttctctcccttgagcccatctgctgcattcgtccccaggggtacactgctcccctgaaagctgactgatgtcctttgttatgatttccctttaacacaggtgagataggccaaaacaagcaccacaacttcattaaacagtagttagtgacagaagagaaacaagaaaaagaacatagtggccaggtgcagtggctcacgcctgtaatcccagcactctgggaggcccaggctggtggatcacctgacgtcaggagttcaagaccagcctggccaacatggtgaaacctcatctctactaaaaatacagaaagttagctgggcgtggtggtggatgcctgtaattccagctactcgggaggctgaagcaggagaatctcttgaacccaggaggcggaggttgcagtgagctgagattgcgctattgccctccagcctgagcaacaagagcgaaactccatctcaaataataataataataataataataacctgatttacactccggttctaatagggcttcttccaagtttcacgggtaacttggaaactctcctgtggtcatgtcagtcaaggacaccatcttgaggacttcactgcctttcttaccagcacattccatcagtgcaaaggtagtcagattcagaggactctaaagtcttccagtccaggtggtccaaacctaggcaccttttgttaaactggaacaacttgacccattgtttcgggcaccattccttccttagcttagatcttaaagccctgcctcggcccagagggaatgtctcctcccctcctatctgggaaaggggccagtaactgagtcccccaaccctgaacagagtcattcattttttttttttttttttttttttttcctgagacagagtctcagtctgttgcccaggctagagtgcagtggtgcaatctcggctctggagtagctgggattacaggcacatgccaccatgcccagctaatttttttttttttttgtattttttagtagagacagggttttgccatgtttgccaggctggtctcaaactcctggcctcaagtaatccacccaccttggcctcccaaagtgctgggattacaggtgtgaaccgctgcgcccaccggcctggagtcactcatttctaggaggagaactatcctgctagacggaccaggtttcctaactcgtttctggtagaaggatgtgaggattgttgcattaggaagatgggtcctaatacagctttttccaagtttcctgggcgttacttcttccaagtcttatgggtgtttttcaggttcccattaggctgttagacagaggtatgcccagggggtagatcccgacagtggggtcgtggctgtagacactggggcaaggcaggctgtttgcgccctccatgagtgctgaagagacagcatcgtggtgatctcgatgaggccctcacaagaggtctttcatgacatggtggcacgagaaaggtaggagggtcaagaaccaggcgtacagccaaggaaaagtgattcaacagctaaaaccctgtagttctaaatctaaaccatggaaccaagttgcagaaaggtagacaggactatggcaaacttcttttctttttggctctgtagagagagcaccttttaaatgtttatatcctttgacacagtaatttcagttctaagattctttcccaaggaaattgtctgaggtggcagtaaagtttcagcactaagataataggacataacattattataagttttacataaactaaatgttgacccttagagggctggctgaacaagaatacatgcacatgatggaatgcaaccactaaaattttatcttgaaaatttttttaaaagatggttgactgagtgttatacaatgcttttgttttgttttgtttgaaacagagtctcgttctgtcgcccaggctggagtgcaatgatacgatcttggctcactgcaacctccgcctcccaggttcaagtgattctcctgccttagcttcccaagtacctgggattacaggcactcgccatcttgcccagctaatttttgtatttatagtagagacagggtttcaccatgttggccaggttggtctcgaactcctgacctcaggtgatctgcccgcctcagcctcccaaagtgctgggattacaggcatgagccaccgtgcccggccaatgcagtgttaagtgaaaaaagcaattacaatattgcatttctgatatgatctcaactctgaggaaagaccgaaaggaagtgtgcctaaaatgatagaagtgagattatgggagattgatgatgtcatctcgtattacttatgtaaacttttcaaatgaagatttggttaacctgttctgctgattactgtaataacactgatcccccaaacctgcttctctgccatagtttcctatcacagtagggccattgacagctactcattgagtcgaggcaaaacctccttcccgtatgtgtttatttatccctggaacttcttcaattccccagctgctgctgtggcaacaggaggccttgtcttagtctctctctcagccctaataagggggtagggagaaaaaagacatcttgtcctctggtttgcccctcaactgcttgctgtaagatctctgttctcctaactttgcctaagaagcattcagctctgtgcacctgttcctaaggtgaccaggaggcatttttccattttactctcatgaaaatggaatggtcagccaggcgcggtggctcacgcctgtaatcccagcattttgggaggccaaggtgggcggatcacgagatcaggagtttgagaccaacctggccaatatggtgaaaccccatctctactaaaaatacaaaaattatctgggcatggtgacgcgtgcctgtagttccagctacttgagaggctgaggcagaagaatcacttgaacccaggaggcagaggttgcagtgagccgagatcgcaccaccgcactccagcctgggcagcagagtgagactccgtctcaaaaaaaaaaatgaaaatggaatggtcccttcccttccttctcaggctgaagctgtgtaatttgaaggtgtctgcctggtatctcaggaaagttaattgcatttttctatcattttatacattatctcagttaatcagttgaaataacaactgaatagaaatggaaaaatagttggcattgccctgaggctaaaccagcattgtcctcacagactttgctaacagctcctctcttgcatgtcttctgactcatcagggaagtcctcgctggggatggccctcttccgtctggtggagttatctggaggctgcatcaagattgatggagtgagaatcagtgatattggccttgccgacctccgaagcaaactctctatcattcctcaagagccggtgctgttcagtggcactgtcaggtgaggacctgagcacctgcatgtctcgtgcgtcacttagaggccagatgagcatgtgggaccacatgatgctagcaccgccccctgggaccatgagctcaccatctctagtctggtgcttttcccactgcaccatgtgcttgctggtgcagaagggagaggcagcaccactcacaatgccacttggttgactgaagggtgcagggaggcctgcaacacagtgctgaagaggccagagaggtctgggcccagggctctgctccgtgacttcggacaagttatttaaccactcctgtgcctgtttcctcaaccataagatggggatgctttaaagacctgttgctgtgaaggttgaataagttcatgtaaattatataagcacagggcctggcaaatggtaagcattcagcaaatggtggctgctgtcatcagcctcattgacatcatcctcatctgccccccactccattctgtcatctctcctaggtgcgctgaaagttgcagtttttttgttctgtttgtttgagatggagtctcactctgtcacccaggctgaagtgcagtggcacgatcttgactcacggcaacctccgcctcctgggttcaagtgattctcctgccacagcctcccgaatagctgggattacaggcgccctcccccaggcccagctaatttttgtatttttagtagagatgaggtttcaccatgttggccaggctggccttgaacgcctgacctcaagtgatccacccgcctcggcctcccaaagtgctgggattacaggcgcgagccactgcacctggccaaaagttccagttccaatggtggctttcaggcattattactactcatgttatttcattttctactatcttcccctacctttgatactctggaattatgtcactttttgaaatctgccaggttgccagagataaaatccttcttcttggcctattaaaacagtccaaggagaaagcatcacattatctttcctaagcttacctgatcctacccttagccttaagcttcagcctcctgaaaacagtggatttccatcatttgtgtccctgtctattaaaaaatcattctggcctggcacggtggctcacgcctgtaatcccaacactttgggaggccaatgcgggcggatcacgaggtcaggagattgagatcatcctggctaacacggtgaaaccccgtctctactaaaaaatacaaaaaattagccgggcgtggtggtgggcgcctgtagtcccagctacttgggaggctgaggcaggagaatggtgtgaacccgggaggcagagcttgcagtgagctgagatcatgccactgcactgtagccagggtgacagagtgagactccatctcaaaaaaaaaaaaatcattctaaaagtaatttttagcagttttcagaaaaattggtaccaacctaatttcaaataatcataggcagtgttcagacttgttttaaaactatcccctccacctttggaaatggcattttgaactcaaggaactttggtagatatcttagtctgctcaggctgctgtatataccaacataccatagactgggtggcttaaacaacagaaatttatttctctcagttctggaggctgggaaggccggggatgggtgtctgctgagggccgtcttcctggtttgcagatggttgtcttgttctgtcctcatgtggcctttcctcggtgtgtgcctgtggtgcatgcctgtggtgtgtgcccgcggaaaggagagctcttgtgtctcctcttcttgaggccccaccctcatgatctcatctaaacctaatctcctccttacagccccacctccaaacaccatcacattggggtcagtgtttcaacagtttaattctaggggcacacaaacctgtagtccatagcagtaaatcagcagaattctcacctgtgtttgtgtagtgtcaacaccctagagtatgtttattttggtgtttctgtaattgaatctggacagcatgcactgtatctgtggttgataataaaccattctctttgggtattgaggtaataaggtcagacaagcaatatcagaagaaaattagaatttattggtcaggcgtggtggctcacgcctgtaatgccagcactttgggagggctaggtgggcggatcacctgaggtcaggagttcgagaccagcctggccaacatggcgaaaccctgtctctactaaattagccaggtgtggtggcccatgcttgtggtcccagctactccagagctccagaggctgaggcaagagaatcacttgaacctgggaggcggaggtggcagtgagctgagatcgtcccactgcactccagcctaggtgacagagcgagactctgtctcaaaagaaaattagaatttattgaagatgaaagcctaaaaataggccgagtgcggtggctcacacctgtaatcccagcactttgggaggctgaggcgggcggatcacgaggtcaggagtaccagaccagcctggccaatatgctgaaaccccgtctctactaaaaaatacaaaaattagccagtcttggtggcacacacctgtagtcccagctacacgggaggctgaggcaggagaattgctggaacctgggaggtggaggttacagtgtgccgagatcatgccactgcactccagcctggacgacagagcgagactccatctcaaaaaaagaagccattgcttggccaggcgtggtggctcatgcctgtaatcccagcactttgggaggccgaggagggcggatcacctgaggtcaggagtttgagaccagcctggctcttcccataaatctccctatttttagatgccacaggaacaccttgaaaaaaaaaattggccttacaatatttggctttggccataagaactagttttttaaatcatcatttggaagagaattaagaaataaagcacgttaaacttgagatttcttttgaaactgctgccaccaagaagcctcagttttaatttaacaattttatagcatttcatttgggtttgtgaaatgggggcttctagagttagtggttaacaactgaccatgaggccaggtgcggtggcttatgcctataatcccagcactttgggaggccgagacggaaggatcacttgagctcaggagttcgagaccaccctgggcaacatcgtgagacgtcgtctctgcttttttaaattatataaaatgttaaaagaaaaagaattgaccatgggcgcgtgcagctggtgtgggtagaacatcgtgcgcctgtagctttagtagaattggaaccatttgtctccagagaaagaaatgttgactgctttgtggctagctcagtagttggtacactgctgtcctgggtttgtagctactgagcttaggtgcagcttaggaagtcagctgtgcaaagtgagaaaatcatttcagttaaatttttgccagctctaattttggctttttagtctgtagtagacactgaggaagaattaaatgctggacttgtcttttatcccctaaggtttccttttatcctctcaggtttgttacggatcccagagaatgttcagctcttggtattcttttgtttttgagacagagtctcgctctgttgcccaggctggagtttcagctcactgcaacctctgcctcctgggttcaagtgatttgcgtgcctcagcctcctgagtcgctgggaccacaggcatgggccaccatgcccagctaatttttgtatttttagtagagacggggtttcaccatgttggccaggctggtctcgaactcctgacctcaggtgatctgcccacctcagcctcccaaagtgctgggattacaggtgtgagccaccgcgcccagccagtattcttttgctttagttagaagatagaaagcctatgatgagtttcccaaggcacaggcaggataaataagctgtttcctcagctgcctcctagagactctgaatctggaaaccgcgcctccaccaccattagccagtattgagggtgggtacctcttcttgagatacctgtaaacaattaaaacttgaaaggaattcttagaggaaaagcaaggtaaaaccaaaatcaaaccaacaaaactcagaaagtcacaagataaaaattgttgagttgttctgtgtacaaatataatctaatctaaatcataggccagataatttgggaccacaccccttccttagattagccagaatgtcattctagtacctgcatcctggccctcctttatctgcctgtgtgggcttgagctctccagcctgtgtttctgcagctccctattgttttgccctcatgattgcctccaagaagagaggccccttttcatccaggccttaaaacacttttgctggcctctgtctcatggccctagctttccccaccttctcccagagctccctgtgcttcctggacccaggaaacccagccctggcctctgtcctatcccccgcagctggagtgtttttcatcctgaggactgtctggagcctggctaggctgacagtgagctgtccccagctgtcactctggtatgtctcttgagtcttcgtcccctgtgagtgatgggtaccttgtctacccggagcacttctgcctggtgcccattcattagcaagaaacagtgttctcatttcttcttcttcaggtgccttctccttttgatctgctcattaaatttttttttttttttttttttttgagacagtctcgctttgtcacctgggttggagtgcagtgacatgatctctgctcactgcagcctccacctcccaggttcaagcagttctcctgcctcagcttccccagtagctgggattacaggcacctactaccacacctggctaatttctgtatttttagtagagatggggtttcacatagttggccaggctggtggtcttgaactcctgacctcaggtgatctgcccacctcggccttccaaagtgctgggattacagccatgagccaccattccccacctgtcataaccatcttaattgtatttaacaaatgctcaaaacttcataagacagacaccattgttatgcatattttattttaccaaatagtgaggtttcactatattgcccaggctagtcttaaactcctgagctcaagagattctcccacctctgcctcccaaagtgctgggattataggcatgagatgccgcccttggccattattcctgttttatatagatgatgaaactgaaatccagagagtgagagtaatttgcccaaagacacacagctaaaagtggcagagctaggatttgaacccaggctggccggctggctctactcattacactcactgcattgcctcctgaagcgtgtgtcacgaccccactgttaaccacgaccttgatattccatctctccaaaaaacagttagacgtgcctctttgtggatcttgacctttagttacatttcttttcccagcatcttcaaagtctcatctgccttcctcatctcaaaaacgaaaaaagaaagtcacacaatctatgccgttctctctagtatttttcatttgctctactttttcctcttaacttttttcacctaatctgactcttaacaactaaaagccaaaatcagtccgtatttctgcatacctcagaataagatttccttttgcttcctgatagaagaaggtatgtgagtcccaaaatctcctgctctgaaaaccaaggctactatgaagcacccagcacagatgacagggcagcatggtttactgcagtgttttctactataccgagggtgaattgctgtgttgtctcacactttgggagatattcttggcttcatttagcagtggtcaatgttgactattgctaaaaataaaatatgaagaaccaaagatgaaaatgtacctttggcaagatcaggactccaggggttctgattgttaaaaataattgccctcatgttcagacacttttctatccaatcacttaactgaatccttttgattaagtggatgcataactttgctttcatttctgtctgtgggtcagacccaggaccatctggcttctctaatgaggggagatatttttccattcctgattgagctccctgttgaggttggtctggtctgccttactgtgtaccacctacgagtgtatgcaaatattcattttctatctggaacccattgtttagtggtctgaggctccttcagctggtgtgatggacctgggtgaattgaatgttaagcctgggctgggcacagtggctcacgcctgtaatcccaacactttgggaagccaaggcggatggatcacctgagacctggagttcaagaccagcctggccaacatggcaaaaccctatctctaccaaaaaatacaaaagttagccaggtgtggtggcgcacacctgtagtcccagctacttgggaggctgaggcatgagaattgcttgaacctggcggggcagggcaggggttgcagtgagctgagatcatgccactgcactccagcctgggtgacagagcaagattctgtctcaaaaaaaaaaaaaaaaaaaagttaagcctgttgtcgtatttgcccatagaaaatctgatagggccggctactcagtgggcaggagaccgcgcttttgtgtacagcagttctcgcttctccatggtttcactttctgcagtttcagttacccatgatcaaccagggtccaaaaatattacatactatattttgcaagagacagaccacagtcaaataatgttcattacagcatattgttataattgcttgatttcattattgttaatctcttactgtgcctaatttataaattaaactttatcataggtatgtatatataggggaaaaaaacatagcatttatacggttcagtactatttgtggtttgaggcatccaccggggctccctggagcatatccttgtggatgaaagggggctccatgcctgctctttgatccagaggcatctgatggacttacttgctgtatgtgtttcctggggctgtcataaacagtttaagccacaaactggatggcttcaaacaacagaaatgtactatctcacagttccgggggctggaagtctaaaatcaaagtgtcatttgggccatgctgccactgaaccctatagggaaggacgcttccttgcctcttccagcttctggtagttgtggccatctttggcattccttggctttggatgcatccctctggcctctgcctccattgtcacatgatgccctcccagtgtttctctgccttcacgtggccatctctcataaggaccagtcatatgggattaagggcccacccttctctattactctggtatgacctcatcttaactaattacatctgcaaattaccctatttccaaataaggtcacattcttaggtacttaggtgtcttttggggagacacaggtcaacccattaaactgtaccatattaaacaacacttcctgggccaagggtagtgagaagcgagcatgttccaagcgggaaaaacgccgtgcaaagggcaagaggcgctggagagcaaggcgggtcagaatctcccaggagatcgagagatgcccagatagcaggaatgaggcggtgccggcctgctgtcctctcactagagttctgtgataatgacgtgattgtatttgcatgcctgtaattagtaaccccagatatggagacaggtgtgtggcatagagtaaaagtccatgtttctcccagagagtttcctgtttcccacatgccaggcataattttatgagcaaagcaaatatacttttcagattactagacctccaaatgttatgtgtagatcaagacaagccgtccaaaattactgtaacatcccagttttccaccaaatacctgttccaccaccaattctccaccctcatcctcagtggcaaagataattttctcctgtcctaaacatttctagtcctggccgggcacagtggctcatgcctgtaatcccagcattttgggaggcccaggtaggctcatcacttgagcttgagcactggaatttgagaccagcctgggcaacatggcaaaaccccatctctacaaaaaacacaaaaattacgtggcatgcgcctgtaaaaaaaaaaatttctagtctcgttcttttggtatcaactctgatttccttgaggtagatactgttggcacagtaagcaaaaatggtccccaaactggtcttctgtgccaggaaaattcctttttcttgacttgtcctttattctttctctccttcttcctcttcccttctactggatcagtttctttccctggtcaggccagctgtcctggagccccatactcaattacagggttgtgaaccaggtaaaccaagagaaagagggtgcatttctaagtttgtacgtatggagagatttattttttattttattttattttatttattgagatggagtctcactctgtcgcccaggctagagtgcagtggtgtgatctcagctcactgcaaccactgcctcctgggttcaagcaattctcctgcctcagctttctgagtagctgggattacaggtgcccaccaccacacctggctaatttttgtatttttagtagagacagggattcaccatgttggccaggctggtcctgaactcctgacctcaagtaatccacccgcctcggcctcccaaagtgctgggattacaaacatgagccattgcacccagccgaaagatgtattttaacaaatacacgcacaggaaaaaatctagaaggatatttgccgatatttgcatttataaattgttctataactagtattatttacatagtaaaaatagtaaaagaataaatcaagttttatggagctgaggaggtggcccagtgtgctgtcagagctcccatctgtctggttgtggaatgagccgtctgtgaccatcagggtttggagtcttctctccctatgcatgtgtgttaaacatcttccacagacagcctttgccaatgggtcgcttagggtgggaccactgagaaattcctgtgtttctccctagatcaaatttggaccccttcaaccagtacactgaagaccagatttgggatgccctggagaggacacacatgaaagaatgtgtaagtgaagagcttaggggaagccgtgctgagatggtgagggtggaagcacagcagtgcccttgccacaccccgtctgctctggccgtgcctccaggatgcctgtggacaaaggcttcgtggcagggctctccaagtctttcagatacctgggaaaagctgatccctctcaaccccaccgcccacactgcctacggtcatattggccttgcactatccattgattgaagatagtaatgacaactacttagaattaagtgatgcttttaatttattagtcataacagtgtaacatactttgaagcgtccacatatacgcaaaagatatataacgtggccgggcgcagtggctctcgcctgtaatcccagcactttgggaggccgaggcaggtggatcacctgaggtcaggagttcgagaccagcctgaccaatatgatgaaaccctgtccctactaaaaatacaaaaattagccgggtgtggtggcatgcacctgtaatcccagctactcaggaggctgagacaggagaatcgcttgagcccaggagacagaggttgcagtgagcgagagcgcaccactgcactccagcctgggcaacaagagcaaaactctgtctcaaaaaaaaaaaaaaaaagatacataacatattgagtctgcagaaagcacacagtgtgcatatggaccatggaccacagacattttgggacaactcagtaggccctcacaggccctcacgagcagctgcagtctacaggttgataccactggcctagggtgaggcttctgttatgcctgggttgagtcaggatccaggatcccctgccctaattcaactattagtagatgagttctgttttttcctctgctctatcgggattcttctcatttgaagaataagttctgcagcttacaaaaaatgtttcacaggcacgggcctacggctttggacttcagaaggagagtacttttccttactatactatttcctattgcaagaccatattttcagaaccaaaacttaaggcccactatgtgactggattttggggacatgaaagcgttgggatttctgggatgttttaatggtataaagctaacagaatagtctattggaatcagggactgccttggaagtgggtcctagcacgcatgatcagtacacctgcaccttcattccagatgagacaggttcttggctaatagttctttcatcgctttcagaatcatttctttctgtccttggattttcaggaaattcagcttagtttcttacccctctgatctctagtttctttctccctagattgctcagctacctctgaaacttgaatctgaagtgatggagaatggggataacttctcagtgggggaacggcagctcttgtgcatagctagagccctgctccgccactgtaaggtaaggcagtttggggttggcagcagcagagaatgggaatgttttagtgcagccttgccctgacacactggggtccaaaggtattcctggctctgatccctgttggcactttctaagagcatgaccagagataactctaaccctgacacaatttgggtatattggttctggggagggagaacagggttgctttgtttttaccttcatccaagaccaacttttgtttctggccattgagtagttgtacgactgcaaaccatagacatagaagattttttttttttttgagacggagtcttgctctgtctccaggctggagtgtagtggccaaatctcggctcactgcaacctccacctcccaggttcaagtgattctcctgcctcagcctcccgagtagctgggattacaggcgtgcgccaccatgcccagctaatttttgcatttttagtagagatggggtttcaccatgttggccaggatagtctcgatctcttgacctcgtgatctgcccgctttggcctcccaaagtgctgggattacaggcgtgagccaccgtgtctggccgacatagattttaaaattgcaagagactttaaggtcatccaatccagccccttcattttataaacaggaaaagaatgtccttttgtccagtatgttaccagccatattggattcaagggaaaaaaagaattaattgtacatgctcactgtcacagagcatgtaggggcaagtatttgattaaatccgtggttttgttttgttttgttttgtttttgagacagagtctcactctgccacccaggctggagtgcagtggtgtgatctcggctcactgcaacctccacctcctggattcgcgcgattctcttgcctccgcctcccgagtagctgggactacaggtgcgcgtcaccacgcccggctaatttttgtatttttagtagagacaggttttcaccatattggccaggatggtctcgatctcttgacctcgtgatccgcctgcctcggcctctcaaagtgctgggattacaggcatgagccactgcgctcagcctagatcagtattttacaaatatgctgttttggaaatcaaggcaaacatggttttgaaattgtatcacttctaagcaaaaggatgtttttacatatatgcgtgctttcttagaaaaaaaaaaaaaaaacaataggctgggcacggtggctcaagcctgtaatcccagcactttgggaggccgaggcaggtggatcgcaaggtcaggaggtcgagaccatcctggctaacatggtgaaaccccgtctctactaaaaatacaaaaaattagctgggcgtggtggcgggcgcctgtagtcccagctactcaggcggctgaggcaggagaatggcgtgaacccgggaggcggagcttgcagtgagccgagattgcgccactgcactccagcctgggcgacagagcaagactccgtctcaaaaaaaaaaaaaaaagaaagaaaagaaaacaatagatagtgtaaaacttaaatgaaatacattttagtaaaatctagattaaccagaatgctaaaggaatttaatcgagtttctttctcctctgcttctctggcagattctgattttagatgaagccacagctgccatggacacagagacagacttattgattcaagagaccatccgagaagcatttgcagactgtaccatgctgaccattgcccatcgcctgcacacggttctaggctccgataggattatggtgctggcccagggacaggtaccgagtccttcaggaactttggcttggcatgtctgggaggaaactggcccctggcagggatggactgattgccatctttgtagggttctgggcattcagataagcacttgcagcagcgctatttacttgctattgggagggatacagcctccgaatcacaagattactcaggcacctctgatggggttctcattttactttactaatttgtccttttgttgcttgtgagtagcgacactgacttaagtcagagagtacatgtacttagtgattcattcacatacacaatgatcacccctggcatacttaggccagagagtatagatacttgtgattcattcacatacacaattatcatccctggtacatgtacttagtgattcattcacatacacaatgattaccgctcccggaggcctactgagaccagccagcacatgtttgcttttttgcaatcacgcagcggcaccaaacttcttaccctgttgtttcaggcgttcccacagcctggccctagccttgccttcttcattttccactcttcctttgcaggtgcggttggctatagacatcttgcattctccaagctttttatctgtctttagtcagatagttccatctacctaaaaggccctttgcccttctctctcccatatccacctgctctcaacctgcctgtccctgaagaatgacatggcccagatgccaaagcctccatgaaaccccctggctgcctcagccgccctagactgtatctgtacctctcttgtagctcttctgtctcagttgataggaattgtgcaatgccctgtctccctagagaactccctgaacgctctctgagggcagagtcaccgctcattcatctttagggccccagcagtgcttagtactacagttctttatacaggtgatgttaagtacatttatgttagacaaatacctcttttgcatgcccctaggatacaagtaaattaataatttggaggaaatagcaagccatttataatgggtaacatgtcttctattgtagaagctcccacagtgacagctactataatagctacttctactgaatgtttactgtgtgtcaggcactgtgcttagtgctttacatataatctctcaacataccatcagtcatcacaacaacctagagaaagacatagcctggattctgctttacacatgaggagacaaagtctcagggaaagtccataggaagtggagtaggccgggcacggtggctcatgcctgtaatcccagcagtttgggaggccgaggcgggcagattgcctgagctcaggcgttcaagagcagcctgggcaacatgacgaaacgccgtctctaccaaaaatacaaaaaattagccaggagtggtggcacacacctgtaatcccagctactaaggaatttgaggtggaaggatcatttaaccctgggaggcagcggaggttgcagtgagctgagatagcgccactgcactccagcctgggtgacagagtgagacctcatgtcaaaaaaaaaaaaaaaaaaaaaaagcaaacagtaaaaattggtgggatttaaaaaaaaaggaagcggaggagatgggacaggactcaggccagcaaccgcactgccagcacactgtctaaattgtggagaaatattgagaaaaggttaaatagcgcaggttcagcctgggcttcaaagctgaattgagagaacttgggggctaaggatttttctcctcatcttgaaattattttcacactagtgttttttgtgactatctttgtttgccttaaactaagtgttgactgagattctgtcatacataagatacgttgagctactactttgtaagtaggtgttaaaatagagcctagtaaggtataatagatgggaccaagaacatcttctgggaaattctttttttctttttttgagccagagtctcgctctgtcgcccaggctggagtacagtggtgcaatcttggctcactgcaaccttcgcctccggggttcaagcgattctcctgcctcagtctcctgagcagctgggagtacaggcatgtgccaccatgcctggctaatttttgtatttttagtagacacagggtttcaccatgttggccaggctggtctcgaacttctgacctcagataatccgcccacctcagcctcccaaagtgctgggattacaggcacaagctactgtgcccagctggaaattttttcttaagaacacaaattgagacccctttctttcgatgggtggcttgatgttttggagtggggagcccattcactctttatgagggactctatccttctcttcccttaatttttttcttgctaattaaaatttccttgtaatttcaggaaagcctaaaaaaaaaaaaccacacacacaccagaaaagcataaaggcaaaaacaggatgataagccatttacccccagagacgagcattgtaatacactgacttaccccagctgtgtttttcttgcatctgcacacacagactccaacagatgggatgctctctgccgcagacacaaaataccagactaaaaggggtttggaggatgggattttgttatcccacatgggttggtttttgtgcagctcagcagtgtggggctctgtatcactctcagccagtactcaccttcccctgctggtacaggatgcctgctcaagcacccaaccaaaggaaggacacgtgtccaaaggaaggacacgcttatgttctccttgtggcctgtccactgagcaggacaccctctcctaaagcaccaaggagacttcctcttacatctccttaaacaaggttatgttccatgcctttgccctgtggcgggggcggctgagaaagttgagtacatgcatttcagcctctgccacaggaggtgggttctgccagcgtatcattcagggttctgctgccacatgattttccacggctacatagaagtccatcataggaatggccacctgactaagtcactccctgacttcctttttctcccctgacaactagacattctgagctcttccatttccctctataaggttagatcagcttgcataacaaaatggcatttgtctggtgtgcccttgacttgagctgcaacttctctcccctgcagtttatttattttattttgtttatttatttatttatttttttgagacggagtttcgctcttgttgcccaggctgggagtgcaatagcacgatctctgctcaccacaacctccgcctcccgggttccagcgattctcctgcctcagactccccagtagctgggattacaggcatgcaccaccacacccagctaatttttgtattttcactagagacagggtttcaccatgttggtcaggctggtctcgaactcctgacctcaggtgatccgcctgcctcgacctcccaaagtgctgggattacaggcatcaaccaccgcacccagcctgttgttttttatttatttatttatttatttatttatttatttatttatttattattttgaggcagagtctcgttgtgtcgcccagcctggcatgcagtggtacaatctcagttcactgcaacctccacctcctgggttcaagcgattctcctgcctcagcctcccaagtcactgggattgtaggcacccgccaaccatgcccagctaatttttgtatatttagtagagacagggtttcaccatgttggccaggctggtcttgaactcctcacctcaggcagtctgcccacctcagcctcccaaagtgttgagattacaggcgtgagccaccagcctcctgcagtttatagacctggttggttggttccttcactcccaaggctgaaggaatttggatttatgtgaaggaggtctggaagtcgttttctttttttttttttgctatgatactactttattaggcaaaaccacatactacaaaaatgctggaagtcattttctctgtcctttcccttactccctggatagttgaaaataaaaaaataaggggggaggtgcacgcagggctagttgaattgtccccagattctaccctcagagggcactggcacttactgagccgtggatcctctgaatcaccctgcatgacccagagctgtgtcctgacggcgtctccttcttttgcaggtggtggagtttgacaccccatcggtccttctgtccaacgacagttcccgattctatgccatgtttgctgctgcagagaacaaggtcgctgtcaagggctgactcctccctgttgacgaagtctcttttctttagagcattgccattccctgcctggggcgggcccctcatcgcgtcctcctaccgaaaccttgcctttctcgattttatctttcgcacagcagttccggattggcttgtgtgtttcacttttagggagagtcatattttgattattgtatttattccatattcatgtaaacaaaatttagtttttgttcttaattgcactctaaaaggttcagggaaccgttattataattgtatcagaggcctataatgaagctttatacgtgtagctatatctatatataattctgtacatagcctatatttacagtgaaaatgtaagctgtttattttatattaaaataagcactgtgctaataacagtgcatattcctttctatcatttttgtacagtttgctgtactagagatctggttttgctattagactgtaggaagagtagcatttcattcttctctagctggtggtttcacggtgccaggttttctgggtgtccaaaggaagacgtgtggcaatagtgggccctccgacagccccctctgccgcctccccacggccgctccaggggtggctggagacgggtgggcggctggagaccatgcagagcgccgtgagttctcagggctcctgccttctgtcctggtgtcacttactgtttctgtcaggagagcagcggggcgaagcccaggccccttttcactccctccatcaagaatggggatcacagagacattcctccgagccggggagtttctttcctgccttcttctttttgctgttgtttctaaacaagaatcagtctatccacagagagtcccactgcctcaggttcctatggctggccactgcacagagctctccagctccaagacctgttggttccaagccctggagccaactgctgctttttgaggtggcactttttcatttgcctattcccacacctccacagttcagtggcagggctcaggatttcgtgggtctgttttcctttctcaccgcagtcgtcgcacagtctctctctctctctcccctcaaagtctgcaactttaagcagctcttgctaatcagtgtctcacactggcgtagaagtttttgtactgtaaagagacctacctcaggttgctggttgctgtgtggtttggtgtgttcccgcaaaccccctttgtgctgtggggctggtagctcaggtgggcgtggtcactgctgtcatcaattgaatggtcagcgttgcatgtcgtgaccaactagacattctgtcgccttagcatgtttgctgaacaccttgtggaagcaaaaatctgaaaatgtgaataaaattattttggattttgtaaaa

SEQ ID NO: 15299 - DNA, 34137 bp, Homo sapiens
ggctcatgctcgggagcgtggttgagcggctggcgcggttgtcctggagcaggggcgcaggtaggtgatggctgctgccgcacccctgccctccagctcggttgtcacggggatcacccctttgcatttcctcggggcgtggcgggatgtggccagggctgcgagcagttcgggggacactggagacttggggaacggcgtatggcctccccctggtctcctgccgccgcctcctaggcctgtgagcccggggtctggtgacggggtcgtgtgctggaagacaggcaggtaggatcgggatgagcgggcagggacgcgggctacgtccctggccgcggccgccagggggcgctgcgcccgcgggccgtgggtgtgggtcgcgctcgcctgggcaggccggagcgggctgtgggaacgccctagggcccgggcatcccaggcgaagcgggtctgagagaaacgcccacctgggaggctgtgcagcgggtggctcggggcaccctgctcaacccgcagcggagccgccagcgaccttcgaagtaagtcatccccttcgtttttgcaagcgggtaaatggaggtacgtgacataagcacgcgcagcaaagccgtggctgtgccgggaacgcagcccagatctctccacggtcatccagtgctcttttcgcttctgccacacagagccgcgggtggctttgtgtttatcacacaggggccatttggtttctgcacagacggagaggctggaggcaggtgggcacaggaacgacggggaaagtttcaggaggtcttggaggaggagatggctaggttttactgtggtccgcagcgtgtatgaaaggtgaggctgcttggagacgcaacaagtggattacagtgggtgtggtaaatacgtatccctttagcgtggtgtcttcctcgtgcagcttgagggcctggaggtgatggaaacctactcatgagtgttgggatgactgcagcttgcacacaccagtctggtaatcccgtgcaactctcctcctgccatgcagttgaatcagtatcattgtgcagggagagtgtctacacttttatcagtggaaagagaatcttggtaaaaaagggcagctgactaagtggcctcaaccctattgggcacttctttggggttctcccacgttgattattctgcttctacccttgtacatgtctggacaacaggtttgttttttacaaacaaaaatcccttctctttcttcctctcttgatagctgaggcaagtgagcatttaaaaaagatattccaacaactttaaaggaggacacgagaagatagggaaatataaatagtatcagtaaaatggctggcctggggatccatccttgcttgcttgcttgcttcagactggggctttgtttctttccaaacctgtcaggattcccagctcttcgccggcctccacgtggggtgccctcttttatgttccagatacacagacgatggtgtccttatgttcaaggccacagacagtaactttgtgcctactttgggcctgcctgctctcctgattgtgcctctttttccaggaaagtagagatgagtgtgttagagataatggaacactgttccccacacccttcatacatagaataacttagtcccttaggatagtttagcagtgtctaccacagcagtcactgtaggcacaaaacagtcattatttgtgtcataacagggaagtcgttttgtccctgcctctctctgctcctgtgctccactgattctacttcatcctttgaaataaaagtggttgaaagaatctttggttatcatgggtgcttagataattaagattatgttcgtgttcttcttgatgtggcatttcatattgtggatgagttccagtgacctcctctgtttcaaactgctcaccgccccaacccccaccttttaaaaaggtagtactaatcttttcctcttccagataatcagctaagctagggaacccttgaaggggaaggttagaatttcgtgattcccgtaagaaggttactctgatctacagctacagctcaacactggggacactggcagatgccaggtctgtttatagtttagccttaatgaggtctcaatgacgtgattgctgcactctggcttggtgagccgctgttctttatggtgtagtttgtcattggacaaggtgactttttttttttttttaaagataagtaacagctatatcaacttagggtacttgaaccagaattctgaaaggcaagaaatcaagctttctttggactggaaacctgtctttgcataggagatttagtcctttttattcagaggattagtaagtgttctctttttatctgacactttaaaaattgcattataatggttagaattttgtgctgcagaagtagtagttttaagtcacagcgatagccagggatttatggaatccagaaggcgacacggctacacgtctttaatttccgttggaggctagtatgaaaggtgttttctcagcttgtctctgggaggctgtgacccttcttagaggggggaaacattttggagaagtatgtatgtgttttttgtttttaagtgacctgagttgatacagcatattgattagacttagccaggcaagcagtggtttagaatagagtttcaggtaaaaactaggtaagacttagtaatacagggtggagaatttgtttttgttattgttttttactaacagctttgttgccataggatttatatgacatgaaattcactcttttaaagtataaattcagtgtgttttttttcaatgtattcactgcattgtgcaaccattaccactatctagttttagaacattttcagtacccagggaatttgtgtttgaagttaagttataacattgttttaactggataacttcatggagctttaaaataacaccagctaacccattagttaattataaaaaggcagagatggaatatatcattggtagaataagtgtttggtaagtttttatttagtaaaatttagtagaagaaatgatgtccactttaaaattgtggagtttttaatacttgggacaaactgaaattgtttctagaaagtctttaaaaaaaaaaccaacctttctattgtatacactggatttgagcttagttgaagagaatgggtgtctctttactagtgtgtttactgtttctaattttttttcccttagagttgggagaaggtaatttttcttgattctcttatactgaatctttttctttaaaaaaatgaaatcaaaatctttgaactttttttgaaaattaatttttgtagctataacagtagaaagctttagtacttttgccttttttttttttttcctatttttaaggcacttgagcttatggttaagtactgtttaggaaataatctatttcttgatgaatttttaatttcaggaattctgatgtgaaactaacagtctgtgagccctggaacctccactcagagaagatgaaggatatcgacataggaaaagagtatatcatccccagtcctgggtatagaagtgtgagggagagaaccagcacttctgggacgcacagagaccgtgaagattccaagttcaggagaactcgaccggtcagtttcctttcctaagagtctcttacctgcttgttgtactaaaacacatcttttttcgtataatgggtaatttagaaacttattttttggccgggcgcggtggctcacgcctataaacccagcactttgggaggctgaggcgggtggatcatctgaggtcaggagttcgagaccagcctgaccaacatggtgaaaacctgtctctactaaaagtacaaaaattagccaggcgtggtggcgggcgcctataatcccagatacttgcgaggctgaggcacgagaatcgcttgaacccaagaggcggaggttgcagtgagctgggatcatgccactgcactccagcctgggcgatagagcgagactcagtctcaaaaaaaaatgtgtttttctttattggctttaggttactgttaagaatttatggttattgataagtctctggtccatagtaagcactcaataagtggaagagaggctggctgtcaccctctcacccggtctgttctgagcattctcctctttttcacttttattctatgttggtgccttctgaaaaggctatacttaacagaagacaacttattgagggggagggggtcatggggtcaatgacagggaatataaagccaattaagcttcattcatgtacctaaacaaaattggtgttttcttctactttctgtcatgtgtgtttaaaatgtgaacctggccaggcacagtggctcatgcttgtaatcccagcactttgggaggttgaggtgggtgggtcacttgaggtcaggagtttgagaccagcctggccaacacggtgaaaccctgtctctgctaaaaatacaaaaattagtgaggtgtggtggtgggcacctgtactcccagctactcaggagggaggcaggagaattgcttgaatccaggaggcagaggttgcagtgagccaagatcacgccactgcactccagcctgggcaacagagtgagactccgtctccaaaaaaataaaaaataaaataaaatgtgaatcctttggagagactcagatttcagaacaattctagatagttgtgggattatcagtatgtttttcaagcgaattcataagttaagcagtctttagataataatctaatttcctccaagggaaataatgaagatgcgtttttacctcgagaaaatattctttttcctgaggaaaaaaagcattataccttttcttacaaaagtacctaataaggcagaatggactaggtttaggaagttgaggtttttgttggtgtatttgttatgtgaaaatttgagaaagataatggactttgcagctgacactggcctttccttagcctgatactacctttccctctttggttgtgttaaagccattgctttattaatgaacattttcttgctaatgagtcttttctgtaccctactgtgtattatagaatgcttttccattcaggtttaacttcagagaaacaggcttaatgtaatcagtgtcaaatgcttctcgtggtgccagttttataacttcctcatgtccttttgtctagaccttatgttgattaaacatctatccattacatctgagtgctagacacatttagtgtaacagttaagtctggaaaaagtcagaaggtaacattggggcagggccttaaagggtgattaggtggggaggctttttaggcggtacaagtacagacccaaaggtatggaaagagcgtgtgacatattgggactttggataagctacttacgtcatttgtatataaaatggggttgacagtagtacctgactcatgggatcactgaggagtaaatgagataatacatataaaatatttaaaatggtacctggcacatggccagtgctcaataaatgttagctcttagaactagttgttcagggcataggatgtgtaaagagattataggtcgggtgaaattctgcatgccatgctaagaaatatttcactgtgggcattagggaactattggaagttaatgagattaaaaaaaaaaacctttttattttgagctaactgtagatttacatgcaattataaaaaataatatagagatcctatatattcttcatccagtttcccccagtggtaacatcttgcataactatagtccagtatcacaacaggataatgattgacattgatacaatccattgactttaggatttcaccagttttatatgcactcatttgtgtgtgtgtgtgtgtgtgtgtgtgtgtgtgttgtgttctatgcattttttaaaggtgtaaatttgtgtgaccgcttccacagtcaggatgcaaaggttccatcacaaggatctctcgttacccttttatagccacagtcatgtcccctcaaccccagtctctggcaactgctaatcttttctccatttctgtaattttgtcattttaagaatgctatatacattgaatcatatagtatataacctttcgagattgcttttttcactcagctgaactcccttgatagccatctaattttgttgtgtgcatcaatagttctttcctttgtattgctgagtagcattccgtgttatagatgtaccatagcttctttaaccattcatttgttaaaggacatatgggtcatttccagttaatggcaattatacataaaggtgctctgaaccttcagttacaggattttgtgtgaacataagcttttatttctctggattaatgcccaggactgcgcttgctgggtcatatggtaagtgcatatttagtttgtaagaaactgcagtactctttcccagagtgtctgtgccattttacattcccaccagcaatgatccagtttttccacattgttgccagtactcaatgttataatgtttattttagccattcctatagatgtgcctggtatctgattgtggttttaatttgcagttccctaatggctacgatgtttgagagtagatttttatcttagattagtcttgaagcaatgcagaaaaaaacctgtacaggagaaagagaccaaatataaagagcattcaggaagcggctctgcctatccatgtcagagaggccagggttctgttgtaaagcacagaagtgaggatggaggaaaggcgtttctagaagatagggaggcattggggtgtctgggattgatggtaaggatttaaacctattcgtggacataagaaaaggagattggggagatattaagaatgagtttgggccgggcacggtggctcacgcccgtaatcctagcactttgggaggccgaggctggtggattgcctgagctcaggagtttgagaccagcctgggcaacacagtgaaaccccatctacttgggaggttgaggcaggagaatcgcttgaacctgagaggcggaagttgcagtgaaccaagatcgcgccattgcactccagcctgggcaacagagtgagactccatctccaaaaaaaaaaaaaaaagaagaagaatgattttgattttgaagatgttgaatttgaagtgcatatgggtaaaattatcagtaggtagagcatagacaagaagtagtgtaggaaaaaacatttagagcctttagtgtgtccacataggtgaagctgtgagagtgagcaggcttacccaaggatggcttgcagagcaggagaaggtggaggctgtggagctggtgtgtggtcctgtgaaatttctggggatagggtccccagcttgtgagagtagagttgacatcagggtttgcagtggcagcagcgagcttttcctctacgaagtggagaagaacagcaggtaggcaccgctgggctttgagtaccctaaaggatatggagtcagccaccactgtagcaggttttcaacatgccactgaagccttatctcagagaaatatgaaggctaataccacttttataaaatttcaggaatccacatgaattttatgaattttatttttattattctttcatgtttcctaaactttttttttttttttttttttttgagacgaagtctccttctgtcacccaggctggagtgcagtggtgcaatctcagctcactgcaacctccacctcccgggctcaagcaattctcctgcctcagcctcctaaacagcaggtgcctacctgctgttctctgttaccacattggccaggctggtcttgaactcctgagctcaagtgatccgcctgccttggcctcccaaagtactgggattacaggcgtcagccaccacatctggccatgaacttttattttttattaaattttttttgtttgtttttttgtagaggcactctcactgttggccaggctgttgttgaactcccagcttcaagcaagcctcccgcctcagcctcccaaagtgctgggattacaggcatgtggcaccacaccctgcccctaaactttgaaatttgagtactgttttcctgatttttactgtatccttgtaatctctgaacttttttaaaagatttcttttattctactctctttctgttacttagtctagacctagcaaaacaacaacaataagcccataggtttattcaagctatttttgtatatacattaaaatgaatgcatcgctactaagtatttttgtaagttcagacaccatctagaatctgcttgaccgttacctgtcaaaaaacaaaatttctcagatgtatttatctttaacttgtcttcatgttacaagtttgctgacagaagcaaccagcaagatgacaagaaattttgtggtctgagaaaattgtataaatggtataaaatggataatgtaagtagttgggaagcagaattcctgtataagcatatagtttttctttttttaaagtaagcagttaattgggcagagattgcaatttcatgtcacatcatcattaccatcatttttatatttgttagagaggaaatctgggacaggatctcccaggatgccaggtatgcctactatctgtcaaaaatttaaaacaaacaacaaaaaagcctctaagtaacaaaagataaggatacatctatggctcttatgtggaaagcaaggtttcattcagcactattagcctttaacacgtggaattaaccgagaagcaggagacctgtgctgctggtgcctcacgcctgtagtcccagcactgtgggaggccgagggaggaggctcgcttgagcctgggagtgcaagaccaacctgggcatcatggtgagacctgtctctacaaaaaaataaaaataaaaataaattagctgggcacaggggtttgtgcctgtagtcccagctacttgggaggctgaggtgggaggatcacttgagcccaggaggtccaggctacagtaagctgtgattgtgccactgcactccaccctgcgtgacagagcgagaccctgtctcaccaaaaaaaaataaagaaagaaagaaaagaaatggtgtcaaacagaagtcagaagcaaagcaccaaagaataagttctgactttgagcaggccagtgcttttcttcttcaaggtgtaagtgaagatgcagattacatggtttgcccatttctcagtattgtgaccaaatcattcttttggaatatgacttggaaaaattgctctattagtcacatcttcaaatatttataatttctcacgtatgcttagaaataattagggttgaaataaagcattcgcacatctacccactttcttcgggactgtaatgttaatgcttgtggccacacacaatttgaggcttagcaggcatcctttaatcctgaagtgttaataaagtggtggtttctgttgctgttagttctttgagcctgagtactaactttggctggcattaggctggcgttacttcagctaacatgaagttttatacctaggctgctcctaaacactgttcctttgcctgaggcatgattattcaggcatggttcctttttttaatcctatttatatatgcacatgtagatcatatgactccacgagccctgatttttttttaagatgcagtcagtgtttattcatttttttaaatttagcaaatatttgaacactcttcaagatgcatgcacagcactgaaccgagtggtctggtgcagataaagataaattggtgctgggcctgcttgtccaccaatagaagcttaaactcacaacacgtactctacatagatgactgtaatttagatgctgtgggaattagtaaaaggagaaagtgcttctctctcagggaactctttaggaggaggtatcatttggctggaaacttgaggaatggatagaatttggagaaatgaagaacttgccaggcaaaagaaagagttgtgggatagggatacctagtccttgttggtattgagcatcaaatgtgtgaagtcttagctatagtgcaatacctcagtgaatttcacattatgtgtggggtttttttgttttttgttttttgtttttgaggtagagtctcactctgtagcccaggctagagggcagtggtgcgatcttggctcactgcaacctccgcctcccaagttcaagcgattctcctctctcagtctcccaagtagctgggattacaggcacatgcaaccacacccagctaattgtttgtatttttagtagagatggggtttcaccatgttagccaggctggtcttgaactcctgacctcaggtgatccctccgcctcagcctctcaaagtgctgggattacaggtgtgagccactgcgcctgggcatgtgtgttcttgaataataagccaaggagtttggattttaattgctttaaattaatatttaagcaaaagcaagacaaagcttgtcagatgcttttatgagctttattttattgtggtggtggtttgttttcttagtgctctcaggcaaaggtaagggtgccttgtttttcattagcatgtctaatctgggaaagaaggaagaatggaaaaataagcagaagtgggccgggcgtggtggctcacgcctgtaatctcagcactttgggaggccgaggcgggcagatcacaaggtcaggagattgagaccatcctggctaacatggtgaaaccctgcctctactaaaaatacaaaaaattagctgggcatggtggcatgcacctgtagtcccagctactcgggagactgaggcaggagaatcgcttgaacccgggagccagagtttgcagtgagccgagatcgcaccactgcactccagcctggggaacagcaagactctgtctcaaaaaaaaaaaaaaaaaaaaaaaagcagaagtaaactaaagttcatgtaccattattactggcacatgaactttagttattttttccccttctctcaaaagtgtgtcattggtgggattttcttcctaccaaattagaatatcctgtgtctaggaaaggtaacaaagcaagtattcataaaatccagggctcttacttagtatttccttagttctgtggtaggctgaccctttaatcttggttggagttttcataattaatgctttgaaatattttggtgagctcaagttgtatcttagggatcaaagatgtgggtctaatctcttaccagaaatgattcgaagatgtattgttaggaaagaaatatgggctcattatagaaaatgtacaaagtgtgtaaagttgtagaaaaaaagtaaccacccttaattcctctacccagagacagccattgttttcataaaatagttttgtctagtacattgtacttttagagtttgctcctgaaagcttttctttacagactaaggacgtgtgaatttgtctatgcccttgtgttttccaagtcaagagtattacctgtgagtcggcttgctgttaggaaggagagcaggaggaaggagattagcattttgcagctctgcattatttttctcttgattgatactcggtgactcagcagattttctggacagggttaagataagtaagaatacctgcctttttttttttttttttttcttctctccctgtaggcatccataaagctttatgaggcacagtagtctcttaggcgctgctgggtgtgacaccgtatctggtctggtgccaggtgttggtctccaatagcagcccagagatctccggctgaggtaacaacagtgtgcgattggtgtggagcccaggtggctctcatgcttggtaactgcattgacagctcgctggggctcttgaggttgggctgctgccgggatcatcagctctcttatgccgtttgctgcaagactgccgcggctttcctaggaagtgctgcttaagggaaataaatatagcctgttggcatgagttaaaggaactttctgtcaaaggggaagaaaagtgttggaattagcttcctgttttttttttttttaagtacctaaatctttatttggttaagataacttggaagttacaaatggttaatgaaaactttttcaatgaaatattgtttccacagttaggtgggtttccgttaatgctttcttttttttagttattattatactttaagttctagggtacatgtacacaacgtgcaggtttgttacatatgtatacgtgtgccatggtggtgggctgcacccattaactcgtcatttacattaggtatatctcctaatgctatccctcccccctccctgttcatgctttttttaatgtcttaccgtttttccctctcttttagtcaaaaataaaaaggtcaacgcaaagaaacagggactccagaaggctttgcaatggttaaacctgtcattattaaactcacagactaatgtgaagttaatttggtgcactgaagtccactaatgagcagaattaaatttatccttttcctccctgccccccttttaaggagttagcctatttagataattagatgttatatatgttttaactatttaagattattttatgaattagctgttcaaagaatcaattgttactagatatcagatgagaacttccacttaccaaagcctgctcatggaggtagaaagcaagactgacatgtgtactttaaaagatggatggaacctcaaaggccgtcttgcccagtccccatttagcctcacctctctgtaggtgaggcccaggagagacacttactaggcagactatgctggggctgggtgagcttcccaaggatgttctttctggaattcggtggctcagaatacagcacttggctcctctttgaagcatgatggctctgttgcctgtctctggcccagtgtgctgggctgctgaaaagagcatggaaccacccaggagacgccacgacactgacagctgtacctgacctgagggttcaggatatgttttcaaaagcaaatctcgctaaaaaggatttgtatgttattatgaaatctatatttatgtggtggaaatagacacactcaggcttttagagataaactacacagaatgggttacaataaatgcttataattgtttggcttttttaagaatcctgttaacttgacaaccttctgtttacttttctttggtattatgcaggtatgatattgagcagtcacttagttttcttaaatgttgtgtctcacagtagaaaaatagccaaaccactcagcccctgacctttgtgtttgcttctcacggtgatcagcagttctggtctgctctgcagtatggtggtcacatgatggaacccagaaagccttgtactaagcatttaacacacattgtgttaggcactggaggaagtttcatttacaaattatattttggcctttttttttttttttttttttgagacggagtctctgtcacccaggctggagtgcagtggcatggtcttggctcactgcaacctctgccttctaggttcaagcaattctcctgccctcagtctcccaagtacctgggattacaggtgtgcaccaccatgcctggctaatttttgcatttttagtagagacaggatttcaccatgttggccaggctggtctcgagtcctgacctcaagtgatccacctgcctgggcctcccaaagtgctgggattataggtgtgagccactgtacctggcctttttttttttttttagctaaagcctgaaaatcttgttgaagggattttgtcaaatgcaaaagaccaatattcacaactctctaaatcagtggttttcaggccaggctgaatgttaaaatcacttgaagaatgttcaacaaataccagtgttggggtcctattccagaccaattaaatcagtctctgggatagaacccagacattggtattgttttaaaactcctctggtgattctagtaggtaggcagtgctgggaatctctagatctcatggaataaagtctgttctctcccctcactcaatggctccaagtgtttcctgtaaatcccgttttacccctgtgattcattttcagtttaatcctttgaaaccttaccatgctattaacaaagttaatcttagacccaacataacaggaactttgaataagttccttggaatttagcttatgaaacaactgaaagccctcaaattcctggtgattatggagtaatgctagattatcaactgcagacaaatacctgttttactgtggtggtggagatatgtttgtgaattgtattgctagctgatcatcggcttgagagtaacatagcacagctacagataagtgagctgatgctcaagttaattcttttctcagtgtagtatagctgttgagtgataggactgagtttagcagcttccctgacttggaataatagctctttcttttgtattctgcttcttccccatataggttgggttctagaattttgctgatcctcttgactgaaatggctactatttggaagttcttaagggaagagcttaagatggtcagggttgtgataacaacccactggggagtaaggatgtggtgggaattgcagaggaaacgtgcttggtaggtttctttaacttgttggagattaggaagggcgggaaggcctgaagtcagccggtcttgggaggacatcagtttttgatctttttaaatttaaaagtgaattttaattcacttttaaatttaatttctaatattctgagtcccttaagaagtatatctagtggcacaacagttccccttaaaagtttgtctttctagatgtttgtcataaaggctgcgtgggcctgggacatctgtagaaatggttttcttggccagaaggatgtatttgaagaggcgcccattgtcttgtttgtcttaaggtcttgtgaatgaggagaggagaggaagacagtgttgtgagatctgaggcctgttgattccgattgtgccccagataccgctttatttgaggggtgtgccagacaggagcaggcagcctttaacccccttggaaaccgaggtacctctctgttgccagttgacacctgcagtctctgccttcaggaacaacttggttgaatcctcagcccgaggcttattaggcaggctaccctgctgttgtccggcctccaggaagggattggattgttcagacggggaacgatttctggcccctggtatctgtcccagaggcctccgtgcaggggaaaagcccttggttgccctgtcagcaggcatttgctctggcagcctgttaaaatgagatgggacagctggagaagtggtggccatggggtgtgataggtgcgctgattatctgaggcctgaggatggcgttagcgcccgcagaagcgtcttttgcaagagcagatctgtctgcttatgaatcgaatgttacctgtttttcataccagaggtgtctatgaatgtgtgtttccctgatctttgtttgaaccttgacagaatctgaattgctttttgttattgttgtttttgtttttctcttttttttttttttgagacggagtctggctctgttgcccaggctggcgtgcagtggtgcgatcttggctcactgcaccctctgcctccttggttcaagcaattctcctgcctcagcctcctgagtagctgggatgacaggcatgcatcaccatacccggcttatttttgtatttttagtagagaccgggatttcaccatgttggccaggctggtctcgaactcccaaccttaggtgatcctcccaccttggcctcccaaaatgctgggattacaagcataagccaccccacccggcagaatctgaacttcattgtccctctttagcttccctgtgaccttactcctgccccattgccattaccttggtaggaaaaatgctgagtatcctagtcacatagtcatggggaagatataaatggcagtcatacttcctcgtttgatatttttctcagctcctggatctgccagtatttttccctttaagacaaagcagctgctgtgggtgcctttctgtgtggctgggtcgtctggccactgacagcctttcagtgtgctgtgctccttaagagaaatgggtcccctcatcttgtttcaggggaaactttaaaaagttacttgtaaaagggattgaaagcatcataacaaaaaacaaatggcctcataaaatacattcctctaggtcagcctatatcagtactaactgtgttagctcttcagctatctagggttaccttagtacgattgacattttgggccacataattctttgttgtgggggctatcctgtgcattgtaggatgttcagcagcatccctggactttacctgctagagctagtagcacccctcaaacatttccagatattgccacatgtcctctgggcaagcaaaacaccctcacttgtgaactcctgggctgcaccgtgcgacacagtactattgtggctattaagcatttgacctgtggccagtctgaactgagatgtgctgtaagcataaaatacctgatttcagagacttagtacgaaaaaagaaatacctcgtttgtaaaatacctaataatttttcacattgattatatgttaaaaaagataatactttgcattgggttaaatgaaatatattatttaaattaatttaccttttactttttatttttagagtcagagtctcactctgtcacccagactgtagtgcggtggcatgaccatggctcactgcagcgtcaaacacctgggctcctgtgatcctcctgcctcagcctcctgagtagctaggactacaatctcgtgccaccatgcctggctaacttttaaattttttatagtgatggggttttggagggttacacagactagtctcaaactcctggcctgaggccatcctcccacctcagcctcccaaagtgttgtgatgacaggcataagccactgtacactgcctactttttactttttaaatgtggctactagaaaaatttaaattacattatgtggcttacatttgcagcttgcattatatttctattggacagtgctgaactagagtgttgatctactgtaggttagccattgattttgtattaggcatttagatccctgtaagctgttgggtttaatgattttttcctttggaagattttcctttatgcagtaaaattatggagacacagagtatgtagtattacatattaccagtttgctctcctgaatccctgctggtagcatattaaaaatcagtttaatgttcagaccgtgtatgtttgtctatatttctctcctttccatattgcattttcttttccatattagattttatctcttttaaggcttatgtggttgtatcttaaatttaatttgtatttctcgattggtgacattgggtctgtgtgttctctcctgtatctagaacagtgcctggcacatagtaggccctcagtaaggactagttgaatgaatggatgaaaaaatactgtattttactttttcagtacaagtccactactcgaaatatattattatgttagctacttggttacttcttatttttatttatttatttatttatttagagacagggtctcactctgtcacccaggctggagtgcagtggcatgatcttggctcacttcagcccgatggtcctggctcaagcgatcctcccacctcagcttcctgagtagctggggctaacggtgtcccttttttgtatttttttgtacaggcggggtttcatcatgttgcccaggctggtctcaagctcctaggctcaagcgatctgcccgcttgagcctcccagagtgctgggattgtaggtgtgagccgccgcgcccagccacttggtcacttctttagctttatcttcccttctcttaatgctaatttccttacgcaaaaaagtttccttttcatgtttgaacctctcttccctttgatacatttctgcttgttgggtgtaaatggaggctgtcccccatcatagctggactaagtatgctatataatttatgtcatcatttttaatgtaatttttgggaggttaattccagatggattaatgtatgatatgaaacctggatatcaattaattcatctccaatctggttagttggtaggaaggtaggtagtaggtaggatgtgagtgactgtctctgtcacccaggctggggtgcagaggtgcaatcatggctcactgtaccctcgacttaccaggatcaagcgatcctcctgccttagcctctcaggtagctggaccacaggtgtgcaccaccatgcccggctagttttaaaaaatgctgtatatagatgggttctcactttgttgcccaggctggtcttgaactcctgggctcaagcgatcctcccactttggcctcccagtgctgagattacaggtgtgagccagtgcacctggcccaatctggtatttatttgtcccaacaatattcactgactcatgattccctaccttgttatattatttatgcttttgtatagtaagcccttatagcttgaatatattaagtcttttctcttggttcattgccatttttaatccattcaaccttagaatgttgataactcactttatggaatgttaactgtggtagaaaatatttatttttaccttcaaatagacatacttttttttttttcctggcatgcttggccatgtgagcttttttaggaagcctagagaggaagagaagttagacatccaagcatatagttagtttcaagtgggagacatctgtgcagttactggcaggttagtataaagatgctgttattttatgtttctttttttttttcttttttttttttgagacagagtctccctctgtcacacaggctgcggttcagtggcgcgatctcagctcactgcaacctgcacctcccaggttcaagcaattcttctgcctcaccctcccgagtagctgggactataggcatgtgccaccatgcccgcctaatttttgtatttttagtagagatgaggttgcaccatattggccaggctggtctcgaactcttgacctcaggtgatccacccgcctcagccttctaaaatgctgggattacaggcgtgagccactacgcctggccctgagtcattgtttatcttaatctggtattcaccctggggaagagagaagagccatttatgaggtacacctgggatcattttgtacagttatggtttatttgcttggttttgttttttgtttttttgttttttttgacaggcccatagcatagtgatcaagacccttagctcaaggctggattgaaatccctgctgtgacctaacatcggtgtgcctcagtttccttagctgtaaaacagggatactagtacctacctcaaagggttgttatgaggattaaattagttagtatctgtaaaccatttaaaacagtgtctggcacatagtacatgctatgttggtttgttataaatttgtataaattttcttaattacctttaagtgaaaagcttgcctttataaatgcatactagtcgtgagatttggctgtacacaaggaagattgctatagcttcctttatttcttgctaatgtcaagacaacctgaggtccacaaaatagaagtgaaagtactaaagttaatagcaattctcttttgcaataatactggagcacatatcctgtaataaagttaattggggcaaactgggtagaagtctaattgctaggagctacatttttttaatcctgtaaccccagggatagaatttatcctaaataatctagaaggagaaaaataaaactataattgtatattatactattaataataagcaaaagctgggtgtggagactcatacctgtaatcccagcactttccgaagccaagaatggaggattgattgcttgagcccaggagctcaagaccagccttggcaacatagtaagaacccgtctctacaaaaaataaaaaaattagccagacatggtggtagtgcatgcctgtagtcccagctactctggaggctgaggtgggagattgcttgagccagggaggtcaaagctgcagtgagctatgattgtgccactgcattccagcctgggtgacagagcaaaatcctgtctcagacaaaaataataataagcaaaacagctagagaatctaaacagaagtggaatgggtaagatcgcctcagtggtatatcatgtagcattaattgatgatatgtagaatgtaagggaaagaaggtattttgaaggtgttttcattgacgtttgaatactgggtgccaaactctctactatgccagaggccagggatataaacaagaggaagacagcttgccctctaggagctcttaccagaagcattgggctgtggtggtataggtacagggaagacataggaggaaggaagtaagttccccgaccttgaaagagtcagggaaaactaaaggaaagaagaaatcgttgagacagaccctaagatttattggctaagtaaattgggataatatagctaacatgtattgaatgtttattatatacccaatattttgctaagcacttttaattatcccattaattcctctcatccctatgtggtagatgcatgtatcattgtaaaaatgagtaaactgaaacttaaatctgtatctatcttctaaaattcatgtttgaaatcactgtatttactatggcttccagctgtgggaaaattctgcctgtggagatcttcatactttaaggccataagaaaaaatagttttgttggagtaagagaattattttctcttgtttttattttttatttatttatttttcatgttaacatttgaaagttcttgccaacagctgaatatctgttgcttattgttttgagagacctgtctctgaaggaggtaggtgcaaatatggagtaggacagtggttccttcaaaggagaagatcctgtatcatatcctgtatttccatcagatatttcattttcctgacttgggcaatgtgtaaagatatgacaacaagattgacaatttgggaaaacgtttaggaaagaataacagggacaggatgtgacttggaaagttcgttgcttagagtagcaaggtttgattctttttgatcaacaatatagacttttccatcctcttactgtgagaatttctactccatgctttgttacatgagaattctgagattagtgctatttcaaccacttttatgggggtttgttaggataaaattgcactgagtgcctgttctaaaaccaaaggcagcaggagagccctgagtctctgccatcagtagtgccactgcagtactcacgagaaacctggggaatgaagacttgcctggcagctttcatttgaatctttttaaaaagagcctttgattttgatgttttccaatataggaagtaacttactacctaggaggtggtgaaacatgacatagttatatatagtaaaaagaacaaaaaccatgcaatcagaggattttaaaaatattaagtccatttagttttctatgaataggttttagtgaaaactgtcactaggcattttagaaatgaagaaaatgaaatcagtgtgttatacacataggaactggcatttttttggttcccaccatctggaatagtcttacagatcggaggcactcggtaagttatttgtggaaagaatggatgaaagctgtgaagattctggtttcctattaatgctaatatgccatgctcatgtaaacatactgatggattgcttgccaagttttcctcttctgatgcttctcaaacatcaaagatgtttatagaacccttctggccggacacggtggcttacacctgtaatcccaacactttgggaggccgaggcaggcggatcatgaggtcaggagatcgagaccagcctggccaacacggtgaaaccccatctctactaaaaatacaaaaaattagccgggcgtggtggcgggtgcctgtaatcccagctactcgggaggctgaggcaggagaatggagtgaacccgggaggcggagcttgcagtgagcttaggtcgcaccactgcactccagcctgggcgacagagtgagactctgtcttaaaaaaaaacaacaacaagaaaaccccttctaactcttgaacttggttcacctggaaaagcaaaagaactagaatagctaaaacaattttgaaaaggaaggataaagttgaaggcatcacactatccaattttaagacttagtttgtagctacagtaatcaagtcagtagtatcaatgtaggggtagacaaatagatcaatgaaatagagtctagaaatagactcacacaggcatggccaacttttcgacataagtgcagcacacctcactggagaaatggtaatcttttcaacacatggtactggaacaaccggacatctgtaggcaaaaaagtgaacctttgccgaaaccttacactttatacaaaaattaactcaaaatgaaccatagatttaaatataaaatgtaaaactataaagcttttaagagagcacataggagaaaatcttcatgacctgggggttggaagaagagttcttaggcatgacactaaaagcacaattgtaaaagaaaaaaattggtaaattagacttcaaaattacaaacttttgctgcatgaatggccctaattaggaggatgaaacatggccataaaatgggagaaaatatttgcaaatcatatgacaaagaactttaatccagaatatataaggaacttgctaaactcaataataaaaaaaaaaattcacttagaaaataagctgtaatttcagcactttgggaggtcaaggtgggaggatcgcttgagcccaggagttcaagaccggcctgggcaacatagtgctgtctccacaaaataaaaataattagctgggtgtggtagcacgtgcccgtagtcccagctacttgggaggtgggaggatcacttgagcctgggagttcaaggctgcaatgagccgtgatcatgccattgcactcccagcctgggcaacagagcaagaccttgtcttaaaaaaaaaaaaaaaaaaacatagaaaatgggcaaaagacttgaacagatacttcagcaaaaagaatgtaggggtgacatataagtacacatagatgttaaacattattcgttcaccattagggtagtgcaaattaaaaccacaataagataccataccacacctattagaatggctaaaataaaatataatgccaatactggccaggtgcggtggctcacgcctgtaatcccagcactttgggagcccaaggcaggcggatcactaggttaggagttcgagaccagcctgaccaacatggtgaaaccccgtctctactaaaaatagaaaaattagccaggcgtggtggtgggcatctgtaatcccagcaactcaggaggctgaggcaggagaattgcttgaaccctggaggcggaggttgcagtgacccgagattgcaccactgcacaccagtctgggcgacagatcaagactccgtcttgggggtaaaaaaaaaaatgccaataccaagcactggtgaggatgtggggaaactagatttctcatccattgctagtgggaatgtaaaatggtactgtggtcaagtaatttcaatgacaactaatatttgaatcataaataatgtcaagctgctttatatacttcttgtgctatcaaaagttaaacaagaagtgagatctccacttgaagtcaggagtttgagactagcctgggcaaaatggcatctctactaaaaatacaaaaattagacgggttggtggtgggcatttgtaatcccagctacttgggaggctgaggcaagtgaattgctggaacccgggaagcggagattgcagtgagccaagattgcgccactgcactccatcctgggtgacagagcgagatgctgtctcaaaaaaaaaaaaaaaaaaaagtgagatctccattccagtacaaatttgtagtggatatatttttcaaactgaaattacagttctagtagtgatttttagacctcgatgatgtatgaggcaaatttccatatttcaagatccgtgtattttggaaatagtggcaatggttgtatagtattgtgaatataattaatgcctctgaattctatacacttaaaatggctaaaatggcaaattttatgttatatatattttgccacatagaaataatccatttaactgtggcatttagttgcttccacataactttccattgaaagtgattaatctgcagtggggtgcatgcatgtaatgatatgataaaggtaaatgtcaagagaggaatctaatagaattctataatgtcttccatgagataaaaggctcaattaaaaatgtgtattcctggatttagctcagtatttggaagttcctgtctttttttttttttttttttttgagacagggtcttgctctgtcacccaggctggagtgcagtggcacaatcttaactcattgcaatctctgcctccctggttcaagagatcctcctacctcagcctcctgagtatctgggactataggtgtgtgccaccacgccctgctaatttttgtatttttggtagagatggggattcaccatgttgaccaggctggtttcagactcctgacctaaggagtctgcctgcctttgcctcccaaagtgctgggcttacaggtgtgagccactgcgcccagcccggcagtaccttcacgaagacatttgcaaaagtggaattgtagactctcattgcaaatcagcattcatagatgaagatttgcaatcaattttgatgaaagggaaaactattttaaaccccagttaagtgaaatgttattcccccataaaagaatttcattcttctcatcagtagacctgcattacaaaaaattgtactcaattattataatctgaattgtgtcaacattttgtggagatttgttttctcttgtaataggagtacctacttaatatctttgattttgcctcttagcccacaaaactgaaaatatttacctctggccttttacagaaaatgtttgtcaacccctagcttaaagcattgatttttctctttttcttcttttatttttttattttttattttttttttgagacggagtctcgctctttcgctcaggccggagtgcagtggcgctatcttggctcactgcaagctccgcctcccaggttcacaccgttctcctgcttcagcctcccgagtagctgggactataggtgcctgccatggcgcccagctaattttttgtatttttttttagtagagacggggtttcaccgtgttagccaggatggtctcgatctcctgacctcgtgatccgcccaccttggcctcccaaagtgctaggattacaggcgtatatgctttgaaagcgatgaaaatctcaccttattctctgttttagctgcatcccagagatgttgatgtattgcagtttcatactgtttagcacagaatatgttctggtttccatttaatgccttctttttatttattaatttaaagagatagagtcttgttctgttgcccagtctggagtgtagtggtgagatcaaagttcactgcagcctcaaactcctgagctcaagcaatcctcccacctcagcctcctgagtagttgagattatataggtacaaattgtcatgcccgtttgatgttttctttcacttacattacttagaagtatattgcataatttctgaacattcagatattttaaaaatctttgttactgaactctaattaaatcctaaagtggtcagagtgcatgtatacatgatgtcagtcttgagatttgttgaggtttgctttatagcccaatgtatagtccattttggcaatgtatttgaagtgacatttttcagatcttttgtcatcttctgaagctttggatatccaaataaggctggtccctgtaacattctgtacctactctgtacagattcccagtttctactcacttaaagtaggtgtgcttgtatttttagtgtatctttctctctcaatccaggaggttttttccttccccttgtgattatatgcagctcataggtaagaaaaacctttgtaatgtacttaaatctcagcagtcctcagctcattatcaagtgccgtagtccctaaccactaaattaagtgttgaccttatacataaggacttcatttaagagcgagttcgttcttgttgttgactcctgtcatgttgtaccattattctcttgaaactggtctgacttgcctttgacaaaaggaaaggagtgtgctttgcagggctatgtgctttcctaataccagaagttatctaaagatacttaactgtgctgtgaactaaagctattgtgtttgatctgcccaggcatccagctgactcctgtatacaaaattctacccgttcagttctgttaatgtttaagttcccgctgttctttggtgggaaaggaggtgatgtataaaaatcaactgctttgtataaggcttggtgtgttaggtgctaaaccacttaactttttcttgatttggggatctattctccttgtttttttgtttgtttgtttgttttttgttttttttttccttcttttagagacagagtcttgctctgtcacccaggctggagtgcagtggtacgatcatagctcattgcagcctccaactcctgggctgaagtcatcctcctgcctccatctcccaagtagctggtactgcaggcacgcatcaccatgcctggctgattttttttttttactttttgtagagatggtgtgttgctgtgttgcccagggtggtcttgaactcctgagctcaaccgatccttccaaagtgtcaggattacaggcgcgagccaccatgcccagctgagatctgttttttactgtttcacaataattgctggaaatatttgtaataatgtgactttcactgctaagacagaaaaggaagataaggaaattgaggaaaatgaagcttctgcttctacaacaggaaagcataaacgtttgagttacttttagagtaaacgggggataagtgtgtctagattcttgacccaccctcttctgccacagtcagacttagaatgcacttttgcatgcacttttgttaatctaatgaacgaacatttatacactttctagttagtaaatacgtgtaactttatatttcagctcatgagatcctttgctgcgtgctgcagggaagtgtagagctcttcagctgtgcagccaggataagaactcacgttctgttctccctgctgctgctgtgacaggggaggcacgtgtacatccaggctctttctgtgtggcagggctgtttaattggggctgatggaaatttttgtcataggaaatgggcaatcagattttcagttagtagtgaaataattgactctcaatccatattgggaaacagaagataaaacatttggtaataaaaatgtaaattttagaacatagaacacaaagagtggtccataagctgggcgcggcagctcacacctataatcccaacactttgggaggctgaggtgggcggatcacgaggtcaagagatcaagaccatcctggccaacatggtgaaaccccgtgtctactaaaaatacaaaaattagctgggcatggtggtgcacgcctgtaacccccctactcggaggctgagacatgagaattgcttgaaccggggaggctgagattgcagtgatccaagatcatgccactgcactccggcctgggcaacagagcgagactccatctcaaaaataaaataaaataaaaacagggccgggcgcggtggctcatgcctgtaatcccagcactttgggaggccaaggcaggtggatcatgaggtcaggagttcgaaaccagcctgaccaacatggtgaaaccccacctctactaaaaatacaaaaattagccaggcatggtggcacatccctgtaatcccagctactcaggaggctgaggcaggagaattgcttgaacccgggaggtggaggttgcaatgagccgagattgcgccactgcactccagcctgggtgacagagggagactctatctcaaaaaaacccaaaaaaacaaagagcggaccctaatgtaacctatggacttcagttaataatgaatctgtattggctcatcaattgtaacaaaggtaccacactaatggaagatgttaataataggaaaaacagatgaggaggacgggagaggtacagaggtatatgggagcattctgtactatctgattagtttttctgtaaaacctaaagatgctaaaaaaaaaaaaaagaaaactgtttaaaatttttaaatatctagcttaatgttccccaatgggttcaaatcatacaaagttagtgtttaacctcctgacccttgcttggaatttctcagttaagatgagtccagtttgcagtttgagctgtttcatcagttccgtttgcctctcgcctgtgtattaactgtgctcttgcctttctccctatctgctggaacagttggaatgccaagatgccttggaaacagcagcccgagccgagggcctctctcttgatgcctccatgcattctcagctcagaatcctggatgaggagcatcccaagggaaagtaccatcatggcttgagtgctctgaagcccatccggactacttccaagtaagatgccgtgctgagtgatgacagtgaagcatcaaaggcctttttttttttttttttttttttttgagatggagtcttgctctgtcgccagtggcatgatctcggctcactgcaacctccgcctcctgggttcaagtgattctcctgcctctcagcctcctgagtagctgggactacaggcgtgcaccaccaccaagcccagctaatttttttgtatttttagtagagacggggttacaccatattggccaggatagtctcaatctcctgacctcatgatctgcccgcctcggcctcccaaagtgctgggattacaggtgtgagccaccgcgcccggcccatcaaagccgttttagaacattcaggctaagattagatcatctggggagactggtctttagctaagagctgtgttcactaaacagtgtccattaaacacgggctgccctctccgtgcgtgttgatagctttgtgatttcggttttctctccttagacaccagcacccagtggacaatgctgggcttttttcctgtatgactttttcgtggctttcttctctggcccgtgtggcccacaagaagggggagctctcaatggaagacgtgtggtctctgtccaagcacgagtcttctgacgtgaactgcagaaggtaggcgcctctggtccaccctcatctcccccatgccgggtgggcagggcctgagctaggagtgtgaagtccacagctctgtgtctttaaagagccgagctgtccagtggagggcgggcggcctggggatgactttctctttgctcttttgctttatctcctatttcacctttgatcctgttttaaccacgggctttctctctctctctcagccccgcttctcttcctgagtctgcagggagattatgttgctgccttgtgacagaatacatttttgtggtagctgattgtcatgattaaaatgtagtttacaactttacattttaccacaggaaccttcagaaagggttgggggcccctgaaaaagaaagttcttattcacaaattgcattcagggatcattttcctgggtggaaagaaaggcttttgctctcatcattttctgtatcctgggaggctccttatacagggtaaatgtgtagttccctaggaagggtattttttcccagaaggtgaagactatgtacataattttaaaggagagacttgtgtgagtggtggcaaaacctggagacaaaaagtggtggcaggcggggagctaggtgtgcctttcccccgaggagatgtgtaacgaggacgtgtgcccttgttaagactagagagactgtggcaagaagagctgaatgaagttgggccagacgctgcttccctgcgaagggttgtgtggatcttctgccgcaccaggctcatcctgtccatcgtgtgcctgatgatcacgcagctggctggcttcagtggaccagtaagttctaaccatcctttccgacagtctccaggggcccggccacggccagctctaacactcttattctgttgcagaggttgtgctcagctttgggctaggtagcagtcttagagatgccttcaggtctgttgaaaggggtcgatggattttggcaacagctggaaggatgaaagggcagtgttgccagagaagaaatggaactggcttgatttctgggtgggggtgaaatggaactgactccagttctgcacaggactgtgcttctcggttgtgtgttaacatgaactgacagtcggtgcaggcagatgtgtcttgcagtgctatgagtgggtgagagcacgttgtgtggcccgggctggtgagccagcaccgggaacataccaagtgcctggaggcagttatcacatgtttggcaggtctgtggcaaataagccctgagaaaactagaggactgtcgaggattttagagtctgacctggagtccgtttaagtttggcttatagtgtgactgtgtggcaagtgttggggtggcagccgtggttttccccagtctgtactgatgcagagtagacaagagagcctttgacgttcactctgtttcctgggcacctgtttcttacacctgctgtgctgccttacacttgagaccttgattaaatctattctctacacatttgccttgaggcatcggagcagtagtactgcttgtactgtgcgttttccatatgtgggtaagctggaggttcatggttttggtaagtatgtgcctaagatgcatggcaattaggtaaaactaatttgcagttttgtttttgtttttatttttttaacgtttgatgcctcttgttaaagttttgatctcttttctgaagcagagaacactacttttctggtattgggtttctatattattaataattgaccaactaacatactttatataaaagttttaagtaagaaggaccatgtaactgaaatgttgtgttatgtaatttaccaaaatggcaaacattttcatagagccagcttcccccaagaagagcttctgtcattgtttcactacagggctggtggctgctctgatctcatagaattcattcctctgggtagcaccatatgcaggctttgcgaataaagtgatcatgggctttcttgattccatttggccaatgcaagaacttcattggctcccctctaaaaaaaattccatggattgctgggatttttattttttattttttgaaaaaaatggtacctatccgtattcagcttggtggcttcacagtccctcccctgaacatccgtatattccttattctctcatttatggtgcagaacactggggtactaacctctaggaaactgttctagctgccagggaaagctaagagccctcctttaacaggaaagcagcagcatgctttttcttctctctgccgtttcagggaagagcaccttaaggccagtgttatttcatgggattctgccctagagctgagaaagtaatggactcatccataatctcttttatagatttgaaagtgtaaacaatacacacttccttttttggaactccaattctaatatgtttctttttcattggaaattgaaaaaccaggctggttttgagattagtactagcagtgagtaaacctcctgtctgtggacttaaatccttttgaggaacatttcgttttagatttttacaagttttctaatctggcacgactttcaaactagcttaatctgttcttacagaaacctgtgtaaggacagactgcccacatacgggctccccaaataaaatggcatttttatttcttgtccctgctcgggtttcaccgaaccttggtagccataatcagaacaaatgaaacacagtcaagttgttgtgttctgtttgtttttacctgccagccagctgatgctgacatttatacaccaagatgatccaaggttttggtgacgccggtggggactgccgctatatgtgcagggtgcccgggggtcatagtaatgttaatggagtaccagaatctctaacagtgtggtcctgtgtagccacattgctacacttacagagatgctttggggcctttttggattaagacagttctaaaagaccaggcctcacctatgatctgtgtataaagaattagcatcgcactgtagatctgcaagagaaggccgcctcctgcagtgctctctcttggtgaatgctaactctgctcgagggccttttggggaaaggacagtgtaaaacccttagagaggtaagtttcccacccttccaacctctctccacctgcagcttgcttggtgctgtcaggatctggatttggggggagtctctctgtagtggaaccagtgacagaagctgttctttagaattttcaggatggctgtattctgcggtcagaatgagagagtcaagctgggcagaatctctcgccaagagttcaggtaaggtaatgtttattcactgggaatgctttccacagccagacagctatgctaacagtctcaagttttcttccagtttgtttagatttaaatgatacatttgtaactttttaaaaactaaattttggttggatttttcatgaaaacctcttttttctttatcccctaaaaaatggtttgaaatgtcattgttatttaaaaacccgatgtgttggaacttctttaatctgctgtttcctctttttccccccctttgaaagtttcgcatagtgtaaacattcactatgtcttttaccttccctgctcctcccatctgggaggcgctgatgctattacccagtgctgaaaaatggcactctaaaggtatgggaaggaaggagcccaaggcaaccacctgctgtcctttcagccttcctttggagactgctccatcagtgccgaggtgtgtgggaacaggcttcactgcaccgccatcttactgagttgcttcacgtgaggaaaagggggctttggccctgtgactcagttccacattttggattgcatactggaaaagaagccaatcttcttgctagtaaaccagcaacccggctgtatacagtggtgacccaagcaatggatataaacctaaaaatctgagggaggggagaggtggaatacagtagttcttggaatctgaagtctcctatttgatcaggttatttcctgggacttggcaaaaatctgattggtggggatctcctaggacctagtggacatctggtattaatttaatctcaggaaaaacaagaaattaacccagagagagtctgggttttggaattcagcgtagctacctccagaccgtggtgtctggcctccatttttgtctgtcattcagctctgacttacagctgcagtcacctttgctataaggcacctgggtagaagggtggatgggcttcacatcaatttttttcttcctttagggtgggggattggtttggctttcttttgttgtggttttttgttttatttttgtcaagattgatttttagatgcaaggacttgaaaagacccagaaggatgccaccagtttttccttgaggcctaggattttttattctgtcccgagcagaggtaattcctcacaacttagtgcaccagtagcaccagccattttgagcagagtacctctttggggagcttttcgttttgttttgtttttaattctctttccttagcagcaaggtcttttttcctagagaatctactccgttgcagaatcattgcaacctcaggagccctcactgattgagtgctgtcagcctgatatactactttggactctggaaacagatatgggttctattctctatttctactgtgtgtcgttaaacaaccgtcggagaccagatgacctgttagatggctagtcctgtataactcgactctgtatgtttcaatgtatgttactgcaatgcttcacctgctgtacagtgtttgtgagatgctctttgaagatggtacttttatattttttcattttcaataaaagtacattccttccca

SEQ ID NO: 15300 - DNA, 34137 bp, Homo sapiens; identical to SEQ ID NO: 15299

SEQ ID NO: 15301 - DNA, 34111 bp, Homo sapiens
cggctggcgcggttgtcctggagcaggggcgcaggtaggtgatggctgctgccgcacccctgccctccagctcggttgtcacggggatcacccctttgcatttcctcggggcgtggcgggatgtggccagggctgcgagcagttcgggggacactggagacttggggaacggcgtatggcctccccctggtctcctgccgccgcctcctaggcctgtgagcccggggtctggtgacggggtcgtgtgctggaagacaggcaggtaggatcgggatgagcgggcagggacgcgggctacgtccctggccgcggccgccagggggcgctgcgcccgcgggccgtgggtgtgggtcgcgctcgcctgggcaggccggagcgggctgtgggaacgccctagggcccgggcatcccaggcgaagcgggtctgagagaaacgcccacctgggaggctgtgcagcgggtggctcggggcaccctgctcaacccgcagcggagccgccagcgaccttcgaagtaagtcatccccttcgtttttgcaagcgggtaaatggaggtacgtgacataagcacgcgcagcaaagccgtggctgtgccgggaacgcagcccagatctctccacggtcatccagtgctcttttcgcttctgccacacagagccgcgggtggctttgtgtttatcacacaggggccatttggtttctgcacagacggagaggctggaggcaggtgggcacaggaacgacggggaaagtttcaggaggtcttggaggaggagatggctaggttttactgtggtccgcagcgtgtatgaaaggtgaggctgcttggagacgcaacaagtggattacagtgggtgtggtaaatacgtatccctttagcgtggtgtcttcctcgtgcagcttgagggcctggaggtgatggaaacctactcatgagtgttgggatgactgcagcttgcacacaccagtctggtaatcccgtgcaactctcctcctgccatgcagttgaatcagtatcattgtgcagggagagtgtctacacttttatcagtggaaagagaatcttggtaaaaaagggcagctgactaagtggcctcaaccctattgggcacttctttggggttctcccacgttgattattctgcttctacccttgtacatgtctggacaacaggtttgttttttacaaacaaaaatcccttctctttcttcctctcttgatagctgaggcaagtgagcatttaaaaaagatattccaacaactttaaaggaggacacgagaagatagggaaatataaatagtatcagtaaaatggctggcctggggatccatccttgcttgcttgcttgcttcagactggggctttgtttctttccaaacctgtcaggattcccagctcttcgccggcctccacgtggggtgccctcttttatgttccagatacacagacgatggtgtccttatgttcaaggccacagacagtaactttgtgcctactttgggcctgcctgctctcctgattgtgcctctttttccaggaaagtagagatgagtgtgttagagataatggaacactgttccccacacccttcatacatagaataacttagtcccttaggatagtttagcagtgtctaccacagcagtcactgtaggcacaaaacagtcattatttgtgtcataacagggaagtcgttttgtccctgcctctctctgctcctgtgctccactgattctacttcatcctttgaaataaaagtggttgaaagaatctttggttatcatgggtgcttagataattaagattatgttcgtgttcttcttgatgtggcatttcatattgtggatgagttccagtgacctcctctgtttcaaactgctcaccgccccaacccccaccttttaaaaaggtagtactaatcttttcctcttccagataatcagctaagctagggaacccttgaaggggaaggttagaatttcgtgattcccgtaagaaggttactctgatctacagctacagctcaacactggggacactggcagatgccaggtctgtttatagtttagccttaatgaggtctcaatgacgtgattgctgcactctggcttggtgagccgctgttctttatggtgtagtttgtcattggacaaggtgactttttttttttttttaaagataagtaacagctatatcaacttagggtacttgaaccagaattctgaaaggcaagaaatcaagctttctttggactggaaacctgtctttgcataggagatttagtcctttttattcagaggattagtaagtgttctctttttatctgacactttaaaaattgcattataatggttagaattttgtgctgcagaagtagtagttttaagtcacagcgatagccagggatttatggaatccagaaggcgacacggctacacgtctttaatttccgttggaggctagtatgaaaggtgttttctcagcttgtctctgggaggctgtgacccttcttagaggggggaaacattttggagaagtatgtatgtgttttttgtttttaagtgacctgagttgatacagcatattgattagacttagccaggcaagcagtggtttagaatagagtttcaggtaaaaactaggtaagacttagtaatacagggtggagaatttgtttttgttattgttttttactaacagctttgttgccataggatttatatgacatgaaattcactcttttaaagtataaattcagtgtgttttttttcaatgtattcactgcattgtgcaaccattaccactatctagttttagaacattttcagtacccagggaatttgtgtttgaagttaagttataacattgttttaactggataacttcatggagctttaaaataacaccagctaacccattagttaattataaaaaggcagagatggaatatatcattggtagaataagtgtttggtaagtttttatttagtaaaatttagtagaagaaatgatgtccactttaaaattgtggagtttttaatacttgggacaaactgaaattgtttctagaaagtctttaaaaaaaaaaccaacctttctattgtatacactggatttgagcttagttgaagagaatgggtgtctctttactagtgtgtttactgtttctaattttttttcccttagagttgggagaaggtaatttttcttgattctcttatactgaatctttttctttaaaaaaatgaaatcaaaatctttgaactttttttgaaaattaatttttgtagctataacagtagaaagctttagtacttttgccttttttttttttttcctatttttaaggcacttgagcttatggttaagtactgtttaggaaataatctatttcttgatgaatttttaatttcaggaattctgatgtgaaactaacagtctgtgagccctggaacctccactcagagaagatgaaggatatcgacataggaaaagagtatatcatccccagtcctgggtatagaagtgtgagggagagaaccagcacttctgggacgcacagagaccgtgaagattccaagttcaggagaactcgaccggtcagtttcctttcctaagagtctcttacctgcttgttgtactaaaacacatcttttttcgtataatgggtaatttagaaacttattttttggccgggcgcggtggctcacgcctataaacccagcactttgggaggctgaggcgggtggatcatctgaggtcaggagttcgagaccagcctgaccaacatggtgaaaacctgtctctactaaaagtacaaaaattagccaggcgtggtggcgggcgcctataatcccagatacttgcgaggctgaggcacgagaatcgcttgaacccaagaggcggaggttgcagtgagctgggatcatgccactgcactccagcctgggcgatagagcgagactcagtctcaaaaaaaaatgtgtttttctttattggctttaggttactgttaagaatttatggttattgataagtctctggtccatagtaagcactcaataagtggaagagaggctggctgtcaccctctcacccggtctgttctgagcattctcctctttttcacttttattctatgttggtgccttctgaaaaggctatacttaacagaagacaacttattgagggggagggggtcatggggtcaatgacagggaatataaagccaattaagcttcattcatgtacctaaacaaaattggtgttttcttctactttctgtcatgtgtgtttaaaatgtgaacctggccaggcacagtggctcatgcttgtaatcccagcactttgggaggttgaggtgggtgggtcacttgaggtcaggagtttgagaccagcctggccaacacggtgaaaccctgtctctgctaaaaatacaaaaattagtgaggtgtggtggtgggcacctgtactcccagctactcaggagggaggcaggagaattgcttgaatccaggaggcagaggttgcagtgagccaagatcacgccactgcactccagcctgggcaacagagtgagactccgtctccaaaaaaataaaaaataaaataaaatgtgaatcctttggagagactcagatttcagaacaattctagatagttgtgggattatcagtatgtttttcaagcgaattcataagttaagcagtctttagataataatctaatttcctccaagggaaataatgaagatgcgtttttacctcgagaaaatattctttttcctgaggaaaaaaagcattataccttttcttacaaaagtacctaataaggcagaatggactaggtttaggaagttgaggtttttgttggtgtatttgttatgtgaaaatttgagaaagataatggactttgcagctgacactggcctttccttagcctgatactacctttccctctttggttgtgttaaagccattgctttattaatgaacattttcttgctaatgagtcttttctgtaccctactgtgtattatagaatgcttttccattcaggtttaacttcagagaaacaggcttaatgtaatcagtgtcaaatgcttctcgtggtgccagttttataacttcctcatgtccttttgtctagaccttatgttgattaaacatctatccattacatctgagtgctagacacatttagtgtaacagttaagtctggaaaaagtcagaaggtaacattggggcagggccttaaagggtgattaggtggggaggctttttaggcggtacaagtacagacccaaaggtatggaaagagcgtgtgacatattgggactttggataagctacttacgtcatttgtatataaaatggggttgacagtagtacctgactcatgggatcactgaggagtaaatgagataatacatataaaatatttaaaatggtacctggcacatggccagtgctcaataaatgttagctcttagaactagttgttcagggcataggatgtgtaaagagattataggtcgggtgaaattctgcatgccatgctaagaaatatttcactgtgggcattagggaactattggaagttaatgagattaaaaaaaaaaacctttttattttgagctaactgtagatttacatgcaattataaaaaataatatagagatcctatatattcttcatccagtttcccccagtggtaacatcttgcataactatagtccagtatcacaacaggataatgattgacattgatacaatccattgactttaggatttcaccagttttatatgcactcatttgtgtgtgtgtgtgtgtgtgtgtgtgtgtgtgttgtgttctatgcattttttaaaggtgtaaatttgtgtgaccgcttccacagtcaggatgcaaaggttccatcacaaggatctctcgttacccttttatagccacagtcatgtcccctcaaccccagtctctggcaactgctaatcttttctccatttctgtaattttgtcattttaagaatgctatatacattgaatcatatagtatataacctttcgagattgcttttttcactcagctgaactcccttgatagccatctaattttgttgtgtgcatcaatagttctttcctttgtattgctgagtagcattccgtgttatagatgtaccatagcttctttaaccattcatttgttaaaggacatatgggtcatttccagttaatggcaattatacataaaggtgctctgaaccttcagttacaggattttgtgtgaacataagcttttatttctctggattaatgcccaggactgcgcttgctgggtcatatggtaagtgcatatttagtttgtaagaaactgcagtactctttcccagagtgtctgtgccattttacattcccaccagcaatgatccagtttttccacattgttgccagtactcaatgttataatgtttattttagccattcctatagatgtgcctggtatctgattgtggttttaatttgcagttccctaatggctacgatgtttgagagtagatttttatcttagattagtcttgaagcaatgcagaaaaaaacctgtacaggagaaagagaccaaatataaagagcattcaggaagcggctctgcctatccatgtcagagaggccagggttctgttgtaaagcacagaagtgaggatggaggaaaggcgtttctagaagatagggaggcattggggtgtctgggattgatggtaaggatttaaacctattcgtggacataagaaaaggagattggggagatattaagaatgagtttgggccgggcacggtggctcacgcccgtaatcctagcactttgggaggccgaggctggtggattgcctgagctcaggagtttgagaccagcctgggcaacacagtgaaaccccatctacttgggaggttgaggcaggagaatcgcttgaacctgagaggcggaagttgcagtgaaccaagatcgcgccattgcactccagcctgggcaacagagtgagactccatctccaaaaaaaaaaaaaaaagaagaagaatgattttgattttgaagatgttgaatttgaagtgcatatgggtaaaattatcagtaggtagagcatagacaagaagtagtgtaggaaaaaacatttagagcctttagtgtgtccacataggtgaagctgtgagagtgagcaggcttacccaaggatggcttgcagagcaggagaaggtggaggctgtggagctggtgtgtggtcctgtgaaatttctggggatagggtccccagcttgtgagagtagagttgacatcagggtttgcagtggcagcagcgagcttttcctctacgaagtggagaagaacagcaggtaggcaccgctgggctttgagtaccctaaaggatatggagtcagccaccactgtagcaggttttcaacatgccactgaagccttatctcagagaaatatgaaggctaataccacttttataaaatttcaggaatccacatgaattttatgaattttatttttattattctttcatgtttcctaaactttttttttttttttttttttttgagacgaagtctccttctgtcacccaggctggagtgcagtggtgcaatctcagctcactgcaacctccacctcccgggctcaagcaattctcctgcctcagcctcctaaacagcaggtgcctacctgctgttctctgttaccacattggccaggctggtcttgaactcctgagctcaagtgatccgcctgccttggcctcccaaagtactgggattacaggcgtcagccaccacatctggccatgaacttttattttttattaaattttttttgtttgtttttttgtagaggcactctcactgttggccaggctgttgttgaactcccagcttcaagcaagcctcccgcctcagcctcccaaagtgctgggattacaggcatgtggcaccacaccctgcccctaaactttgaaatttgagtactgttttcctgatttttactgtatccttgtaatctctgaacttttttaaaagatttcttttattctactctctttctgttacttagtctagacctagcaaaacaacaacaataagcccataggtttattcaagctatttttgtatatacattaaaatgaatgcatcgctactaagtatttttgtaagttcagacaccatctagaatctgcttgaccgttacctgtcaaaaaacaaaatttctcagatgtatttatctttaacttgtcttcatgttacaagtttgctgacagaagcaaccagcaagatgacaagaaattttgtggtctgagaaaattgtataaatggtataaaatggataatgtaagtagttgggaagcagaattcctgtataagcatatagtttttctttttttaaagtaagcagttaattgggcagagattgcaatttcatgtcacatcatcattaccatcatttttatatttgttagagaggaaatctgggacaggatctcccaggatgccaggtatgcctactatctgtcaaaaatttaaaacaaacaacaaaaaagcctctaagtaacaaaagataaggatacatctatggctcttatgtggaaagcaaggtttcattcagcactattagcctttaacacgtggaattaaccgagaagcaggagacctgtgctgctggtgcctcacgcctgtagtcccagcactgtgggaggccgagggaggaggctcgcttgagcctgggagtgcaagaccaacctgggcatcatggtgagacctgtctctacaaaaaaataaaaataaaaataaattagctgggcacaggggtttgtgcctgtagtcccagctacttgggaggctgaggtgggaggatcacttgagcccaggaggtccaggctacagtaagctgtgattgtgccactgcactccaccctgcgtgacagagcgagaccctgtctcaccaaaaaaaaataaagaaagaaagaaaagaaatggtgtcaaacagaagtcagaagcaaagcaccaaagaataagttctgactttgagcaggccagtgcttttcttcttcaaggtgtaagtgaagatgcagattacatggtttgcccatttctcagtattgtgaccaaatcattcttttggaatatgacttggaaaaattgctctattagtcacatcttcaaatatttataatttctcacgtatgcttagaaataattagggttgaaataaagcattcgcacatctacccactttcttcgggactgtaatgttaatgcttgtggccacacacaatttgaggcttagcaggcatcctttaatcctgaagtgttaataaagtggtggtttctgttgctgttagttctttgagcctgagtactaactttggctggcattaggctggcgttacttcagctaacatgaagttttatacctaggctgctcctaaacactgttcctttgcctgaggcatgattattcaggcatggttcctttttttaatcctatttatatatgcacatgtagatcatatgactccacgagccctgatttttttttaagatgcagtcagtgtttattcatttttttaaatttagcaaatatttgaacactcttcaagatgcatgcacagcactgaaccgagtggtctggtgcagataaagataaattggtgctgggcctgcttgtccaccaatagaagcttaaactcacaacacgtactctacatagatgactgtaatttagatgctgtgggaattagtaaaaggagaaagtgcttctctctcagggaactctttaggaggaggtatcatttggctggaaacttgaggaatggatagaatttggagaaatgaagaacttgccaggcaaaagaaagagttgtgggatagggatacctagtccttgttggtattgagcatcaaatgtgtgaagtcttagctatagtgcaatacctcagtgaatttcacattatgtgtggggtttttttgttttttgttttttgtttttgaggtagagtctcactctgtagcccaggctagagggcagtggtgcgatcttggctcactgcaacctccgcctcccaagttcaagcgattctcctctctcagtctcccaagtagctgggattacaggcacatgcaaccacacccagctaattgtttgtatttttagtagagatggggtttcaccatgttagccaggctggtcttgaactcctgacctcaggtgatccctccgcctcagcctctcaaagtgctgggattacaggtgtgagccactgcgcctgggcatgtgtgttcttgaataataagccaaggagtttggattttaattgctttaaattaatatttaagcaaaagcaagacaaagcttgtcagatgcttttatgagctttattttattgtggtggtggtttgttttcttagtgctctcaggcaaaggtaagggtgccttgtttttcattagcatgtctaatctgggaaagaaggaagaatggaaaaataagcagaagtgggccgggcgtggtggctcacgcctgtaatctcagcactttgggaggccgaggcgggcagatcacaaggtcaggagattgagaccatcctggctaacatggtgaaaccctgcctctactaaaaatacaaaaaattagctgggcatggtggcatgcacctgtagtcccagctactcgggagactgaggcaggagaatcgcttgaacccgggagccagagtttgcagtgagccgagatcgcaccactgcactccagcctggggaacagcaagactctgtctcaaaaaaaaaaaaaaaaaaaaaaaagcagaagtaaactaaagttcatgtaccattattactggcacatgaactttagttattttttccccttctctcaaaagtgtgtcattggtgggattttcttcctaccaaattagaatatcctgtgtctaggaaaggtaacaaagcaagtattcataaaatccagggctcttacttagtatttccttagttctgtggtaggctgaccctttaatcttggttggagttttcataattaatgctttgaaatattttggtgagctcaagttgtatcttagggatcaaagatgtgggtctaatctcttaccagaaatgattcgaagatgtattgttaggaaagaaatatgggctcattatagaaaatgtacaaagtgtgtaaagttgtagaaaaaaagtaaccacccttaattcctctacccagagacagccattgttttcataaaatagttttgtctagtacattgtacttttagagtttgctcctgaaagcttttctttacagactaaggacgtgtgaatttgtctatgcccttgtgttttccaagtcaagagtattacctgtgagtcggcttgctgttaggaaggagagcaggaggaaggagattagcattttgcagctctgcattatttttctcttgattgatactcggtgactcagcagattttctggacagggttaagataagtaagaatacctgcctttttttttttttttttttcttctctccctgtaggcatccataaagctttatgaggcacagtagtctcttaggcgctgctgggtgtgacaccgtatctggtctggtgccaggtgttggtctccaatagcagcccagagatctccggctgaggtaacaacagtgtgcgattggtgtggagcccaggtggctctcatgcttggtaactgcattgacagctcgctggggctcttgaggttgggctgctgccgggatcatcagctctcttatgccgtttgctgcaagactgccgcggctttcctaggaagtgctgcttaagggaaataaatatagcctgttggcatgagttaaaggaactttctgtcaaaggggaagaaaagtgttggaattagcttcctgttttttttttttttaagtacctaaatctttatttggttaagataacttggaagttacaaatggttaatgaaaactttttcaatgaaatattgtttccacagttaggtgggtttccgttaatgctttcttttttttagttattattatactttaagttctagggtacatgtacacaacgtgcaggtttgttacatatgtatacgtgtgccatggtggtgggctgcacccattaactcgtcatttacattaggtatatctcctaatgctatccctcccccctccctgttcatgctttttttaatgtcttaccgtttttccctctcttttagtcaaaaataaaaaggtcaacgcaaagaaacagggactccagaaggctttgcaatggttaaacctgtcattattaaactcacagactaatgtgaagttaatttggtgcactgaagtccactaatgagcagaattaaatttatccttttcctccctgccccccttttaaggagttagcctatttagataattagatgttatatatgttttaactatttaagattattttatgaattagctgttcaaagaatcaattgttactagatatcagatgagaacttccacttaccaaagcctgctcatggaggtagaaagcaagactgacatgtgtactttaaaagatggatggaacctcaaaggccgtcttgcccagtccccatttagcctcacctctctgtaggtgaggcccaggagagacacttactaggcagactatgctggggctgggtgagcttcccaaggatgttctttctggaattcggtggctcagaatacagcacttggctcctctttgaagcatgatggctctgttgcctgtctctggcccagtgtgctgggctgctgaaaagagcatggaaccacccaggagacgccacgacactgacagctgtacctgacctgagggttcaggatatgttttcaaaagcaaatctcgctaaaaaggatttgtatgttattatgaaatctatatttatgtggtggaaatagacacactcaggcttttagagataaactacacagaatgggttacaataaatgcttataattgtttggcttttttaagaatcctgttaacttgacaaccttctgtttacttttctttggtattatgcaggtatgatattgagcagtcacttagttttcttaaatgttgtgtctcacagtagaaaaatagccaaaccactcagcccctgacctttgtgtttgcttctcacggtgatcagcagttctggtctgctctgcagtatggtggtcacatgatggaacccagaaagccttgtactaagcatttaacacacattgtgttaggcactggaggaagtttcatttacaaattatattttggcctttttttttttttttttttttgagacggagtctctgtcacccaggctggagtgcagtggcatggtcttggctcactgcaacctctgccttctaggttcaagcaattctcctgccctcagtctcccaagtacctgggattacaggtgtgcaccaccatgcctggctaatttttgcatttttagtagagacaggatttcaccatgttggccaggctggtctcgagtcctgacctcaagtgatccacctgcctgggcctcccaaagtgctgggattataggtgtgagccactgtacctggcctttttttttttttttagctaaagcctgaaaatcttgttgaagggattttgtcaaatgcaaaagaccaatattcacaactctctaaatcagtggttttcaggccaggctgaatgttaaaatcacttgaagaatgttcaacaaataccagtgttggggtcctattccagaccaattaaatcagtctctgggatagaacccagacattggtattgttttaaaactcctctggtgattctagtaggtaggcagtgctgggaatctctagatctcatggaataaagtctgttctctcccctcactcaatggctccaagtgtttcctgtaaatcccgttttacccctgtgattcattttcagtttaatcctttgaaaccttaccatgctattaacaaagttaatcttagacccaacataacaggaactttgaataagttccttggaatttagcttatgaaacaactgaaagccctcaaattcctggtgattatggagtaatgctagattatcaactgcagacaaatacctgttttactgtggtggtggagatatgtttgtgaattgtattgctagctgatcatcggcttgagagtaacatagcacagctacagataagtgagctgatgctcaagttaattcttttctcagtgtagtatagctgttgagtgataggactgagtttagcagcttccctgacttggaataatagctctttcttttgtattctgcttcttccccatataggttgggttctagaattttgctgatcctcttgactgaaatggctactatttggaagttcttaagggaagagcttaagatggtcagggttgtgataacaacccactggggagtaaggatgtggtgggaattgcagaggaaacgtgcttggtaggtttctttaacttgttggagattaggaagggcgggaaggcctgaagtcagccggtcttgggaggacatcagtttttgatctttttaaatttaaaagtgaattttaattcacttttaaatttaatttctaatattctgagtcccttaagaagtatatctagtggcacaacagttccccttaaaagtttgtctttctagatgtttgtcataaaggctgcgtgggcctgggacatctgtagaaatggttttcttggccagaaggatgtatttgaagaggcgcccattgtcttgtttgtcttaaggtcttgtgaatgaggagaggagaggaagacagtgttgtgagatctgaggcctgttgattccgattgtgccccagataccgctttatttgaggggtgtgccagacaggagcaggcagcctttaacccccttggaaaccgaggtacctctctgttgccagttgacacctgcagtctctgccttcaggaacaacttggttgaatcctcagcccgaggcttattaggcaggctaccctgctgttgtccggcctccaggaagggattggattgttcagacggggaacgatttctggcccctggtatctgtcccagaggcctccgtgcaggggaaaagcccttggttgccctgtcagcaggcatttgctctggcagcctgttaaaatgagatgggacagctggagaagtggtggccatggggtgtgataggtgcgctgattatctgaggcctgaggatggcgttagcgcccgcagaagcgtcttttgcaagagcagatctgtctgcttatgaatcgaatgttacctgtttttcataccagaggtgtctatgaatgtgtgtttccctgatctttgtttgaaccttgacagaatctgaattgctttttgttattgttgtttttgtttttctcttttttttttttttgagacggagtctggctctgttgcccaggctggcgtgcagtggtgcgatcttggctcactgcaccctctgcctccttggttcaagcaattctcctgcctcagcctcctgagtagctgggatgacaggcatgcatcaccatacccggcttatttttgtatttttagtagagaccgggatttcaccatgttggccaggctggtctcgaactcccaaccttaggtgatcctcccaccttggcctcccaaaatgctgggattacaagcataagccaccccacccggcagaatctgaacttcattgtccctctttagcttccctgtgaccttactcctgccccattgccattaccttggtaggaaaaatgctgagtatcctagtcacatagtcatggggaagatataaatggcagtcatacttcctcgtttgatatttttctcagctcctggatctgccagtatttttccctttaagacaaagcagctgctgtgggtgcctttctgtgtggctgggtcgtctggccactgacagcctttcagtgtgctgtgctccttaagagaaatgggtcccctcatcttgtttcaggggaaactttaaaaagttacttgtaaaagggattgaaagcatcataacaaaaaacaaatggcctcataaaatacattcctctaggtcagcctatatcagtactaactgtgttagctcttcagctatctagggttaccttagtacgattgacattttgggccacataattctttgttgtgggggctatcctgtgcattgtaggatgttcagcagcatccctggactttacctgctagagctagtagcacccctcaaacatttccagatattgccacatgtcctctgggcaagcaaaacaccctcacttgtgaactcctgggctgcaccgtgcgacacagtactattgtggctattaagcatttgacctgtggccagtctgaactgagatgtgctgtaagcataaaatacctgatttcagagacttagtacgaaaaaagaaatacctcgtttgtaaaatacctaataatttttcacattgattatatgttaaaaaagataatactttgcattgggttaaatgaaatatattatttaaattaatttaccttttactttttatttttagagtcagagtctcactctgtcacccagactgtagtgcggtggcatgaccatggctcactgcagcgtcaaacacctgggctcctgtgatcctcctgcctcagcctcctgagtagctaggactacaatctcgtgccaccatgcctggctaacttttaaattttttatagtgatggggttttggagggttacacagactagtctcaaactcctggcctgaggccatcctcccacctcagcctcccaaagtgttgtgatgacaggcataagccactgtacactgcctactttttactttttaaatgtggctactagaaaaatttaaattacattatgtggcttacatttgcagcttgcattatatttctattggacagtgctgaactagagtgttgatctactgtaggttagccattgattttgtattaggcatttagatccctgtaagctgttgggtttaatgattttttcctttggaagattttcctttatgcagtaaaattatggagacacagagtatgtagtattacatattaccagtttgctctcctgaatccctgctggtagcatattaaaaatcagtttaatgttcagaccgtgtatgtttgtctatatttctctcctttccatattgcattttcttttccatattagattttatctcttttaaggcttatgtggttgtatcttaaatttaatttgtatttctcgattggtgacattgggtctgtgtgttctctcctgtatctagaacagtgcctggcacatagtaggccctcagtaaggactagttgaatgaatggatgaaaaaatactgtattttactttttcagtacaagtccactactcgaaatatattattatgttagctacttggttacttcttatttttatttatttatttatttatttagagacagggtctcactctgtcacccaggctggagtgcagtggcatgatcttggctcacttcagcccgatggtcctggctcaagcgatcctcccacctcagcttcctgagtagctggggctaacggtgtcccttttttgtatttttttgtacaggcggggtttcatcatgttgcccaggctggtctcaagctcctaggctcaagcgatctgcccgcttgagcctcccagagtgctgggattgtaggtgtgagccgccgcgcccagccacttggtcacttctttagctttatcttcccttctcttaatgctaatttccttacgcaaaaaagtttccttttcatgtttgaacctctcttccctttgatacatttctgcttgttgggtgtaaatggaggctgtcccccatcatagctggactaagtatgctatataatttatgtcatcatttttaatgtaatttttgggaggttaattccagatggattaatgtatgatatgaaacctggatatcaattaattcatctccaatctggttagttggtaggaaggtaggtagtaggtaggatgtgagtgactgtctctgtcacccaggctggggtgcagaggtgcaatcatggctcactgtaccctcgacttaccaggatcaagcgatcctcctgccttagcctctcaggtagctggaccacaggtgtgcaccaccatgcccggctagttttaaaaaatgctgtatatagatgggttctcactttgttgcccaggctggtcttgaactcctgggctcaagcgatcctcccactttggcctcccagtgctgagattacaggtgtgagccagtgcacctggcccaatctggtatttatttgtcccaacaatattcactgactcatgattccctaccttgttatattatttatgcttttgtatagtaagcccttatagcttgaatatattaagtcttttctcttggttcattgccatttttaatccattcaaccttagaatgttgataactcactttatggaatgttaactgtggtagaaaatatttatttttaccttcaaatagacatacttttttttttttcctggcatgcttggccatgtgagcttttttaggaagcctagagaggaagagaagttagacatccaagcatatagttagtttcaagtgggagacatctgtgcagttactggcaggttagtataaagatgctgttattttatgtttctttttttttttcttttttttttttgagacagagtctccctctgtcacacaggctgcggttcagtggcgcgatctcagctcactgcaacctgcacctcccaggttcaagcaattcttctgcctcaccctcccgagtagctgggactataggcatgtgccaccatgcccgcctaatttttgtatttttagtagagatgaggttgcaccatattggccaggctggtctcgaactcttgacctcaggtgatccacccgcctcagccttctaaaatgctgggattacaggcgtgagccactacgcctggccctgagtcattgtttatcttaatctggtattcaccctggggaagagagaagagccatttatgaggtacacctgggatcattttgtacagttatggtttatttgcttggttttgttttttgtttttttgttttttttgacaggcccatagcatagtgatcaagacccttagctcaaggctggattgaaatccctgctgtgacctaacatcggtgtgcctcagtttccttagctgtaaaacagggatactagtacctacctcaaagggttgttatgaggattaaattagttagtatctgtaaaccatttaaaacagtgtctggcacatagtacatgctatgttggtttgttataaatttgtataaattttcttaattacctttaagtgaaaagcttgcctttataaatgcatactagtcgtgagatttggctgtacacaaggaagattgctatagcttcctttatttcttgctaatgtcaagacaacctgaggtccacaaaatagaagtgaaagtactaaagttaatagcaattctcttttgcaataatactggagcacatatcctgtaataaagttaattggggcaaactgggtagaagtctaattgctaggagctacatttttttaatcctgtaaccccagggatagaatttatcctaaataatctagaaggagaaaaataaaactataattgtatattatactattaataataagcaaaagctgggtgtggagactcatacctgtaatcccagcactttccgaagccaagaatggaggattgattgcttgagcccaggagctcaagaccagccttggcaacatagtaagaacccgtctctacaaaaaataaaaaaattagccagacatggtggtagtgcatgcctgtagtcccagctactctggaggctgaggtgggagattgcttgagccagggaggtcaaagctgcagtgagctatgattgtgccactgcattccagcctgggtgacagagcaaaatcctgtctcagacaaaaataataataagcaaaacagctagagaatctaaacagaagtggaatgggtaagatcgcctcagtggtatatcatgtagcattaattgatgatatgtagaatgtaagggaaagaaggtattttgaaggtgttttcattgacgtttgaatactgggtgccaaactctctactatgccagaggccagggatataaacaagaggaagacagcttgccctctaggagctcttaccagaagcattgggctgtggtggtataggtacagggaagacataggaggaaggaagtaagttccccgaccttgaaagagtcagggaaaactaaaggaaagaagaaatcgttgagacagaccctaagatttattggctaagtaaattgggataatatagctaacatgtattgaatgtttattatatacccaatattttgctaagcacttttaattatcccattaattcctctcatccctatgtggtagatgcatgtatcattgtaaaaatgagtaaactgaaacttaaatctgtatctatcttctaaaattcatgtttgaaatcactgtatttactatggcttccagctgtgggaaaattctgcctgtggagatcttcatactttaaggccataagaaaaaatagttttgttggagtaagagaattattttctcttgtttttattttttatttatttatttttcatgttaacatttgaaagttcttgccaacagctgaatatctgttgcttattgttttgagagacctgtctctgaaggaggtaggtgcaaatatggagtaggacagtggttccttcaaaggagaagatcctgtatcatatcctgtatttccatcagatatttcattttcctgacttgggcaatgtgtaaagatatgacaacaagattgacaatttgggaaaacgtttaggaaagaataacagggacaggatgtgacttggaaagttcgttgcttagagtagcaaggtttgattctttttgatcaacaatatagacttttccatcctcttactgtgagaatttctactccatgctttgttacatgagaattctgagattagtgctatttcaaccacttttatgggggtttgttaggataaaattgcactgagtgcctgttctaaaaccaaaggcagcaggagagccctgagtctctgccatcagtagtgccactgcagtactcacgagaaacctggggaatgaagacttgcctggcagctttcatttgaatctttttaaaaagagcctttgattttgatgttttccaatataggaagtaacttactacctaggaggtggtgaaacatgacatagttatatatagtaaaaagaacaaaaaccatgcaatcagaggattttaaaaatattaagtccatttagttttctatgaataggttttagtgaaaactgtcactaggcattttagaaatgaagaaaatgaaatcagtgtgttatacacataggaactggcatttttttggttcccaccatctggaatagtcttacagatcggaggcactcggtaagttatttgtggaaagaatggatgaaagctgtgaagattctggtttcctattaatgctaatatgccatgctcatgtaaacatactgatggattgcttgccaagttttcctcttctgatgcttctcaaacatcaaagatgtttatagaacccttctggccggacacggtggcttacacctgtaatcccaacactttgggaggccgaggcaggcggatcatgaggtcaggagatcgagaccagcctggccaacacggtgaaaccccatctctactaaaaatacaaaaaattagccgggcgtggtggcgggtgcctgtaatcccagctactcgggaggctgaggcaggagaatggagtgaacccgggaggcggagcttgcagtgagcttaggtcgcaccactgcactccagcctgggcgacagagtgagactctgtcttaaaaaaaaacaacaacaagaaaaccccttctaactcttgaacttggttcacctggaaaagcaaaagaactagaatagctaaaacaattttgaaaaggaaggataaagttgaaggcatcacactatccaattttaagacttagtttgtagctacagtaatcaagtcagtagtatcaatgtaggggtagacaaatagatcaatgaaatagagtctagaaatagactcacacaggcatggccaacttttcgacataagtgcagcacacctcactggagaaatggtaatcttttcaacacatggtactggaacaaccggacatctgtaggcaaaaaagtgaacctttgccgaaaccttacactttatacaaaaattaactcaaaatgaaccatagatttaaatataaaatgtaaaactataaagcttttaagagagcacataggagaaaatcttcatgacctgggggttggaagaagagttcttaggcatgacactaaaagcacaattgtaaaagaaaaaaattggtaaattagacttcaaaattacaaacttttgctgcatgaatggccctaattaggaggatgaaacatggccataaaatgggagaaaatatttgcaaatcatatgacaaagaactttaatccagaatatataaggaacttgctaaactcaataataaaaaaaaaaattcacttagaaaataagctgtaatttcagcactttgggaggtcaaggtgggaggatcgcttgagcccaggagttcaagaccggcctgggcaacatagtgctgtctccacaaaataaaaataattagctgggtgtggtagcacgtgcccgtagtcccagctacttgggaggtgggaggatcacttgagcctgggagttcaaggctgcaatgagccgtgatcatgccattgcactcccagcctgggcaacagagcaagaccttgtcttaaaaaaaaaaaaaaaaaaacatagaaaatgggcaaaagacttgaacagatacttcagcaaaaagaatgtaggggtgacatataagtacacatagatgttaaacattattcgttcaccattagggtagtgcaaattaaaaccacaataagataccataccacacctattagaatggctaaaataaaatataatgccaatactggccaggtgcggtggctcacgcctgtaatcccagcactttgggagcccaaggcaggcggatcactaggttaggagttcgagaccagcctgaccaacatggtgaaaccccgtctctactaaaaatagaaaaattagccaggcgtggtggtgggcatctgtaatcccagcaactcaggaggctgaggcaggagaattgcttgaaccctggaggcggaggttgcagtgacccgagattgcaccactgcacaccagtctgggcgacagatcaagactccgtcttgggggtaaaaaaaaaaatgccaataccaagcactggtgaggatgtggggaaactagatttctcatccattgctagtgggaatgtaaaatggtactgtggtcaagtaatttcaatgacaactaatatttgaatcataaataatgtcaagctgctttatatacttcttgtgctatcaaaagttaaacaagaagtgagatctccacttgaagtcaggagtttgagactagcctgggcaaaatggcatctctactaaaaatacaaaaattagacgggttggtggtgggcatttgtaatcccagctacttgggaggctgaggcaagtgaattgctggaacccgggaagcggagattgcagtgagccaagattgcgccactgcactccatcctgggtgacagagcgagatgctgtctcaaaaaaaaaaaaaaaaaaaagtgagatctccattccagtacaaatttgtagtggatatatttttcaaactgaaattacagttctagtagtgatttttagacctcgatgatgtatgaggcaaatttccatatttcaagatccgtgtattttggaaatagtggcaatggttgtatagtattgtgaatataattaatgcctctgaattctatacacttaaaatggctaaaatggcaaattttatgttatatatattttgccacatagaaataatccatttaactgtggcatttagttgcttccacataactttccattgaaagtgattaatctgcagtggggtgcatgcatgtaatgatatgataaaggtaaatgtcaagagaggaatctaatagaattctataatgtcttccatgagataaaaggctcaattaaaaatgtgtattcctggatttagctcagtatttggaagttcctgtctttttttttttttttttttttgagacagggtcttgctctgtcacccaggctggagtgcagtggcacaatcttaactcattgcaatctctgcctccctggttcaagagatcctcctacctcagcctcctgagtatctgggactataggtgtgtgccaccacgccctgctaatttttgtatttttggtagagatggggattcaccatgttgaccaggctggtttcagactcctgacctaaggagtctgcctgcctttgcctcccaaagtgctgggcttacaggtgtgagccactgcgcccagcccggcagtaccttcacgaagacatttgcaaaagtggaattgtagactctcattgcaaatcagcattcatagatgaagatttgcaatcaattttgatgaaagggaaaactattttaaaccccagttaagtgaaatgttattcccccataaaagaatttcattcttctcatcagtagacctgcattacaaaaaattgtactcaattattataatctgaattgtgtcaacattttgtggagatttgttttctcttgtaataggagtacctacttaatatctttgattttgcctcttagcccacaaaactgaaaatatttacctctggccttttacagaaaatgtttgtcaacccctagcttaaagcattgatttttctctttttcttcttttatttttttattttttattttttttttgagacggagtctcgctctttcgctcaggccggagtgcagtggcgctatcttggctcactgcaagctccgcctcccaggttcacaccgttctcctgcttcagcctcccgagtagctgggactataggtgcctgccatggcgcccagctaattttttgtatttttttttagtagagacggggtttcaccgtgttagccaggatggtctcgatctcctgacctcgtgatccgcccaccttggcctcccaaagtgctaggattacaggcgtatatgctttgaaagcgatgaaaatctcaccttattctctgttttagctgcatcccagagatgttgatgtattgcagtttcatactgtttagcacagaatatgttctggtttccatttaatgccttctttttatttattaatttaaagagatagagtcttgttctgttgcccagtctggagtgtagtggtgagatcaaagttcactgcagcctcaaactcctgagctcaagcaatcctcccacctcagcctcctgagtagttgagattatataggtacaaattgtcatgcccgtttgatgttttctttcacttacattacttagaagtatattgcataatttctgaacattcagatattttaaaaatctttgttactgaactctaattaaatcctaaagtggtcagagtgcatgtatacatgatgtcagtcttgagatttgttgaggtttgctttatagcccaatgtatagtccattttggcaatgtatttgaagtgacatttttcagatcttttgtcatcttctgaagctttggatatccaaataaggctggtccctgtaacattctgtacctactctgtacagattcccagtttctactcacttaaagtaggtgtgcttgtatttttagtgtatctttctctctcaatccaggaggttttttccttccccttgtgattatatgcagctcataggtaagaaaaacctttgtaatgtacttaaatctcagcagtcctcagctcattatcaagtgccgtagtccctaaccactaaattaagtgttgaccttatacataaggacttcatttaagagcgagttcgttcttgttgttgactcctgtcatgttgtaccattattctcttgaaactggtctgacttgcctttgacaaaaggaaaggagtgtgctttgcagggctatgtgctttcctaataccagaagttatctaaagatacttaactgtgctgtgaactaaagctattgtgtttgatctgcccaggcatccagctgactcctgtatacaaaattctacccgttcagttctgttaatgtttaagttcccgctgttctttggtgggaaaggaggtgatgtataaaaatcaactgctttgtataaggcttggtgtgttaggtgctaaaccacttaactttttcttgatttggggatctattctccttgtttttttgtttgtttgtttgttttttgttttttttttccttcttttagagacagagtcttgctctgtcacccaggctggagtgcagtggtacgatcatagctcattgcagcctccaactcctgggctgaagtcatcctcctgcctccatctcccaagtagctggtactgcaggcacgcatcaccatgcctggctgattttttttttttactttttgtagagatggtgtgttgctgtgttgcccagggtggtcttgaactcctgagctcaaccgatccttccaaagtgtcaggattacaggcgcgagccaccatgcccagctgagatctgttttttactgtttcacaataattgctggaaatatttgtaataatgtgactttcactgctaagacagaaaaggaagataaggaaattgaggaaaatgaagcttctgcttctacaacaggaaagcataaacgtttgagttacttttagagtaaacgggggataagtgtgtctagattcttgacccaccctcttctgccacagtcagacttagaatgcacttttgcatgcacttttgttaatctaatgaacgaacatttatacactttctagttagtaaatacgtgtaactttatatttcagctcatgagatcctttgctgcgtgctgcagggaagtgtagagctcttcagctgtgcagccaggataagaactcacgttctgttctccctgctgctgctgtgacaggggaggcacgtgtacatccaggctctttctgtgtggcagggctgtttaattggggctgatggaaatttttgtcataggaaatgggcaatcagattttcagttagtagtgaaataattgactctcaatccatattgggaaacagaagataaaacatttggtaataaaaatgtaaattttagaacatagaacacaaagagtggtccataagctgggcgcggcagctcacacctataatcccaacactttgggaggctgaggtgggcggatcacgaggtcaagagatcaagaccatcctggccaacatggtgaaaccccgtgtctactaaaaatacaaaaattagctgggcatggtggtgcacgcctgtaacccccctactcggaggctgagacatgagaattgcttgaaccggggaggctgagattgcagtgatccaagatcatgccactgcactccggcctgggcaacagagcgagactccatctcaaaaataaaataaaataaaaacagggccgggcgcggtggctcatgcctgtaatcccagcactttgggaggccaaggcaggtggatcatgaggtcaggagttcgaaaccagcctgaccaacatggtgaaaccccacctctactaaaaatacaaaaattagccaggcatggtggcacatccctgtaatcccagctactcaggaggctgaggcaggagaattgcttgaacccgggaggtggaggttgcaatgagccgagattgcgccactgcactccagcctgggtgacagagggagactctatctcaaaaaaacccaaaaaaacaaagagcggaccctaatgtaacctatggacttcagttaataatgaatctgtattggctcatcaattgtaacaaaggtaccacactaatggaagatgttaataataggaaaaacagatgaggaggacgggagaggtacagaggtatatgggagcattctgtactatctgattagtttttctgtaaaacctaaagatgctaaaaaaaaaaaaaagaaaactgtttaaaatttttaaatatctagcttaatgttccccaatgggttcaaatcatacaaagttagtgtttaacctcctgacccttgcttggaatttctcagttaagatgagtccagtttgcagtttgagctgtttcatcagttccgtttgcctctcgcctgtgtattaactgtgctcttgcctttctccctatctgctggaacagttggaatgccaagatgccttggaaacagcagcccgagccgagggcctctctcttgatgcctccatgcattctcagctcagaatcctggatgaggagcatcccaagggaaagtaccatcatggcttgagtgctctgaagcccatccggactacttccaagtaagatgccgtgctgagtgatgacagtgaagcatcaaaggcctttttttttttttttttttttttttgagatggagtcttgctctgtcgccagtggcatgatctcggctcactgcaacctccgcctcctgggttcaagtgattctcctgcctctcagcctcctgagtagctgggactacaggcgtgcaccaccaccaagcccagctaatttttttgtatttttagtagagacggggttacaccatattggccaggatagtctcaatctcctgacctcatgatctgcccgcctcggcctcccaaagtgctgggattacaggtgtgagccaccgcgcccggcccatcaaagccgttttagaacattcaggctaagattagatcatctggggagactggtctttagctaagagctgtgttcactaaacagtgtccattaaacacgggctgccctctccgtgcgtgttgatagctttgtgatttcggttttctctccttagacaccagcacccagtggacaatgctgggcttttttcctgtatgactttttcgtggctttcttctctggcccgtgtggcccacaagaagggggagctctcaatggaagacgtgtggtctctgtccaagcacgagtcttctgacgtgaactgcagaaggtaggcgcctctggtccaccctcatctcccccatgccgggtgggcagggcctgagctaggagtgtgaagtccacagctctgtgtctttaaagagccgagctgtccagtggagggcgggcggcctggggatgactttctctttgctcttttgctttatctcctatttcacctttgatcctgttttaaccacgggctttctctctctctctcagccccgcttctcttcctgagtctgcagggagattatgttgctgccttgtgacagaatacatttttgtggtagctgattgtcatgattaaaatgtagtttacaactttacattttaccacaggaaccttcagaaagggttgggggcccctgaaaaagaaagttcttattcacaaattgcattcagggatcattttcctgggtggaaagaaaggcttttgctctcatcattttctgtatcctgggaggctccttatacagggtaaatgtgtagttccctaggaagggtattttttcccagaaggtgaagactatgtacataattttaaaggagagacttgtgtgagtggtggcaaaacctggagacaaaaagtggtggcaggcggggagctaggtgtgcctttcccccgaggagatgtgtaacgaggacgtgtgcccttgttaagactagagagactgtggcaagaagagctgaatgaagttgggccagacgctgcttccctgcgaagggttgtgtggatcttctgccgcaccaggctcatcctgtccatcgtgtgcctgatgatcacgcagctggctggcttcagtggaccagtaagttctaaccatcctttccgacagtctccaggggcccggccacggccagctctaacactcttattctgttgcagaggttgtgctcagctttgggctaggtagcagtcttagagatgccttcaggtctgttgaaaggggtcgatggattttggcaacagctggaaggatgaaagggcagtgttgccagagaagaaatggaactggcttgatttctgggtgggggtgaaatggaactgactccagttctgcacaggactgtgcttctcggttgtgtgttaacatgaactgacagtcggtgcaggcagatgtgtcttgcagtgctatgagtgggtgagagcacgttgtgtggcccgggctggtgagccagcaccgggaacataccaagtgcctggaggcagttatcacatgtttggcaggtctgtggcaaataagccctgagaaaactagaggactgtcgaggattttagagtctgacctggagtccgtttaagtttggcttatagtgtgactgtgtggcaagtgttggggtggcagccgtggttttccccagtctgtactgatgcagagtagacaagagagcctttgacgttcactctgtttcctgggcacctgtttcttacacctgctgtgctgccttacacttgagaccttgattaaatctattctctacacatttgccttgaggcatcggagcagtagtactgcttgtactgtgcgttttccatatgtgggtaagctggaggttcatggttttggtaagtatgtgcctaagatgcatggcaattaggtaaaactaatttgcagttttgtttttgtttttatttttttaacgtttgatgcctcttgttaaagttttgatctcttttctgaagcagagaacactacttttctggtattgggtttctatattattaataattgaccaactaacatactttatataaaagttttaagtaagaaggaccatgtaactgaaatgttgtgttatgtaatttaccaaaatggcaaacattttcatagagccagcttcccccaagaagagcttctgtcattgtttcactacagggctggtggctgctctgatctcatagaattcattcctctgggtagcaccatatgcaggctttgcgaataaagtgatcatgggctttcttgattccatttggccaatgcaagaacttcattggctcccctctaaaaaaaattccatggattgctgggatttttattttttattttttgaaaaaaatggtacctatccgtattcagcttggtggcttcacagtccctcccctgaacatccgtatattccttattctctcatttatggtgcagaacactggggtactaacctctaggaaactgttctagctgccagggaaagctaagagccctcctttaacaggaaagcagcagcatgctttttcttctctctgccgtttcagggaagagcaccttaaggccagtgttatttcatgggattctgccctagagctgagaaagtaatggactcatccataatctcttttatagatttgaaagtgtaaacaatacacacttccttttttggaactccaattctaatatgtttctttttcattggaaattgaaaaaccaggctggttttgagattagtactagcagtgagtaaacctcctgtctgtggacttaaatccttttgaggaacatttcgttttagatttttacaagttttctaatctggcacgactttcaaactagcttaatctgttcttacagaaacctgtgtaaggacagactgcccacatacgggctccccaaataaaatggcatttttatttcttgtccctgctcgggtttcaccgaaccttggtagccataatcagaacaaatgaaacacagtcaagttgttgtgttctgtttgtttttacctgccagccagctgatgctgacatttatacaccaagatgatccaaggttttggtgacgccggtggggactgccgctatatgtgcagggtgcccgggggtcatagtaatgttaatggagtaccagaatctctaacagtgtggtcctgtgtagccacattgctacacttacagagatgctttggggcctttttggattaagacagttctaaaagaccaggcctcacctatgatctgtgtataaagaattagcatcgcactgtagatctgcaagagaaggccgcctcctgcagtgctctctcttggtgaatgctaactctgctcgagggccttttggggaaaggacagtgtaaaacccttagagaggtaagtttcccacccttccaacctctctccacctgcagcttgcttggtgctgtcaggatctggatttggggggagtctctctgtagtggaaccagtgacagaagctgttctttagaattttcaggatggctgtattctgcggtcagaatgagagagtcaagctgggcagaatctctcgccaagagttcaggtaaggtaatgtttattcactgggaatgctttccacagccagacagctatgctaacagtctcaagttttcttccagtttgtttagatttaaatgatacatttgtaactttttaaaaactaaattttggttggatttttcatgaaaacctcttttttctttatcccctaaaaaatggtttgaaatgtcattgttatttaaaaacccgatgtgttggaacttctttaatctgctgtttcctctttttccccccctttgaaagtttcgcatagtgtaaacattcactatgtcttttaccttccctgctcctcccatctgggaggcgctgatgctattacccagtgctgaaaaatggcactctaaaggtatgggaaggaaggagcccaaggcaaccacctgctgtcctttcagccttcctttggagactgctccatcagtgccgaggtgtgtgggaacaggcttcactgcaccgccatcttactgagttgcttcacgtgaggaaaagggggctttggccctgtgactcagttccacattttggattgcatactggaaaagaagccaatcttcttgctagtaaaccagcaacccggctgtatacagtggtgacccaagcaatggatataaacctaaaaatctgagggaggggagaggtggaatacagtagttcttggaatctgaagtctcctatttgatcaggttatttcctgggacttggcaaaaatctgattggtggggatctcctaggacctagtggacatctggtattaatttaatctcaggaaaaacaagaaattaacccagagagagtctgggttttggaattcagcgtagctacctccagaccgtggtgtctggcctccatttttgtctgtcattcagctctgacttacagctgcagtcacctttgctataaggcacctgggtagaagggtggatgggcttcacatcaatttttttcttcctttagggtgggggattggtttggctttcttttgttgtggttttttgttttatttttgtcaagattgatttttagatgcaaggacttgaaaagacccagaaggatgccaccagtttttccttgaggcctaggattttttattctgtcccgagcagaggtaattcctcacaacttagtgcaccagtagcaccagccattttgagcagagtacctctttggggagcttttcgttttgttttgtttttaattctctttccttagcagcaaggtcttttttcctagagaatctactccgttgcagaatcattgcaacctcaggagccctcactgattgagtgctgtcagcctgatatactactttggactctggaaacagatatgggttctattctctatttctactgtgtgtcgttaaacaaccgtcggagaccagatgacctgttagatggctagtcctgtataactcgactctgtatgtttcaatgtatgttactgcaatgcttcacctgctgtacagtgtttgtgagatgctctttgaagatggtacttttatattttttcattttcaataaaagtacattccttccca

SEQ ID NO: 15302 - DNA, 97898 bp, Homo sapiens
ggcgcaggtaggtgatggctgctgccgcacccctgccctccagctcggttgtcacggggatcacccctttgcatttcctcggggcgtggcgggatgtggccagggctgcgagcagttcgggggacactggagacttggggaacggcgtatggcctccccctggtctcctgccgccgcctcctaggcctgtgagcccggggtctggtgacggggtcgtgtgctggaagacaggcaggtaggatcgggatgagcgggcagggacgcgggctacgtccctggccgcggccgccagggggcgctgcgcccgcgggccgtgggtgtgggtcgcgctcgcctgggcaggccggagcgggctgtgggaacgccctagggcccgggcatcccaggcgaagcgggtctgagagaaacgcccacctgggaggctgtgcagcgggtggctcggggcaccctgctcaacccgcagcggagccgccagcgaccttcgaagtaagtcatccccttcgtttttgcaagcgggtaaatggaggtacgtgacataagcacgcgcagcaaagccgtggctgtgccgggaacgcagcccagatctctccacggtcatccagtgctcttttcgcttctgccacacagagccgcgggtggctttgtgtttatcacacaggggccatttggtttctgcacagacggagaggctggaggcaggtgggcacaggaacgacggggaaagtttcaggaggtcttggaggaggagatggctaggttttactgtggtccgcagcgtgtatgaaaggtgaggctgcttggagacgcaacaagtggattacagtgggtgtggtaaatacgtatccctttagcgtggtgtcttcctcgtgcagcttgagggcctggaggtgatggaaacctactcatgagtgttgggatgactgcagcttgcacacaccagtctggtaatcccgtgcaactctcctcctgccatgcagttgaatcagtatcattgtgcagggagagtgtctacacttttatcagtggaaagagaatcttggtaaaaaagggcagctgactaagtggcctcaaccctattgggcacttctttggggttctcccacgttgattattctgcttctacccttgtacatgtctggacaacaggtttgttttttacaaacaaaaatcccttctctttcttcctctcttgatagctgaggcaagtgagcatttaaaaaagatattccaacaactttaaaggaggacacgagaagatagggaaatataaatagtatcagtaaaatggctggcctggggatccatccttgcttgcttgcttgcttcagactggggctttgtttctttccaaacctgtcaggattcccagctcttcgccggcctccacgtggggtgccctcttttatgttccagatacacagacgatggtgtccttatgttcaaggccacagacagtaactttgtgcctactttgggcctgcctgctctcctgattgtgcctctttttccaggaaagtagagatgagtgtgttagagataatggaacactgttccccacacccttcatacatagaataacttagtcccttaggatagtttagcagtgtctaccacagcagtcactgtaggcacaaaacagtcattatttgtgtcataacagggaagtcgttttgtccctgcctctctctgctcctgtgctccactgattctacttcatcctttgaaataaaagtggttgaaagaatctttggttatcatgggtgcttagataattaagattatgttcgtgttcttcttgatgtggcatttcatattgtggatgagttccagtgacctcctctgtttcaaactgctcaccgccccaacccccaccttttaaaaaggtagtactaatcttttcctcttccagataatcagctaagctagggaacccttgaaggggaaggttagaatttcgtgattcccgtaagaaggttactctgatctacagctacagctcaacactggggacactggcagatgccaggtctgtttatagtttagccttaatgaggtctcaatgacgtgattgctgcactctggcttggtgagccgctgttctttatggtgtagtttgtcattggacaaggtgactttttttttttttttaaagataagtaacagctatatcaacttagggtacttgaaccagaattctgaaaggcaagaaatcaagctttctttggactggaaacctgtctttgcataggagatttagtcctttttattcagaggattagtaagtgttctctttttatctgacactttaaaaattgcattataatggttagaattttgtgctgcagaagtagtagttttaagtcacagcgatagccagggatttatggaatccagaaggcgacacggctacacgtctttaatttccgttggaggctagtatgaaaggtgttttctcagcttgtctctgggaggctgtgacccttcttagaggggggaaacattttggagaagtatgtatgtgttttttgtttttaagtgacctgagttgatacagcatattgattagacttagccaggcaagcagtggtttagaatagagtttcaggtaaaaactaggtaagacttagtaatacagggtggagaatttgtttttgttattgttttttactaacagctttgttgccataggatttatatgacatgaaattcactcttttaaagtataaattcagtgtgttttttttcaatgtattcactgcattgtgcaaccattaccactatctagttttagaacattttcagtacccagggaatttgtgtttgaagttaagttataacattgttttaactggataacttcatggagctttaaaataacaccagctaacccattagttaattataaaaaggcagagatggaatatatcattggtagaataagtgtttggtaagtttttatttagtaaaatttagtagaagaaatgatgtccactttaaaattgtggagtttttaatacttgggacaaactgaaattgtttctagaaagtctttaaaaaaaaaaccaacctttctattgtatacactggatttgagcttagttgaagagaatgggtgtctctttactagtgtgtttactgtttctaattttttttcccttagagttgggagaaggtaatttttcttgattctcttatactgaatctttttctttaaaaaaatgaaatcaaaatctttgaactttttttgaaaattaatttttgtagctataacagtagaaagctttagtacttttgccttttttttttttttcctatttttaaggcacttgagcttatggttaagtactgtttaggaaataatctatttcttgatgaatttttaatttcaggaattctgatgtgaaactaacagtctgtgagccctggaacctccactcagagaagatgaaggatatcgacataggaaaagagtatatcatccccagtcctgggtatagaagtgtgagggagagaaccagcacttctgggacgcacagagaccgtgaagattccaagttcaggagaactcgaccggtcagtttcctttcctaagagtctcttacctgcttgttgtactaaaacacatcttttttcgtataatgggtaatttagaaacttattttttggccgggcgcggtggctcacgcctataaacccagcactttgggaggctgaggcgggtggatcatctgaggtcaggagttcgagaccagcctgaccaacatggtgaaaacctgtctctactaaaagtacaaaaattagccaggcgtggtggcgggcgcctataatcccagatacttgcgaggctgaggcacgagaatcgcttgaacccaagaggcggaggttgcagtgagctgggatcatgccactgcactccagcctgggcgatagagcgagactcagtctcaaaaaaaaatgtgtttttctttattggctttaggttactgttaagaatttatggttattgataagtctctggtccatagtaagcactcaataagtggaagagaggctggctgtcaccctctcacccggtctgttctgagcattctcctctttttcacttttattctatgttggtgccttctgaaaaggctatacttaacagaagacaacttattgagggggagggggtcatggggtcaatgacagggaatataaagccaattaagcttcattcatgtacctaaacaaaattggtgttttcttctactttctgtcatgtgtgtttaaaatgtgaacctggccaggcacagtggctcatgcttgtaatcccagcactttgggaggttgaggtgggtgggtcacttgaggtcaggagtttgagaccagcctggccaacacggtgaaaccctgtctctgctaaaaatacaaaaattagtgaggtgtggtggtgggcacctgtactcccagctactcaggagggaggcaggagaattgcttgaatccaggaggcagaggttgcagtgagccaagatcacgccactgcactccagcctgggcaacagagtgagactccgtctccaaaaaaataaaaaataaaataaaatgtgaatcctttggagagactcagatttcagaacaattctagatagttgtgggattatcagtatgtttttcaagcgaattcataagttaagcagtctttagataataatctaatttcctccaagggaaataatgaagatgcgtttttacctcgagaaaatattctttttcctgaggaaaaaaagcattataccttttcttacaaaagtacctaataaggcagaatggactaggtttaggaagttgaggtttttgttggtgtatttgttatgtgaaaatttgagaaagataatggactttgcagctgacactggcctttccttagcctgatactacctttccctctttggttgtgttaaagccattgctttattaatgaacattttcttgctaatgagtcttttctgtaccctactgtgtattatagaatgcttttccattcaggtttaacttcagagaaacaggcttaatgtaatcagtgtcaaatgcttctcgtggtgccagttttataacttcctcatgtccttttgtctagaccttatgttgattaaacatctatccattacatctgagtgctagacacatttagtgtaacagttaagtctggaaaaagtcagaaggtaacattggggcagggccttaaagggtgattaggtggggaggctttttaggcggtacaagtacagacccaaaggtatggaaagagcgtgtgacatattgggactttggataagctacttacgtcatttgtatataaaatggggttgacagtagtacctgactcatgggatcactgaggagtaaatgagataatacatataaaatatttaaaatggtacctggcacatggccagtgctcaataaatgttagctcttagaactagttgttcagggcataggatgtgtaaagagattataggtcgggtgaaattctgcatgccatgctaagaaatatttcactgtgggcattagggaactattggaagttaatgagattaaaaaaaaaaacctttttattttgagctaactgtagatttacatgcaattataaaaaataatatagagatcctatatattcttcatccagtttcccccagtggtaacatcttgcataactatagtccagtatcacaacaggataatgattgacattgatacaatccattgactttaggatttcaccagttttatatgcactcatttgtgtgtgtgtgtgtgtgtgtgtgtgtgtgtgttgtgttctatgcattttttaaaggtgtaaatttgtgtgaccgcttccacagtcaggatgcaaaggttccatcacaaggatctctcgttacccttttatagccacagtcatgtcccctcaaccccagtctctggcaactgctaatcttttctccatttctgtaattttgtcattttaagaatgctatatacattgaatcatatagtatataacctttcgagattgcttttttcactcagctgaactcccttgatagccatctaattttgttgtgtgcatcaatagttctttcctttgtattgctgagtagcattccgtgttatagatgtaccatagcttctttaaccattcatttgttaaaggacatatgggtcatttccagttaatggcaattatacataaaggtgctctgaaccttcagttacaggattttgtgtgaacataagcttttatttctctggattaatgcccaggactgcgcttgctgggtcatatggtaagtgcatatttagtttgtaagaaactgcagtactctttcccagagtgtctgtgccattttacattcccaccagcaatgatccagtttttccacattgttgccagtactcaatgttataatgtttattttagccattcctatagatgtgcctggtatctgattgtggttttaatttgcagttccctaatggctacgatgtttgagagtagatttttatcttagattagtcttgaagcaatgcagaaaaaaacctgtacaggagaaagagaccaaatataaagagcattcaggaagcggctctgcctatccatgtcagagaggccagggttctgttgtaaagcacagaagtgaggatggaggaaaggcgtttctagaagatagggaggcattggggtgtctgggattgatggtaaggatttaaacctattcgtggacataagaaaaggagattggggagatattaagaatgagtttgggccgggcacggtggctcacgcccgtaatcctagcactttgggaggccgaggctggtggattgcctgagctcaggagtttgagaccagcctgggcaacacagtgaaaccccatctacttgggaggttgaggcaggagaatcgcttgaacctgagaggcggaagttgcagtgaaccaagatcgcgccattgcactccagcctgggcaacagagtgagactccatctccaaaaaaaaaaaaaaaagaagaagaatgattttgattttgaagatgttgaatttgaagtgcatatgggtaaaattatcagtaggtagagcatagacaagaagtagtgtaggaaaaaacatttagagcctttagtgtgtccacataggtgaagctgtgagagtgagcaggcttacccaaggatggcttgcagagcaggagaaggtggaggctgtggagctggtgtgtggtcctgtgaaatttctggggatagggtccccagcttgtgagagtagagttgacatcagggtttgcagtggcagcagcgagcttttcctctacgaagtggagaagaacagcaggtaggcaccgctgggctttgagtaccctaaaggatatggagtcagccaccactgtagcaggttttcaacatgccactgaagccttatctcagagaaatatgaaggctaataccacttttataaaatttcaggaatccacatgaattttatgaattttatttttattattctttcatgtttcctaaactttttttttttttttttttttttgagacgaagtctccttctgtcacccaggctggagtgcagtggtgcaatctcagctcactgcaacctccacctcccgggctcaagcaattctcctgcctcagcctcctaaacagcaggtgcctacctgctgttctctgttaccacattggccaggctggtcttgaactcctgagctcaagtgatccgcctgccttggcctcccaaagtactgggattacaggcgtcagccaccacatctggccatgaacttttattttttattaaattttttttgtttgtttttttgtagaggcactctcactgttggccaggctgttgttgaactcccagcttcaagcaagcctcccgcctcagcctcccaaagtgctgggattacaggcatgtggcaccacaccctgcccctaaactttgaaatttgagtactgttttcctgatttttactgtatccttgtaatctctgaacttttttaaaagatttcttttattctactctctttctgttacttagtctagacctagcaaaacaacaacaataagcccataggtttattcaagctatttttgtatatacattaaaatgaatgcatcgctactaagtatttttgtaagttcagacaccatctagaatctgcttgaccgttacctgtcaaaaaacaaaatttctcagatgtatttatctttaacttgtcttcatgttacaagtttgctgacagaagcaaccagcaagatgacaagaaattttgtggtctgagaaaattgtataaatggtataaaatggataatgtaagtagttgggaagcagaattcctgtataagcatatagtttttctttttttaaagtaagcagttaattgggcagagattgcaatttcatgtcacatcatcattaccatcatttttatatttgttagagaggaaatctgggacaggatctcccaggatgccaggtatgcctactatctgtcaaaaatttaaaacaaacaacaaaaaagcctctaagtaacaaaagataaggatacatctatggctcttatgtggaaagcaaggtttcattcagcactattagcctttaacacgtggaattaaccgagaagcaggagacctgtgctgctggtgcctcacgcctgtagtcccagcactgtgggaggccgagggaggaggctcgcttgagcctgggagtgcaagaccaacctgggcatcatggtgagacctgtctctacaaaaaaataaaaataaaaataaattagctgggcacaggggtttgtgcctgtagtcccagctacttgggaggctgaggtgggaggatcacttgagcccaggaggtccaggctacagtaagctgtgattgtgccactgcactccaccctgcgtgacagagcgagaccctgtctcaccaaaaaaaaataaagaaagaaagaaaagaaatggtgtcaaacagaagtcagaagcaaagcaccaaagaataagttctgactttgagcaggccagtgcttttcttcttcaaggtgtaagtgaagatgcagattacatggtttgcccatttctcagtattgtgaccaaatcattcttttggaatatgacttggaaaaattgctctattagtcacatcttcaaatatttataatttctcacgtatgcttagaaataattagggttgaaataaagcattcgcacatctacccactttcttcgggactgtaatgttaatgcttgtggccacacacaatttgaggcttagcaggcatcctttaatcctgaagtgttaataaagtggtggtttctgttgctgttagttctttgagcctgagtactaactttggctggcattaggctggcgttacttcagctaacatgaagttttatacctaggctgctcctaaacactgttcctttgcctgaggcatgattattcaggcatggttcctttttttaatcctatttatatatgcacatgtagatcatatgactccacgagccctgatttttttttaagatgcagtcagtgtttattcatttttttaaatttagcaaatatttgaacactcttcaagatgcatgcacagcactgaaccgagtggtctggtgcagataaagataaattggtgctgggcctgcttgtccaccaatagaagcttaaactcacaacacgtactctacatagatgactgtaatttagatgctgtgggaattagtaaaaggagaaagtgcttctctctcagggaactctttaggaggaggtatcatttggctggaaacttgaggaatggatagaatttggagaaatgaagaacttgccaggcaaaagaaagagttgtgggatagggatacctagtccttgttggtattgagcatcaaatgtgtgaagtcttagctatagtgcaatacctcagtgaatttcacattatgtgtggggtttttttgttttttgttttttgtttttgaggtagagtctcactctgtagcccaggctagagggcagtggtgcgatcttggctcactgcaacctccgcctcccaagttcaagcgattctcctctctcagtctcccaagtagctgggattacaggcacatgcaaccacacccagctaattgtttgtatttttagtagagatggggtttcaccatgttagccaggctggtcttgaactcctgacctcaggtgatccctccgcctcagcctctcaaagtgctgggattacaggtgtgagccactgcgcctgggcatgtgtgttcttgaataataagccaaggagtttggattttaattgctttaaattaatatttaagcaaaagcaagacaaagcttgtcagatgcttttatgagctttattttattgtggtggtggtttgttttcttagtgctctcaggcaaaggtaagggtgccttgtttttcattagcatgtctaatctgggaaagaaggaagaatggaaaaataagcagaagtgggccgggcgtggtggctcacgcctgtaatctcagcactttgggaggccgaggcgggcagatcacaaggtcaggagattgagaccatcctggctaacatggtgaaaccctgcctctactaaaaatacaaaaaattagctgggcatggtggcatgcacctgtagtcccagctactcgggagactgaggcaggagaatcgcttgaacccgggagccagagtttgcagtgagccgagatcgcaccactgcactccagcctggggaacagcaagactctgtctcaaaaaaaaaaaaaaaaaaaaaaaagcagaagtaaactaaagttcatgtaccattattactggcacatgaactttagttattttttccccttctctcaaaagtgtgtcattggtgggattttcttcctaccaaattagaatatcctgtgtctaggaaaggtaacaaagcaagtattcataaaatccagggctcttacttagtatttccttagttctgtggtaggctgaccctttaatcttggttggagttttcataattaatgctttgaaatattttggtgagctcaagttgtatcttagggatcaaagatgtgggtctaatctcttaccagaaatgattcgaagatgtattgttaggaaagaaatatgggctcattatagaaaatgtacaaagtgtgtaaagttgtagaaaaaaagtaaccacccttaattcctctacccagagacagccattgttttcataaaatagttttgtctagtacattgtacttttagagtttgctcctgaaagcttttctttacagactaaggacgtgtgaatttgtctatgcccttgtgttttccaagtcaagagtattacctgtgagtcggcttgctgttaggaaggagagcaggaggaaggagattagcattttgcagctctgcattatttttctcttgattgatactcggtgactcagcagattttctggacagggttaagataagtaagaatacctgcctttttttttttttttttttcttctctccctgtaggcatccataaagctttatgaggcacagtagtctcttaggcgctgctgggtgtgacaccgtatctggtctggtgccaggtgttggtctccaatagcagcccagagatctccggctgaggtaacaacagtgtgcgattggtgtggagcccaggtggctctcatgcttggtaactgcattgacagctcgctggggctcttgaggttgggctgctgccgggatcatcagctctcttatgccgtttgctgcaagactgccgcggctttcctaggaagtgctgcttaagggaaataaatatagcctgttggcatgagttaaaggaactttctgtcaaaggggaagaaaagtgttggaattagcttcctgttttttttttttttaagtacctaaatctttatttggttaagataacttggaagttacaaatggttaatgaaaactttttcaatgaaatattgtttccacagttaggtgggtttccgttaatgctttcttttttttagttattattatactttaagttctagggtacatgtacacaacgtgcaggtttgttacatatgtatacgtgtgccatggtggtgggctgcacccattaactcgtcatttacattaggtatatctcctaatgctatccctcccccctccctgttcatgctttttttaatgtcttaccgtttttccctctcttttagtcaaaaataaaaaggtcaacgcaaagaaacagggactccagaaggctttgcaatggttaaacctgtcattattaaactcacagactaatgtgaagttaatttggtgcactgaagtccactaatgagcagaattaaatttatccttttcctccctgccccccttttaaggagttagcctatttagataattagatgttatatatgttttaactatttaagattattttatgaattagctgttcaaagaatcaattgttactagatatcagatgagaacttccacttaccaaagcctgctcatggaggtagaaagcaagactgacatgtgtactttaaaagatggatggaacctcaaaggccgtcttgcccagtccccatttagcctcacctctctgtaggtgaggcccaggagagacacttactaggcagactatgctggggctgggtgagcttcccaaggatgttctttctggaattcggtggctcagaatacagcacttggctcctctttgaagcatgatggctctgttgcctgtctctggcccagtgtgctgggctgctgaaaagagcatggaaccacccaggagacgccacgacactgacagctgtacctgacctgagggttcaggatatgttttcaaaagcaaatctcgctaaaaaggatttgtatgttattatgaaatctatatttatgtggtggaaatagacacactcaggcttttagagataaactacacagaatgggttacaataaatgcttataattgtttggcttttttaagaatcctgttaacttgacaaccttctgtttacttttctttggtattatgcaggtatgatattgagcagtcacttagttttcttaaatgttgtgtctcacagtagaaaaatagccaaaccactcagcccctgacctttgtgtttgcttctcacggtgatcagcagttctggtctgctctgcagtatggtggtcacatgatggaacccagaaagccttgtactaagcatttaacacacattgtgttaggcactggaggaagtttcatttacaaattatattttggcctttttttttttttttttttttgagacggagtctctgtcacccaggctggagtgcagtggcatggtcttggctcactgcaacctctgccttctaggttcaagcaattctcctgccctcagtctcccaagtacctgggattacaggtgtgcaccaccatgcctggctaatttttgcatttttagtagagacaggatttcaccatgttggccaggctggtctcgagtcctgacctcaagtgatccacctgcctgggcctcccaaagtgctgggattataggtgtgagccactgtacctggcctttttttttttttttagctaaagcctgaaaatcttgttgaagggattttgtcaaatgcaaaagaccaatattcacaactctctaaatcagtggttttcaggccaggctgaatgttaaaatcacttgaagaatgttcaacaaataccagtgttggggtcctattccagaccaattaaatcagtctctgggatagaacccagacattggtattgttttaaaactcctctggtgattctagtaggtaggcagtgctgggaatctctagatctcatggaataaagtctgttctctcccctcactcaatggctccaagtgtttcctgtaaatcccgttttacccctgtgattcattttcagtttaatcctttgaaaccttaccatgctattaacaaagttaatcttagacccaacataacaggaactttgaataagttccttggaatttagcttatgaaacaactgaaagccctcaaattcctggtgattatggagtaatgctagattatcaactgcagacaaatacctgttttactgtggtggtggagatatgtttgtgaattgtattgctagctgatcatcggcttgagagtaacatagcacagctacagataagtgagctgatgctcaagttaattcttttctcagtgtagtatagctgttgagtgataggactgagtttagcagcttccctgacttggaataatagctctttcttttgtattctgcttcttccccatataggttgggttctagaattttgctgatcctcttgactgaaatggctactatttggaagttcttaagggaagagcttaagatggtcagggttgtgataacaacccactggggagtaaggatgtggtgggaattgcagaggaaacgtgcttggtaggtttctttaacttgttggagattaggaagggcgggaaggcctgaagtcagccggtcttgggaggacatcagtttttgatctttttaaatttaaaagtgaattttaattcacttttaaatttaatttctaatattctgagtcccttaagaagtatatctagtggcacaacagttccccttaaaagtttgtctttctagatgtttgtcataaaggctgcgtgggcctgggacatctgtagaaatggttttcttggccagaaggatgtatttgaagaggcgcccattgtcttgtttgtcttaaggtcttgtgaatgaggagaggagaggaagacagtgttgtgagatctgaggcctgttgattccgattgtgccccagataccgctttatttgaggggtgtgccagacaggagcaggcagcctttaacccccttggaaaccgaggtacctctctgttgccagttgacacctgcagtctctgccttcaggaacaacttggttgaatcctcagcccgaggcttattaggcaggctaccctgctgttgtccggcctccaggaagggattggattgttcagacggggaacgatttctggcccctggtatctgtcccagaggcctccgtgcaggggaaaagcccttggttgccctgtcagcaggcatttgctctggcagcctgttaaaatgagatgggacagctggagaagtggtggccatggggtgtgataggtgcgctgattatctgaggcctgaggatggcgttagcgcccgcagaagcgtcttttgcaagagcagatctgtctgcttatgaatcgaatgttacctgtttttcataccagaggtgtctatgaatgtgtgtttccctgatctttgtttgaaccttgacagaatctgaattgctttttgttattgttgtttttgtttttctcttttttttttttttgagacggagtctggctctgttgcccaggctggcgtgcagtggtgcgatcttggctcactgcaccctctgcctccttggttcaagcaattctcctgcctcagcctcctgagtagctgggatgacaggcatgcatcaccatacccggcttatttttgtatttttagtagagaccgggatttcaccatgttggccaggctggtctcgaactcccaaccttaggtgatcctcccaccttggcctcccaaaatgctgggattacaagcataagccaccccacccggcagaatctgaacttcattgtccctctttagcttccctgtgaccttactcctgccccattgccattaccttggtaggaaaaatgctgagtatcctagtcacatagtcatggggaagatataaatggcagtcatacttcctcgtttgatatttttctcagctcctggatctgccagtatttttccctttaagacaaagcagctgctgtgggtgcctttctgtgtggctgggtcgtctggccactgacagcctttcagtgtgctgtgctccttaagagaaatgggtcccctcatcttgtttcaggggaaactttaaaaagttacttgtaaaagggattgaaagcatcataacaaaaaacaaatggcctcataaaatacattcctctaggtcagcctatatcagtactaactgtgttagctcttcagctatctagggttaccttagtacgattgacattttgggccacataattctttgttgtgggggctatcctgtgcattgtaggatgttcagcagcatccctggactttacctgctagagctagtagcacccctcaaacatttccagatattgccacatgtcctctgggcaagcaaaacaccctcacttgtgaactcctgggctgcaccgtgcgacacagtactattgtggctattaagcatttgacctgtggccagtctgaactgagatgtgctgtaagcataaaatacctgatttcagagacttagtacgaaaaaagaaatacctcgtttgtaaaatacctaataatttttcacattgattatatgttaaaaaagataatactttgcattgggttaaatgaaatatattatttaaattaatttaccttttactttttatttttagagtcagagtctcactctgtcacccagactgtagtgcggtggcatgaccatggctcactgcagcgtcaaacacctgggctcctgtgatcctcctgcctcagcctcctgagtagctaggactacaatctcgtgccaccatgcctggctaacttttaaattttttatagtgatggggttttggagggttacacagactagtctcaaactcctggcctgaggccatcctcccacctcagcctcccaaagtgttgtgatgacaggcataagccactgtacactgcctactttttactttttaaatgtggctactagaaaaatttaaattacattatgtggcttacatttgcagcttgcattatatttctattggacagtgctgaactagagtgttgatctactgtaggttagccattgattttgtattaggcatttagatccctgtaagctgttgggtttaatgattttttcctttggaagattttcctttatgcagtaaaattatggagacacagagtatgtagtattacatattaccagtttgctctcctgaatccctgctggtagcatattaaaaatcagtttaatgttcagaccgtgtatgtttgtctatatttctctcctttccatattgcattttcttttccatattagattttatctcttttaaggcttatgtggttgtatcttaaatttaatttgtatttctcgattggtgacattgggtctgtgtgttctctcctgtatctagaacagtgcctggcacatagtaggccctcagtaaggactagttgaatgaatggatgaaaaaatactgtattttactttttcagtacaagtccactactcgaaatatattattatgttagctacttggttacttcttatttttatttatttatttatttatttagagacagggtctcactctgtcacccaggctggagtgcagtggcatgatcttggctcacttcagcccgatggtcctggctcaagcgatcctcccacctcagcttcctgagtagctggggctaacggtgtcccttttttgtatttttttgtacaggcggggtttcatcatgttgcccaggctggtctcaagctcctaggctcaagcgatctgcccgcttgagcctcccagagtgctgggattgtaggtgtgagccgccgcgcccagccacttggtcacttctttagctttatcttcccttctcttaatgctaatttccttacgcaaaaaagtttccttttcatgtttgaacctctcttccctttgatacatttctgcttgttgggtgtaaatggaggctgtcccccatcatagctggactaagtatgctatataatttatgtcatcatttttaatgtaatttttgggaggttaattccagatggattaatgtatgatatgaaacctggatatcaattaattcatctccaatctggttagttggtaggaaggtaggtagtaggtaggatgtgagtgactgtctctgtcacccaggctggggtgcagaggtgcaatcatggctcactgtaccctcgacttaccaggatcaagcgatcctcctgccttagcctctcaggtagctggaccacaggtgtgcaccaccatgcccggctagttttaaaaaatgctgtatatagatgggttctcactttgttgcccaggctggtcttgaactcctgggctcaagcgatcctcccactttggcctcccagtgctgagattacaggtgtgagccagtgcacctggcccaatctggtatttatttgtcccaacaatattcactgactcatgattccctaccttgttatattatttatgcttttgtatagtaagcccttatagcttgaatatattaagtcttttctcttggttcattgccatttttaatccattcaaccttagaatgttgataactcactttatggaatgttaactgtggtagaaaatatttatttttaccttcaaatagacatacttttttttttttcctggcatgcttggccatgtgagcttttttaggaagcctagagaggaagagaagttagacatccaagcatatagttagtttcaagtgggagacatctgtgcagttactggcaggttagtataaagatgctgttattttatgtttctttttttttttcttttttttttttgagacagagtctccctctgtcacacaggctgcggttcagtggcgcgatctcagctcactgcaacctgcacctcccaggttcaagcaattcttctgcctcaccctcccgagtagctgggactataggcatgtgccaccatgcccgcctaatttttgtatttttagtagagatgaggttgcaccatattggccaggctggtctcgaactcttgacctcaggtgatccacccgcctcagccttctaaaatgctgggattacaggcgtgagccactacgcctggccctgagtcattgtttatcttaatctggtattcaccctggggaagagagaagagccatttatgaggtacacctgggatcattttgtacagttatggtttatttgcttggttttgttttttgtttttttgttttttttgacaggcccatagcatagtgatcaagacccttagctcaaggctggattgaaatccctgctgtgacctaacatcggtgtgcctcagtttccttagctgtaaaacagggatactagtacctacctcaaagggttgttatgaggattaaattagttagtatctgtaaaccatttaaaacagtgtctggcacatagtacatgctatgttggtttgttataaatttgtataaattttcttaattacctttaagtgaaaagcttgcctttataaatgcatactagtcgtgagatttggctgtacacaaggaagattgctatagcttcctttatttcttgctaatgtcaagacaacctgaggtccacaaaatagaagtgaaagtactaaagttaatagcaattctcttttgcaataatactggagcacatatcctgtaataaagttaattggggcaaactgggtagaagtctaattgctaggagctacatttttttaatcctgtaaccccagggatagaatttatcctaaataatctagaaggagaaaaataaaactataattgtatattatactattaataataagcaaaagctgggtgtggagactcatacctgtaatcccagcactttccgaagccaagaatggaggattgattgcttgagcccaggagctcaagaccagccttggcaacatagtaagaacccgtctctacaaaaaataaaaaaattagccagacatggtggtagtgcatgcctgtagtcccagctactctggaggctgaggtgggagattgcttgagccagggaggtcaaagctgcagtgagctatgattgtgccactgcattccagcctgggtgacagagcaaaatcctgtctcagacaaaaataataataagcaaaacagctagagaatctaaacagaagtggaatgggtaagatcgcctcagtggtatatcatgtagcattaattgatgatatgtagaatgtaagggaaagaaggtattttgaaggtgttttcattgacgtttgaatactgggtgccaaactctctactatgccagaggccagggatataaacaagaggaagacagcttgccctctaggagctcttaccagaagcattgggctgtggtggtataggtacagggaagacataggaggaaggaagtaagttccccgaccttgaaagagtcagggaaaactaaaggaaagaagaaatcgttgagacagaccctaagatttattggctaagtaaattgggataatatagctaacatgtattgaatgtttattatatacccaatattttgctaagcacttttaattatcccattaattcctctcatccctatgtggtagatgcatgtatcattgtaaaaatgagtaaactgaaacttaaatctgtatctatcttctaaaattcatgtttgaaatcactgtatttactatggcttccagctgtgggaaaattctgcctgtggagatcttcatactttaaggccataagaaaaaatagttttgttggagtaagagaattattttctcttgtttttattttttatttatttatttttcatgttaacatttgaaagttcttgccaacagctgaatatctgttgcttattgttttgagagacctgtctctgaaggaggtaggtgcaaatatggagtaggacagtggttccttcaaaggagaagatcctgtatcatatcctgtatttccatcagatatttcattttcctgacttgggcaatgtgtaaagatatgacaacaagattgacaatttgggaaaacgtttaggaaagaataacagggacaggatgtgacttggaaagttcgttgcttagagtagcaaggtttgattctttttgatcaacaatatagacttttccatcctcttactgtgagaatttctactccatgctttgttacatgagaattctgagattagtgctatttcaaccacttttatgggggtttgttaggataaaattgcactgagtgcctgttctaaaaccaaaggcagcaggagagccctgagtctctgccatcagtagtgccactgcagtactcacgagaaacctggggaatgaagacttgcctggcagctttcatttgaatctttttaaaaagagcctttgattttgatgttttccaatataggaagtaacttactacctaggaggtggtgaaacatgacatagttatatatagtaaaaagaacaaaaaccatgcaatcagaggattttaaaaatattaagtccatttagttttctatgaataggttttagtgaaaactgtcactaggcattttagaaatgaagaaaatgaaatcagtgtgttatacacataggaactggcatttttttggttcccaccatctggaatagtcttacagatcggaggcactcggtaagttatttgtggaaagaatggatgaaagctgtgaagattctggtttcctattaatgctaatatgccatgctcatgtaaacatactgatggattgcttgccaagttttcctcttctgatgcttctcaaacatcaaagatgtttatagaacccttctggccggacacggtggcttacacctgtaatcccaacactttgggaggccgaggcaggcggatcatgaggtcaggagatcgagaccagcctggccaacacggtgaaaccccatctctactaaaaatacaaaaaattagccgggcgtggtggcgggtgcctgtaatcccagctactcgggaggctgaggcaggagaatggagtgaacccgggaggcggagcttgcagtgagcttaggtcgcaccactgcactccagcctgggcgacagagtgagactctgtcttaaaaaaaaacaacaacaagaaaaccccttctaactcttgaacttggttcacctggaaaagcaaaagaactagaatagctaaaacaattttgaaaaggaaggataaagttgaaggcatcacactatccaattttaagacttagtttgtagctacagtaatcaagtcagtagtatcaatgtaggggtagacaaatagatcaatgaaatagagtctagaaatagactcacacaggcatggccaacttttcgacataagtgcagcacacctcactggagaaatggtaatcttttcaacacatggtactggaacaaccggacatctgtaggcaaaaaagtgaacctttgccgaaaccttacactttatacaaaaattaactcaaaatgaaccatagatttaaatataaaatgtaaaactataaagcttttaagagagcacataggagaaaatcttcatgacctgggggttggaagaagagttcttaggcatgacactaaaagcacaattgtaaaagaaaaaaattggtaaattagacttcaaaattacaaacttttgctgcatgaatggccctaattaggaggatgaaacatggccataaaatgggagaaaatatttgcaaatcatatgacaaagaactttaatccagaatatataaggaacttgctaaactcaataataaaaaaaaaaattcacttagaaaataagctgtaatttcagcactttgggaggtcaaggtgggaggatcgcttgagcccaggagttcaagaccggcctgggcaacatagtgctgtctccacaaaataaaaataattagctgggtgtggtagcacgtgcccgtagtcccagctacttgggaggtgggaggatcacttgagcctgggagttcaaggctgcaatgagccgtgatcatgccattgcactcccagcctgggcaacagagcaagaccttgtcttaaaaaaaaaaaaaaaaaaacatagaaaatgggcaaaagacttgaacagatacttcagcaaaaagaatgtaggggtgacatataagtacacatagatgttaaacattattcgttcaccattagggtagtgcaaattaaaaccacaataagataccataccacacctattagaatggctaaaataaaatataatgccaatactggccaggtgcggtggctcacgcctgtaatcccagcactttgggagcccaaggcaggcggatcactaggttaggagttcgagaccagcctgaccaacatggtgaaaccccgtctctactaaaaatagaaaaattagccaggcgtggtggtgggcatctgtaatcccagcaactcaggaggctgaggcaggagaattgcttgaaccctggaggcggaggttgcagtgacccgagattgcaccactgcacaccagtctgggcgacagatcaagactccgtcttgggggtaaaaaaaaaaatgccaataccaagcactggtgaggatgtggggaaactagatttctcatccattgctagtgggaatgtaaaatggtactgtggtcaagtaatttcaatgacaactaatatttgaatcataaataatgtcaagctgctttatatacttcttgtgctatcaaaagttaaacaagaagtgagatctccacttgaagtcaggagtttgagactagcctgggcaaaatggcatctctactaaaaatacaaaaattagacgggttggtggtgggcatttgtaatcccagctacttgggaggctgaggcaagtgaattgctggaacccgggaagcggagattgcagtgagccaagattgcgccactgcactccatcctgggtgacagagcgagatgctgtctcaaaaaaaaaaaaaaaaaaaagtgagatctccattccagtacaaatttgtagtggatatatttttcaaactgaaattacagttctagtagtgatttttagacctcgatgatgtatgaggcaaatttccatatttcaagatccgtgtattttggaaatagtggcaatggttgtatagtattgtgaatataattaatgcctctgaattctatacacttaaaatggctaaaatggcaaattttatgttatatatattttgccacatagaaataatccatttaactgtggcatttagttgcttccacataactttccattgaaagtgattaatctgcagtggggtgcatgcatgtaatgatatgataaaggtaaatgtcaagagaggaatctaatagaattctataatgtcttccatgagataaaaggctcaattaaaaatgtgtattcctggatttagctcagtatttggaagttcctgtctttttttttttttttttttttgagacagggtcttgctctgtcacccaggctggagtgcagtggcacaatcttaactcattgcaatctctgcctccctggttcaagagatcctcctacctcagcctcctgagtatctgggactataggtgtgtgccaccacgccctgctaatttttgtatttttggtagagatggggattcaccatgttgaccaggctggtttcagactcctgacctaaggagtctgcctgcctttgcctcccaaagtgctgggcttacaggtgtgagccactgcgcccagcccggcagtaccttcacgaagacatttgcaaaagtggaattgtagactctcattgcaaatcagcattcatagatgaagatttgcaatcaattttgatgaaagggaaaactattttaaaccccagttaagtgaaatgttattcccccataaaagaatttcattcttctcatcagtagacctgcattacaaaaaattgtactcaattattataatctgaattgtgtcaacattttgtggagatttgttttctcttgtaataggagtacctacttaatatctttgattttgcctcttagcccacaaaactgaaaatatttacctctggccttttacagaaaatgtttgtcaacccctagcttaaagcattgatttttctctttttcttcttttatttttttattttttattttttttttgagacggagtctcgctctttcgctcaggccggagtgcagtggcgctatcttggctcactgcaagctccgcctcccaggttcacaccgttctcctgcttcagcctcccgagtagctgggactataggtgcctgccatggcgcccagctaattttttgtatttttttttagtagagacggggtttcaccgtgttagccaggatggtctcgatctcctgacctcgtgatccgcccaccttggcctcccaaagtgctaggattacaggcgtatatgctttgaaagcgatgaaaatctcaccttattctctgttttagctgcatcccagagatgttgatgtattgcagtttcatactgtttagcacagaatatgttctggtttccatttaatgccttctttttatttattaatttaaagagatagagtcttgttctgttgcccagtctggagtgtagtggtgagatcaaagttcactgcagcctcaaactcctgagctcaagcaatcctcccacctcagcctcctgagtagttgagattatataggtacaaattgtcatgcccgtttgatgttttctttcacttacattacttagaagtatattgcataatttctgaacattcagatattttaaaaatctttgttactgaactctaattaaatcctaaagtggtcagagtgcatgtatacatgatgtcagtcttgagatttgttgaggtttgctttatagcccaatgtatagtccattttggcaatgtatttgaagtgacatttttcagatcttttgtcatcttctgaagctttggatatccaaataaggctggtccctgtaacattctgtacctactctgtacagattcccagtttctactcacttaaagtaggtgtgcttgtatttttagtgtatctttctctctcaatccaggaggttttttccttccccttgtgattatatgcagctcataggtaagaaaaacctttgtaatgtacttaaatctcagcagtcctcagctcattatcaagtgccgtagtccctaaccactaaattaagtgttgaccttatacataaggacttcatttaagagcgagttcgttcttgttgttgactcctgtcatgttgtaccattattctcttgaaactggtctgacttgcctttgacaaaaggaaaggagtgtgctttgcagggctatgtgctttcctaataccagaagttatctaaagatacttaactgtgctgtgaactaaagctattgtgtttgatctgcccaggcatccagctgactcctgtatacaaaattctacccgttcagttctgttaatgtttaagttcccgctgttctttggtgggaaaggaggtgatgtataaaaatcaactgctttgtataaggcttggtgtgttaggtgctaaaccacttaactttttcttgatttggggatctattctccttgtttttttgtttgtttgtttgttttttgttttttttttccttcttttagagacagagtcttgctctgtcacccaggctggagtgcagtggtacgatcatagctcattgcagcctccaactcctgggctgaagtcatcctcctgcctccatctcccaagtagctggtactgcaggcacgcatcaccatgcctggctgattttttttttttactttttgtagagatggtgtgttgctgtgttgcccagggtggtcttgaactcctgagctcaaccgatccttccaaagtgtcaggattacaggcgcgagccaccatgcccagctgagatctgttttttactgtttcacaataattgctggaaatatttgtaataatgtgactttcactgctaagacagaaaaggaagataaggaaattgaggaaaatgaagcttctgcttctacaacaggaaagcataaacgtttgagttacttttagagtaaacgggggataagtgtgtctagattcttgacccaccctcttctgccacagtcagacttagaatgcacttttgcatgcacttttgttaatctaatgaacgaacatttatacactttctagttagtaaatacgtgtaactttatatttcagctcatgagatcctttgctgcgtgctgcagggaagtgtagagctcttcagctgtgcagccaggataagaactcacgttctgttctccctgctgctgctgtgacaggggaggcacgtgtacatccaggctctttctgtgtggcagggctgtttaattggggctgatggaaatttttgtcataggaaatgggcaatcagattttcagttagtagtgaaataattgactctcaatccatattgggaaacagaagataaaacatttggtaataaaaatgtaaattttagaacatagaacacaaagagtggtccataagctgggcgcggcagctcacacctataatcccaacactttgggaggctgaggtgggcggatcacgaggtcaagagatcaagaccatcctggccaacatggtgaaaccccgtgtctactaaaaatacaaaaattagctgggcatggtggtgcacgcctgtaacccccctactcggaggctgagacatgagaattgcttgaaccggggaggctgagattgcagtgatccaagatcatgccactgcactccggcctgggcaacagagcgagactccatctcaaaaataaaataaaataaaaacagggccgggcgcggtggctcatgcctgtaatcccagcactttgggaggccaaggcaggtggatcatgaggtcaggagttcgaaaccagcctgaccaacatggtgaaaccccacctctactaaaaatacaaaaattagccaggcatggtggcacatccctgtaatcccagctactcaggaggctgaggcaggagaattgcttgaacccgggaggtggaggttgcaatgagccgagattgcgccactgcactccagcctgggtgacagagggagactctatctcaaaaaaacccaaaaaaacaaagagcggaccctaatgtaacctatggacttcagttaataatgaatctgtattggctcatcaattgtaacaaaggtaccacactaatggaagatgttaataataggaaaaacagatgaggaggacgggagaggtacagaggtatatgggagcattctgtactatctgattagtttttctgtaaaacctaaagatgctaaaaaaaaaaaaaagaaaactgtttaaaatttttaaatatctagcttaatgttccccaatgggttcaaatcatacaaagttagtgtttaacctcctgacccttgcttggaatttctcagttaagatgagtccagtttgcagtttgagctgtttcatcagttccgtttgcctctcgcctgtgtattaactgtgctcttgcctttctccctatctgctggaacagttggaatgccaagatgccttggaaacagcagcccgagccgagggcctctctcttgatgcctccatgcattctcagctcagaatcctggatgaggagcatcccaagggaaagtaccatcatggcttgagtgctctgaagcccatccggactacttccaagtaagatgccgtgctgagtgatgacagtgaagcatcaaaggcctttttttttttttttttttttttttgagatggagtcttgctctgtcgccagtggcatgatctcggctcactgcaacctccgcctcctgggttcaagtgattctcctgcctctcagcctcctgagtagctgggactacaggcgtgcaccaccaccaagcccagctaatttttttgtatttttagtagagacggggttacaccatattggccaggatagtctcaatctcctgacctcatgatctgcccgcctcggcctcccaaagtgctgggattacaggtgtgagccaccgcgcccggcccatcaaagccgttttagaacattcaggctaagattagatcatctggggagactggtctttagctaagagctgtgttcactaaacagtgtccattaaacacgggctgccctctccgtgcgtgttgatagctttgtgatttcggttttctctccttagacaccagcacccagtggacaatgctgggcttttttcctgtatgactttttcgtggctttcttctctggcccgtgtggcccacaagaagggggagctctcaatggaagacgtgtggtctctgtccaagcacgagtcttctgacgtgaactgcagaaggtaggcgcctctggtccaccctcatctcccccatgccgggtgggcagggcctgagctaggagtgtgaagtccacagctctgtgtctttaaagagccgagctgtccagtggagggcgggcggcctggggatgactttctctttgctcttttgctttatctcctatttcacctttgatcctgttttaaccacgggctttctctctctctctcagccccgcttctcttcctgagtctgcagggagattatgttgctgccttgtgacagaatacatttttgtggtagctgattgtcatgattaaaatgtagtttacaactttacattttaccacaggaaccttcagaaagggttgggggcccctgaaaaagaaagttcttattcacaaattgcattcagggatcattttcctgggtggaaagaaaggcttttgctctcatcattttctgtatcctgggaggctccttatacagggtaaatgtgtagttccctaggaagggtattttttcccagaaggtgaagactatgtacataattttaaaggagagacttgtgtgagtggtggcaaaacctggagacaaaaagtggtggcaggcggggagctaggtgtgcctttcccccgaggagatgtgtaacgaggacgtgtgcccttgttaagactagagagactgtggcaagaagagctgaatgaagttgggccagacgctgcttccctgcgaagggttgtgtggatcttctgccgcaccaggctcatcctgtccatcgtgtgcctgatgatcacgcagctggctggcttcagtggaccagtaagttctaaccatcctttccgacagtctccaggggcccggccacggccagctctaacactcttattctgttgcagaggttgtgctcagctttgggctaggtagcagtcttagagatgccttcaggtctgttgaaaggggtcgatggattttggcaacagctggaaggatgaaagggcagtgttgccagagaagaaatggaactggcttgatttctgggtgggggtgaaatggaactgactccagttctgcacaggactgtgcttctcggttgtgtgttaacatgaactgacagtcggtgcaggcagatgtgtcttgcagtgctatgagtgggtgagagcacgttgtgtggcccgggctggtgagccagcaccgggaacataccaagtgcctggaggcagttatcacatgtttggcaggtctgtggcaaataagccctgagaaaactagaggactgtcgaggattttagagtctgacctggagtccgtttaagtttggcttatagtgtgactgtgtggcaagtgttggggtggcagccgtggttttccccagtctgtactgatgcagagtagacaagagagcctttgacgttcactctgtttcctgggcacctgtttcttacacctgctgtgctgccttacacttgagaccttgattaaatctattctctacacatttgccttgaggcatcggagcagtagtactgcttgtactgtgcgttttccatatgtgggtaagctggaggttcatggttttggtaagtatgtgcctaagatgcatggcaattaggtaaaactaatttgcagttttgtttttgtttttatttttttaacgtttgatgcctcttgttaaagttttgatctcttttctgaagcagagaacactacttttctggtattgggtttctatattattaataattgaccaactaacatactttatataaaagttttaagtaagaaggaccatgtaactgaaatgttgtgttatgtaatttaccaaaatggcaaacattttcatagagccagcttcccccaagaagagcttctgtcattgtttcactacagggctggtggctgctctgatctcatagaattcattcctctgggtagcaccatatgcaggctttgcgaataaagtgatcatgggctttcttgattccatttggccaatgcaagaacttcattggctcccctctaaaaaaaattccatggattgctgggatttttattttttattttttgaaaaaaatggtacctatccgtattcagcttggtggcttcacagtccctcccctgaacatccgtatattccttattctctcatttatggtgcagaacactggggtactaacctctaggaaactgttctagctgccagggaaagctaagagccctcctttaacaggaaagcagcagcatgctttttcttctctctgccgtttcagggaagagcaccttaaggccagtgttatttcatgggattctgccctagagctgagaaagtaatggactcatccataatctcttttatagatttgaaagtgtaaacaatacacacttccttttttggaactccaattctaatatgtttctttttcattggaaattgaaaaaccaggctggttttgagattagtactagcagtgagtaaacctcctgtctgtggacttaaatccttttgaggaacatttcgttttagatttttacaagttttctaatctggcacgactttcaaactagcttaatctgttcttacagaaacctgtgtaaggacagactgcccacatacgggctccccaaataaaatggcatttttatttcttgtccctgctcgggtttcaccgaaccttggtagccataatcagaacaaatgaaacacagtcaagttgttgtgttctgtttgtttttacctgccagccagctgatgctgacatttatacaccaagatgatccaaggttttggtgacgccggtggggactgccgctatatgtgcagggtgcccgggggtcatagtaatgttaatggagtaccagaatctctaacagtgtggtcctgtgtagccacattgctacacttacagagatgctttggggcctttttggattaagacagttctaaaagaccaggcctcacctatgatctgtgtataaagaattagcatcgcactgtagatctgcaagagaaggccgcctcctgcagtgctctctcttggtgaatgctaactctgctcgagggccttttggggaaaggacagtgtaaaacccttagagaggtaagtttcccacccttccaacctctctccacctgcagcttgcttggtgctgtcaggatctggatttggggggagtctctctgtagtggaaccagtgacagaagctgttctttagaattttcaggatggctgtattctgcggtcagaatgagagagtcaagctgggcagaatctctcgccaagagttcaggtaaggtaatgtttattcactgggaatgctttccacagccagacagctatgctaacagtctcaagttttcttccagtttgtttagatttaaatgatacatttgtaactttttaaaaactaaattttggttggatttttcatgaaaacctcttttttctttatcccctaaaaaatggtttgaaatgtcattgttatttaaaaacccgatgtgttggaacttctttaatctgctgtttcctctttttccccccctttgaaagtttcgcatagtgtaaacattcactatgtcttttaccttccctgctcctcccatctgggaggcgctgatgctattacccagtgctgaaaaatggcactctaaaggtatgggaaggaaggagcccaaggcaaccacctgctgtcctttcagccttcctttggagactgctccatcagtgccgaggtgtgtgggaacaggcttcactgcaccgccatcttactgagttgcttcacgtgaggaaaagggggctttggccctgtgactcagttccacattttggattgcatactggaaaagaagccaatcttcttgctagtaaaccagcaacccggctgtatacagtggtgacccaagcaatggatataaacctaaaaatctgagggaggggagaggtggaatacagtagttcttggaatctgaagtctcctatttgatcaggttatttcctgggacttggcaaaaatctgattggtggggatctcctaggacctagtggacatctggtattaatttaatctcaggaaaaacaagaaattaacccagagagagtctgggttttggaattcagcgtagctacctccagaccgtggtgtctggcctccatttttgtctgtcattcagctctgacttacagctgcagtcacctttgctataaggcacctgggtagaagggtggatgggcttcacatcaatttttttcttcctttagggtgggggattggtttggctttcttttgttgtggttttttgttttatttttgtcaagattgatttttagatgcaaggacttgaaaagacccagaaggatgccaccagtttttccttgaggcctaggattttttattctgtcccgagcagaggtaattcctcacaacttagtgcaccagtagcaccagccattttgagcagagtacctctttggggagcttttcgttttgttttgtttttaattctctttccttagcagcaaggtcttttttcctagagaatctactccgttgcagaatcattgcaacctcaggagccctcactgattgagtgctgtcagcctgatatactactttggactctggaaacagatatgggttctattctctatttctactgtgtgtcgttaaacaaccgtcggagaccagatgacctgttagatggctagtcctgtataactcgactctgtatgtttcaatgtatgttactgcaatgcttcacctgctgtacagtgtttgtgagatgctctttgaagatggtacttttatattttttcattttcaataaaagtacattccttcccacttcctggtatttaatactgttgctgaatgtgccttgtgtgagtgtgtgctccggcgttgcaggacctcagctggaggtggcactcggtggttcttgggggctggccgccttccctctgcaggtggtgttagacatatgctacctgaggtaacatgttttcatttttgggagggagtcgggagtggggcgggcccatgggagggtctctggatttttgatagcctgctttgtttgctctcttctgtactattaaactgctgatgtttattttcaggaatgttttgcaaatgcacttctcactcttccccagtacaactgtaggtacactgttcctttttatcaaataagcacgtttgaaacgatccaaaaaaaaggtcttaatttcatgtaaacaaatgtatccatgtgtggagatactggaataaggtcaaagctatacttttgaatgaccatgtgtttagagttaatttcagctcattgataggtttatgttacattagaaagagtaatggttttgatgatgtcctgtaaggaagaaagtttgcaattagacctagctcctgcagaatgccctgagtaagttactgcaggcagcttgtaataattgggtcttccaaagttttgctttgcttgcgcactggtccctgagtggagctgcctactctttctaacttaacataaaactatggcattgtgtgtgagtgccgtggagatgttgacagtggtgtgtgtctctccctgtaggccttcatggtgaaacacctcttggagtatacccaggcaacagagtctaacctgcagtacagcttgttgttagtgctgggcctcctcctgacggaaatcgtgcggtcttggtcgcttgcactgacttgggcattgaattaccgaaccggtgtccgcttgcggggggccatcctaaccatggcatttaagaagatccttaagttaaagaacattaaagagaaatccctgggtgaggtgagtgaggggtgtttgcttcacagcagagagcaacttcctagcttgaggttcattcctctagggccctgccttatcctttatcttcctcctgagacaaatgaaccgtgtccttgcagggtcccctcactactctttgtatcttatagctcatcaacatttgctccaacgatgggcagagaatgtttgaggcagcagccgttggcagcctgctggctggaggacccgttgttgccatcttaggcatgatttataatgtaattattctgggaccaacaggcttcctgggatcagctgtttttatcctcttttacccagcaatggtgagtaagcctcccagctgaatcctggcagcttctccttaggagatgagttacttccattgggttatagtaggcattgctgaggtctcacagctctgattggaaatttcctcaaagcaggttcaatctagagctcgatagtgcttgctctatagggacagaattttgacttgagaggaggtaaggtgtcacttgcatgaaagagagtctgaatgagaaggtcagctggtgaaccctgtcccacttgacataggagtgtttgagtcactgcgttggagttggtgctaagtgatagggccctcctgcctcccctttggaagcactcagtctctgtggtcactattgagaataaatactttcttgtcttcattgccttataaagagataagaattcagtaatgttttattacaattcaataggtcacttttattaaagacagtacgattacataacatttggcccatcctagcaagcaggattatatgctcattttattgagaatgaccttaagcagattaggtagttctcaagtttgaatgagctttaatttggcgtggcatcgcttttcctttcagatgtttgcatcacggctcacagcatatttcaggagaaaatgcgtggccgccacggatgaacgtgtccagaagatgaatgaagttcttacttacattaaatttatcaaaatgtatgcctgggtcaaagcattttctcagagtgttcaaagtgagtttaaagattttgtatgtgcatgtggtagaaggaccttggattctttgggtcttataattcacacactttgctttctgagcacattacgtactaggactagtgtctagtatcgtaggacataatatcatagaatctttgtgttcaaaagggatcttagaggtttgaacccataacctcatctcactgatgaggaaattgagacctgggaaaatgttgatttttcccagttaaaacacagctagttaggaataatccagtttcgaagccccctgtgtatattctcatcctgcccatgattttccagcctggtcatgaggctttcacagaagacaatatcaaattactactgagagcatcacctttgcccactctactctgtggtttcacgggaaatagtttgtggcccttgaggtaaactgggagtcaggatggctggatgctggtcctagctctgtcaaacgtgtaagtgcccacaaagctaggagaaatggcacagatggggcattcagaaagatctcaacacaaattgaaccagtgtgccttgaaacaggtgaaatttaagtagtagataattaaaaacaaacacatagatacttaatttaaataaaagagatgaggctgttggtggaccataacctcatcaggagctgagtccagtgctgtgaaacagtcaatgcattatagttggagtagaaatacagtgttcaggccaggcgccagtggctcacgcctgtaatcccagcagtttgggaggctgagttacgtggatcacctgagttcaggagttcaagaccagcctggccaatatagtgaaaccccgtctgtactaaaaatacaaaaataagctgggtgtggtggtgcatgcctgtaatcccagctattcgtgaggcagagacaggagaatcgcttgaacccaagaggcggaggttgcagtgagctgagatcacaccattacactccagcctgggtgtcgcagcgagactgtctcaaaaaaaaaaaaaaaaaacaaaacagtgttcagagcaaggcagctgttgttttcctttcattgagtaaccttcaggaacatgatgtccaattctggaatctacatttgatttatgagggctgttaagctaagaagcatccagaggagatgagcactcaagaggtgcccagcagtggacggggctgccttgttaagcagtgagtttgtttctactagagtggaacaaatggattctgaatggacatctgccagcaggttgatggcaggatggctgccactggtcccttctggctctctgattctgtagttttatgatcttttttctgaaatttccctcatccatcagcccctgactggttatctttacctgtatgtattaatttgaaaagagtgttcttactcattatagacatggccaaggtgtataatacatgttcaagtaaggagttcagtgtttttatgtgacttacaagctagctgtgaagatagttcccaatgccttaggcagtggtaatacctttaaggtcagtgtataccctcttagaagaattaagtatttgccaggtacagtggtacatgcctgtaatcccagcactttgggaggcctaggcgagtagatcacctaaggtcaggagttcaagagcagcctggccaaaatggcaaaaccccgtctctactaaaaatacaaaaattagctaggcgtggtggcacagcctgtaatcctagctactcaagaggccgaggcaggaggatcacttgaacccaggaggcagaggttgcagtgagctgagatcacaccactgcactccagcctcggcaacagagtgagactcccgtcttaaaaaaaaaaaaagtattggccgggcgaggtggctcatgcctttagtctccacgctttggaaggagagacaggatcactagagcccaggagttcaagaccagcctggacaacgtactgagacctcctctctacaaaaaataaaacataactgggcatggtagtgcacatctgtggtcccagctacttgggaggctaagatgggaggatcacttgagccatggaggttgaggctgcggtgagccgtgattgtgccactgcactccagcctgagcaacagagcgagacctcgtctgaaaaaaaagtatcttattgttctgcttcctgctccacggtcttcagtacactatggttgctttgctaatatgggggttgattttgcaaatatttaagaaaaatcattctgcctatagaaattgtatttcacctatcttcttccggttgtcattactgcatttttatatggaagcttctatcccactgccaacatacagcaggcactctgggaaatgttagttccctccccactgccccttttttttttttttttgagataaggcctggctttgtcacccagtctggaatacagcggtgcaatctcggtgcactgcaacttccacctcccaggttcaggcaattctccggcctcagcctcccaagtagctgggatcataggcgtgtactaccacacccggctaatttttgtatttttagcagggacggggttttgccgtgttggccaggctggtctcgaacacctgacctcaggtgattccccctgctttgggcctcccaaagtactgggattataggcatgagccaccgcacctggcctcttagtccctccctttttaattctccagtgccattgtgttgtctttcctattaattccttaggcaaaaagtcaacaacaaccaggtaagcaaacacaactgccaattatagatacaattaatgtgttcattccttctcaacctaagaaatttacaagaagaatcagaaaaaggtatcatagaagatgatgattgagttcatacatagtgactgctttctgttagattcattcctgtcacttgatccatttcaaacctcagccttttataccagctttagtggtagagttgatagtcataggtgttgaagggtggctggagacctacagagtcttgtttggaggtggaggaacaacatccctaggcttcttttaacttgctttgaaattggcttgctttttattcatagaaatccgcgaggaggagcgtcggatattggaaaaagctgggtacttccagagcatcactgtgggtgtggctcccattgtggtggtgattgccagcgtggtgaccttctctgttcatatgaccctgggcttcgatctgacagcagcacaggtcagggaaccctcagggatggggaacattttagaaataccacatttgctggaggctgaggcaggaaaatcacttgaacccaggtggtggaggttacagtgagccaagatcatgccattgcactccagcctgggggacagagcaagactccatctcaaaacaaaacaaacaaacaaacaaaaaaaaaataccacatatggagatgatgctgtggtcctctccttactggacctggaggttcccccaagaattagtaggtattttttcattcatgggattaagctgagaagcagaagagtggggagccagcccttatgcacaaatagtgtatgagttgtttttagtcaacataagtttgagtttaattctgaaattacagatcatcctgtggttcatatttactgacaattttaattgaaggtctcaaaaactctacttaaaaaaaaatgtggccaggcatggtggctcacgcctgtaatcccagcactttgggaggccgaggcgggcggatcacttgaggtcagaagtttgagaccagcctggccaacatggtgaaaccctgtctctactaaaaatacaaaaattagctgggcatagtggtgcatgcctgtaatcccagctactcgggaggctgaggcaggagaattgcttgaacctgggaggtggaagttgcagtgagccaagatcgtgtcactgcactccagcctgggcgacagagcgagactccgtctcaaaaaaaaaaaaatgtaattgacttgtaataacagctgaccgtgaagttgcagccttcctagcgcctgagaggaaattcatggtgtcaggttacttcagttgcatagcatcattaggcacagtttcttctcttctcctattttcaggctttcacagtggtgacagtcttcaattccatgacttttgctttgaaagtaacaccgttttcagtaaagtccctctcagaagcctcagtggctgttgacagatttaaggtaagtggctccttcccctgcccccgtgtcaggagccctccccacacaactaactgctggctctgttcaaggggccacccaggctggcctcactgggcttaagcttggctttggccttttggcaagttggtaagaaaaagggggcagtggaggagactgaattgagggatgagacttgtcaccttttttaattaatgtgaatttttaccttttgtgaacggccatgatctgggctcccaggattgcagagttcccctttagagctagccccttccacctgggcctgacatggatgtgtcgcaactcactgggccttgaagtggcttaaacctagaagaccagcactgtggggcatcttccccttgatctttgctactgtcactttgattgattgacatgctgaatcctttttgatactttctttttcctgccctgtggtgctactcacgatgcagggaaagcagttacatggaaatagtcataaaactaggtcatgttgagaagtgcagttaagtaagtctcagcttcttttcttgcaggtggttagttgatcataccttggctgtgttctttgttccttcagaatactacacatacatgatacaaaagggagtatatttgggagggtggagagaaatagatatttgatagtggttaatacttaacaaaaaaagggatgccatgtgggctggaattccttgatgttgccactgcatagattagctcctatgtccctgcttgtctttattggccagtgagaggaataagaaagcaattttggtgatgtgaaggcttgaagctcacatgtttgagggatgaatataatcatcttggaggttcaggagaaaacaaattggattttcttcttaagaaacatggaaactcagttcccgagatttgtttgtattctacttgtttacagttgaccgggtgacttttatttggtcaagaaagctagtcctggctgggtgtggtggctcacacctgtaatcccagctctttgggaggctgaggcaggtggctcacttgagcccaggagttcaagaccagcctgggcaacacagcaagaccccgtctctacaaaaaaataaaaaaatagccaggtgcagtggtgtgcgcccacagtcctagctacccggggggctgaggtgggaagattgcttgagcccaggaggtcgagcctgcagtgagttatgatcatggcactgcactccagcctgggcaacagaatgagactcttatctgtgtttttgtttttttttgttgttgtttgtttgtttcttacaaaaagagaagaaagaaaaaggaagggagggagggaagagagagaaggaaggaaggagagaagagagaaaggaagaaagctagtcttcgaatgtgcccctcccccaccccaacgtggccacttcttagaaaaccaagagctgagtcatatgaaaaaaaatggcctaatgggactcagagctttattttgctgaatccgcaataaccagtcgtggatgaaagcaaatgtttgaccataagttctccctgctgttcatttctatattcttgttagtgaatggatttggtagcactttggataaagtaagggcatgtagtgtaggttggtcctccccttgtttttcgagggctctcatctcctgcttattagtgaggacttggattagcaggtggctttcacatcataggtccctcctctctccaggaagcctcagaattaatagtagaagcagcaccacccacagctctatttgatgccccatgagactttagaccccttctatcttacttctcttggtggtctcagtctctttttttccttgttattctttttttaattagatgcttggcacaagataacaagtatttatggccagccttggtggctcacgcctgtaatcccaacactttgggaggctgaggtggttggatcacttgaggtcaggagttcaagaccagcctggccaacatggtaaaaccctgtctctactaaaaatccaaaaaattagccaggtgtggtggtgtgtgcctgtagtcccagctactcgggaggctgaggcaggagaatcgcttgaacctgggaggtaggggttgccatgagtcgagatcgcgccactgcactccagcctgggcaacacagcgagactctgtctcagaaaaaaaaagataacgagtgtttattacttaattcctcccgaactctaagccggttctttcttcttatcttcagatgtctattaattagaattacattgactttatgagggttggggggctgttttttaggtgtaaggcaactgtttattatgtttctgagtacgttaaaggaagtttgcctcaatcttgggggaccatctaaggcagccttttgaaaacaacagaactgttcctgggattgtatctccccaaaagcatctgccctctcatcatttttagaagatggaatatagaataacaaggatgagacttgcttctttgattcattttacagaccttgaaactcactgacgatgttgcagagccctgcttttcaccctgtgtcttgttttacatcattttctttctttcttttttaaattggagttggagatctgacagatttgcaagtatagtcttttctctatttcacctaccctgcaagtgcatatggcaggagaacttgttgcttcctgttgggtagtatgcataaagaataggaaaagagatataaaatttatttatgtaacctgtaatttattgatttgataacctgtagaaaggcagtgtgaagctgcactgattgtcaccagtggaatagggtggcttgctctagcaaatacagacacaggacacccagtgaaatactgcatggaatatacttatactgaaaaattattattgtttttctggaattaaatttaacgggggcccggcatggtggctcacgcctgtaatcctaagcactttgggaggctgagcaggtggatctcttgaggccaggagttcgagaccagcctggccaacattatgaaaccccgtctctactaaaaatacaaaaattagctgggtgtggtggtgggcacctgtaatcccagctactcaggagggctgacacaggagaatggcatgaacctgggaggcagaggttgcagtgagctgagattgcgccactgcattccagcctgggtgacagagtgagatcctgtctcaaaaaataaataaatacattaattaattaatttaactgggcatcttatatttatctggcaaccctgtgagtagtcccctcttctgttctcaacagattcattctgatttgattcttctagtgaatgaatagtgttttcatggtcagtgtcctgtgataaagttgaggcttatggtttataggtttatatggttataggtttatgttatatctaagattctgttgttctgacaggtgcaaattcaagtagatacaagttcaagtatggggaggcccttctctgcctcttagcacgtcagggcagagtgatctgaagccgaaactctcctggtagaagggagggtaaggctgcggggagtaggaaggaaacatggggctggagctgtgaaaaccagtaggtactggcatgtttcttaatagttcattgaggcctaaaagaccttcatcctttgaataactctttaagggagagaaatgatggaaattctgtcggcatgtggttttactctgtgaaggtgatcaaaatgtttggcatgttactcttagttcaatctctcaggaaggctttgaacaaatgaaagcagcagccatttcagcaagcgggggccacacctaaggttactcgagagtgaagattatctcagaagtttagaatcatgacacttcggggaagataggatcagggatgaatgggagacgggggcttaagggagagcttagaagtttagaatctaagagagaaagggtttgtttttggggagagggattatgtatgatatttaatagcacctgcaaactttaagatagctggggggttctcagtaactaaggagggtcctgaccctaaaagctatcttttctctaaagattttgtaatgtttaaaatttttttaaattaagataaatatattttaaatcatactgtgaatccaactggtatagcattctgtagagaagatcactggcttaagaggattgttagaaggtggctcacacctgtaatcccagcactttgggaggctgaggcgggtggatcacgaggtcaggagatctagacatcctggctaatatagtgaaaccctgtctctactaaaaatacaaaaaattagccaggcgtggtggcgggcacctgtagtcccagctactcgggaagctgaggcaggaaaatggcgtgaactcaggaggcggagcttgcaatgagccgagattgcaccactgcactccagcctgggcgacacagcgagactccatctcaccaaaaaaaaaaaaaaaaaaaagtggattcaaagtcttacgggaaaatcctgggctgtgatttattgtgatcagtgttttacatcttaatttcagaaacatttccctcttcaagagttcattcttcagctgggtgcggtggctcacgcctgtaatcccagcactttgggaggctgaggcaggcagatcacttgagcccaggagctcaagaccagcctggccaacatagtgaaaccccatctctacaaaaaaatacaaaaattagccgggcatggtggcacgtgcctgtaatttcagctacttgggaggctgaggcatcagaatctcttgaacctgggaggtggaggttgcagtgagtcgagatcgtgccactgcactcctatctgggcaacagagcgagactccatctcaaaaaaaaaattatttttcttttaacataactcaggggtctctgggaatgagtgggaggaaagtgtcttgttctcttcccaagggttgtttctcagggagatacccttcacttccatgcaagcctgttcctttggttgtttgaactctcaagttccaaggcaaggctttgaagacatgagagtttcttggcaagaagatgttctctgcggtagatgaaactttagatactcttttctgacggtagcaatgtaagcctgtgacagtctctactcctagatacatgcggcgctgtgagtgtgggaagtgggcaggctttggcattctgcaggaggggtctggaaggaaaacacgtagtgagcatctgtactggaggtcagcatgccctttgcttttcctacctgctttttactactccttagaacaaggggctacgtgccagtcagttaaatgtcattaggtccgctttaggctggctgagggggaaaggcagtttagcatgtaatttgtcatgtggaatattgggtcattgataaggcccctggacctcttgaggttgccccacactcccgtgaccccttgatgggcctgagattgggctgcactaatgagctaccttttgcccttcagcttccttccactgtatagcctgatgtgttttgctacgtgagtgtacgccctaggcttgtctccctggtcttgatccagtgtctcatctttgcacctctctcacaactcctatcagagtttgtttctaatggaagaggttcacatgataaagaacaaaccagccagtcctcacatcaagatagagatgaaaaatgccaccttggcatgggactcctcccactccagtatccagaactcgcccaagctgacccccaaaatgaaaaaagacaagagggcttccaggggcaagaaagagaaggtgaggcagctgcagcgcactgagcatcaggcggtgctggcagagcagaaaggccacctcctcctggacagtgacgagcggcccagtcccgaagaggaagaaggcaagcacatccacctgggccacctgcgcttacagaggacactgcacagcatcgatctggagatccaagaggtaagtggtccgccccctgcctccctgcccgcaccccaccaccccatgctgatctgccaccaataggcggctgctgttccttttcacaaagtgctttgtggctaggagtgattttgaactaaagagcaaattagaccagctctaactctaaaaaaaaaccaactaagcatttagcaacagaaatgaataacaactaatcttatgaggtgatcattttataagcaaggaaatgaaacattcaagaggattttccaggatttttccccaaagaggattctattttagttgtatgtgagctgtgacaattatttctgattgttacaagtctgtgagcgcccttgtgcactaggctgtgcatcatacctggcacatgataggtattctcagtgctactgtgacaacatttgtgttgtaatgatttattcttaatataagttaaggatcgttaacggtagatgatgtcacagcccaggtagcacaagattagtctcagagggcctcctatagggaatggtggaacagagatgccaggttcaaggcttttaaaatacagactatgtatttcggaaccagcaccatattcacaggtccgtgtcattagagggccccggatgtgtatatattcattcattcaacagccatttcatgagtatcaaactccatgccagatgctgtgatagggctgggcacagagccacaaaaacccaaacagacaaaaatcccgtccttcttggagtttacattctagcaggcacagacaggtcgtgagcaaatacaatatattgcatatcagatggtgataagggctatgacagaaggggacagaggctgggcatggtggctcatgcctgtaatcccagcactttgggaggccaaggtgggcagatcacttgagcccaggagttcaagaccagcctggccaatatgttgaacccctgtctctacaacaactaggaaaattagccagctgtacgcctatagttccagctacttgggaggctgaggcaggagaattgcttgagcccaggaggtgtaggttacagtgagctgagatcgcgctactgcactccagcctgggtggcacagtgtgagactcagagtgagtctcaaaaaaaaaaaaaaaggtgggtgaggagagagtgtgctggggcagggagcaggtgtggttacaacttgaataggctgcctgagggaatgccttatttaaaaagtagtatttgggcaaagatcaaaggagatgagggagagagctacctgggtatgggatgggtggggaagaacattccgggccaaaggaacagaaacacagaggccgcaagtggtgagtgtgtctgttattggagtggaatgagcatgggagagagtagtggatgccaagggcagaggtggtgcctgccagagcctctggtgagacttcagctttactccaagtgggaagaggagcctttggaggattcacagcagaatgacatgattggacttatgtatgaagaggatcattctggttgctgcaggggagacaaggaagcaaggagaacagtcaaggctctgttaccacagtaaccgggagaaagatgaggatgtcttagatcaaggttgctggtgggaggtagtaagaaatgtttgtccatgtaactggaagtagggaggaggtttgaatgcagtgtatatgaaaatcagcaactgaccagaggcatggtaagccaatccagaactagactgagaagaggacaaaaagcttccagcccttaaaagctatgagcaagaaggggacacagtctttagtgacaccacttgaaactatgagtgtcattgaagggcatgcaagtcaggtttttacttcagttaactttttttttttttttttttttgagacagagtctggctctgttgcccaggctagagtgcagtagcacgatctcggctcactgcaacctctgcctcccgggttcaagtgattctcctgcctcagcctcccgagtagctgggattataggcacgtgccactgtgcctggctaatttttgtatttttagtagagacggggtttcaccatgttggccaggctggtctcgaactcctcacctcaggtggtctgcctgcctggcctttcaaagtgtggggattataggcgtgagctgctgcatctggccttacttcagttaacgcctaacaggctttttatttagtaactattagcttgattattgaggcagctctaatacattgctatcagctctattagaaaatgattccacacgtgcagctaaaatgtattcttttgctttgtatgttgaccctcattttgcccttcagagcccacagacaatgggagacctttagccatttgaagagagatgccttaattctccctgggcctttgctttagggaagagaaggggaggtaatgtttgccaagtgtcttctgtgcaccaggcatttttctcatttttgatgtctcatttagtcatcatttaatcataagaatagcatttttctcatgtaaatctaactggcctgagcagaggttgaacctgtgacttgacctccttgttgccaccaggcagtaaaccattcagtactcgtggaccatgtcaaaaactatttgttcaactatcagacactgtacttagttttatgaggatactgcctttcctcaaggtgctcagagtccaaagaaggagacagacacagtattaggttaagtcacggggcctggatcacacagttagcaagtgctagtgaagttgggatttagataaagacccatctgcctccagaatccatgctccgtccacactaccactctcccttccttcctggggacacttgaactggcacggggttgtaaacaagtgacccttttgaagtcatctgtctgtcccttgaaaactttcaacaccactttgagaactctttatcttgcctaaggatactcagttaatcatagacttggtgttctacttttttgtgggattgatggtataaatattcctcagatttttggaaatgttttgcatgcaacagtgtccatggtttttattgaaaattaattatgtatacaccctggagaaaaatcataataaaatgatttttaagagtcctgccctctcttctggcaaacaacaaaaacaagtaaataaagaatatgggtggccaggcgtggtggctcatgcctgtaatcccagcactttgggaggccgaggtgggtggatcacttgaggccaggagtttgagacgagcgtgaccaacatggcgaaaccctgtctctactaaaaatataaaaattagctgggtgtagtggtgcatgcctgtaaccccaacaggagaattgcttgaacccggaagcggaagctgcagtgagccaagatcgcaccactgtactccagcctggttgacagagcaagactccatctcaaaataataataataataataaaatgatttttaaaagccctaccctgtcttctaaaaaatgacaaaaacaagtaaatgaagaacatgggttagcagcagaataggaaagaggctgggcctaagaatgacggtgggatactggaatgtgtgcggcatatttactttccccaaagggcttccattcctgttatctcaggtgtctccacagaaacccatgagataggcagctaatgagtgagaaaacaggtaagtggcctgctgagtcatcagggtgacagttctgtatgggtagactacagttaatgtgtttttcctcaagtccttagcgatgagtggttagtagtctctaaatgaccctcctctctgtgtgccttgtccagggtaaactggttggaatctgtggcagtgtgggaagtggaaaaacctctctcatttcagccattttaggccaggtaagatttttgttattgtccttttctgctgctttctctggtttgcaagagtctcaggaaaaacgaacaaatttcctggagagtcaggaaaggtggaaacaaatgaaccctcagcctgcattgtatgcccccaatcccccgcagttccccccagttctcccccttcacagccttctgcctggaaggaggcctggtgggcgcctgatggatgactgactgttgtcccagctggaaccatttggtctcatgccttctttcattcagcatgtatctattgagtgccacaggtatgcccgtgtattgaaaatgtcagagataagagatgagcagacaccctacactgcagcgctgccaacagagttaacctgtaaagaagcagggcggccagcactcccagcctctctgtcagacaggactgtcagggtttgatctagaagcaaagcccctctgttttctgcctaatccctgaaagagtcatgcccttggggagttcatggtccagtggggagcaaggccttgagaacacaacaagcacatctccaggcagggagtgaacagcgtgcagggcccagcacacggtggccagtgctgagagtgagggacaggatggggccggagtcatcccactgagacacactatcattgctgtgttttagaatcaaacaatccagaaaaaaaaaaaaaacaaggtgcccacatgcttttacattagaattaaattaacttgacttagatggttgagatgagcataaacttatgattatctctacaccctgatggataaggtccactgaattgaaatgaaacagagggggagcaggggtgcttttgtagcccccagattatggaatgctttcttgtcttgtttggcatcagctgtcacagttggtgagttgtggtcctccttgagggtggtggtgcctggggctgtctgagtcagatcatggcaggcatcacctccaccttctgctttatgacactctccagtggctgggcccagccattggtcttgtaaaaagcaccagacttcctaggtgatttatgatgaccaaccagatttggagggccagtgaggagagacagagatggggggagggggagaaggaaagaaaaggtcaattcgtaagtgctgctctgccatctagcaatgtgctcctttttccagggttgactaggcagtggttaggttgaaaaccaagtcaggctttgcttctggacaaatcctggcaaccctgtctctggcagggaaacgggttgggctggtcagccctgctttaactgtagtttacatctgttgatagcgctgcaatgtgcggtgtttgtgcagcagccagaagtgccggctttccacagtagaccccctggggacttctgaaccctttgaagtgcacatcagaatgctaccagtttgtggtgtacgtaggtacacctgtgtgtgtacacgctgtgtgagggtgtttgagaagaccagcttatatgaacaagtactgcacaggctggttagtgaaactttgcttcaaagctgtagcatccctaaaccaagacaaatgtctactatcagtcccaaacaaaagaaatcatggaagggggtaaaatggataagtcaattcatatcaaaccattgcaactgaacacaaacttcaaagcacatggttcatcactgcttgtgggcaggcaaggtccatcattggtaaatggacactgtgtatatattataaatactaggtgatgtctaacctggactttttttttcccttggtcctcatttcatagaagcaactggtctagccagcatcctaggtaattgccttggatgagttggcctgcccccatgttgaggcagggattagctggaaacccctacagcatcctctccaggagaattctgcaagaacctcttgcttgtgcttctcctaatttaaacagtttgcacacagcaaatgggctgcagagggaagtgtttgccttcaagttatgggttatgctgagctcccatcacacataagcaaggagaactttgattttctttgctgcttagctctctttggaattaaaggtggaatctggatttgggtccaaaaagcatcccgggaaattaccagagctagattccattgtggaaggtgggggttccgttggcatagggtgatggttttgagttatgatgccattggatggtgtctctctccctagatgacgcttctagagggcagcattgcaatcagtggaaccttcgcttatgtggcccagcaggcctggatcctcaatgctactctgagagacaacatcctgtttgggaaggaatatgatgaagaaaggcaaggaatgtttggcttctgtcatgctttccatcttggccgcgtgagatgcaaggcagccctagtcagcaggctctgctcccgccgtgtccctgacgctgtctctttgtgtcctccagatacaactctgtgctgaacagctgctgcctgaggcctgacctggccattcttcccagcagcgacctgacggaggtacaggccttccgcccctgaccaggcatttagcagagtggcagagctgggccagagctgctcctgggagtgcaactgaaatgcttgggagaagagcctcacagggagttaggctgtcattaggcctttgtgttaggaaagcatgtgtccattagggcagggatgttaacactgcttgttttaaggttgtaagtattttctgtgtcttggggattgtaaacaaaatcccattgttgactcagagttgatgttttttattctatccagatatttttaaaactacaagtaagcgtgtgcatgttgagcatcttccttgaacttgattttgccaacctccttaactcagatagtctgtagagagcccttttctattagaaagagcccttagaacaaatccacatttctttgggtctctgccctgcagcagtttccagaggcttgtctttggaactaatttgtgctcttcagtgttaaaacttgtctcccatgaattgccctgaaggtctctgggattggcacctttatttagctgatttcagttaaatccctcaaaccagatttggtgaatggtttaattactttagaggtccttaaatccatgtccccagatcagcagcatcagcatcagcatcatctgggaacttgttagaaacacaaattcttaggctgttctccagacctactgaatcagaaactctaggggtggggcgcaaaggtctgttttaacaaaccctgcaggtaattctgatgcaacttccagtttgaaaacctctgaattaattgaatatttgacaactgatttattcatttaatcatttagtaacatttattaggtgtttattatgtgccagtgacatgtgcagacactgtttggcactaagaatataaaggaataagacaataatctgcacgtaaagaagtgtacagttaagaggatgagatacccaaacaaataggcacaaaataatctgatgaaaagagccccatctctttggggtactagcgggaaagaggttgggggagatttcagaggagatgatgccagaactgagcagacaaagtagaggcaagcacatgacattgtcatgttcatagtatacacataatttcaaatggcttaggtcccaggatgtggaagggggattgtgcactggaggctgagaactgctggggaactgggtgacaaagggtctggtttgtatgccatgtttggatactcaaggtttatcctttgaggctcttgaagaattttaagcaagggtgggagatggtcagctttgtgttctggaaagatcttcctgccatgtggagaatggattggagggggagcatccgggtggactggcaagaccagatgtaggattgatcggtacccagatggcagtggtagaggaagaggcatctgggccaactcccccacttcgttgaaggatcagcatggcagttcatctgcggggaatcagcatggcagttcatctgcggggaattgacagaaggagctggtctgggtgggcaagaagagaagtgactgggtgacccctccacgctgttctggacttgcgctggaggcttcaccacacttctgggctcttgtagattggagagcgaggagccaacctgagcggtgggcagcgccagaggatcagccttgcccgggccttgtatagtgacaggagcatctacatcctggacgaccccctcagtgccttagatgcccatgtgggcaaccacatcttcaatagtgctatccggaaacatctcaagtccaagacagttctgtttgttacccaccagttacaggtatggttctttcttccctcggctgcctgcctgagtttgggaaatcagaaacagggaggtaggtttgctccaggtatccttgtgttataactagaaattcctggaatcaaggtttcattttcttagcaaattagccccctgtaccaataaagctcactgtaccagtgtaacagatggccatctaaatcagagatccttggagcatatcagcttctgcatatagatcagcaagtaaaagggctgagaggagcaggccaaaaatggagtttgggtataagatagtttggaaagcattgtgttaacatctctatgcaagtgggaactgttttgggaaaacaagcttttctccctctgccattccatcataagcaggcactttggagagcagctcaaggatgttgccatctggctcacatatgttgtcacgtttagggggcaaaccctccattctgccaaagaaagtcataattatgtatatttgtgagtgcagtgaaagggtgtaaatttaatgcagggctcatgtggctccatcagcagattcatgtgaaaaaccggagggactcggccaggcacagtggctcacgcctgtaatccctgcactttgggaggctgaggctggcggatcacctgaggtcaggagttcgagaccaactggtgaaaccccatctctactaaaaatacaaaaattatccaggcatggtggcacgtgcctgcaatcccagctactcaggaggccgaggcaggagaatcccttgaacccaggaggtggaggttaaagtgagctgcgattgcatcattgcactccggcctgggcaacaagagcaagactctgtcacaaaaaaaaaaaaaaaagaaaaaaactggaggaactgctccttatactatgtcacgaggcacaatacactgaagtggggttctcagtgttggcaccactgatgttttggaccagatagtccattgttgtgtggggctgctttgtgcacccctggcctctagccactagataccagtagagacagtcgctggcttacggttcaacttacagttttttgactttatgatggtttccacacaaccattctgtttttcactttcagcatagtattgaaaaaaattgcatgagatattaaacattttattataaaataggctttgtgttagatgattttgcccaactgtaggctaatgtaagggttctgagcatgtttaaggtaggctaggctaagctctgatattttcaatttacgttgggtttatcaggatgtaagcccattgtaaattgaggagcatctgtgtacctctcccccgagttgtgacaaccaaaaatgtctccagctgggcgcggtggctcaggcctgtaatcccagcactttgggaggccgagatgggcggattacctgtacggcaaaaccccgtctctactaaaaatacaaaaaaattagccagacatggtgctgcatgcctgtagtcccagctattcgggaggctgaggcaggagaatcgcttgaacccaggaggcggagattgcagtgaaccgagattgcgccaccacgctccagcgtgaacgacagagcaagactctgcctcaaaaaaaaaaatgtctccagatgctgccaaatgtcttctgggagcttaactcgtctcctgtagagaactactgaactaatgtatgggtttttgaatgtatttgcacaaacagcatattgtgttgtctctgcctttgccttcagtacctggttgactgtgatgaagtgatcttcatgaaagagggctgtattacggaaagaggcacccatgaggaactgatgaatttaaatggtgactatgctaccatttttaataacctgttgctgggagagacaccgccagttgaggtaagatctgatggtgtttgcgtgtgtccccttctgtctctgcaagggaaacacagccggagtgagtgatggagagacctcagctgaatccagtgtctgtgtcttattggcaggggccctgttttctggtgaacagactgctgtgccttagttcacacactgattctgctctaggagagcaggattgtggggctggtgagctgaggtcttctgtcactgagaacttactaatatgacaatggcagggagaaggatatgggctcagtgagggcagagaagatgtgtgctgctgttcattcacagcttagtttcctaagctccatccacctgattgaagcattatgaagctcttttttaaataaacaagtgaataaagtgccaaggtagggaaattaaatattgcatacatttgaaagcactcaggtcaggtgctgcggctcttgctggtaatcccagcatttttggaggctgaggtggacagattgcttgcgcccaggaattcgacaccagcttgggcaacatagagagaaaccccgtctttacaaaaaaatacaaaaattagccaggtgtggtggcaggcgcctgtaatcccagctacttgggagggtgaggcaggagaatcgcttgaacccaggaggcagaggttgcagtgagctaagattgcaccactgcactccaacctgggtgacagagcgtgattccatctcaagaaaaaaaaaagacataagagaaacttggaaaggagagcattaagtagtttctgttatctcaggtagaaccctgatggctgtttattgagtccctgtgtgccctgttataggcagttctcaggggtagggcctgtgcaggttgtaaccatgtgagagacatcatctctgtccttaagggactcacagtgttctagggaagaccgatgcttttatgctcttacaagcacttacaaatgtggcttacaagaccacatcacatgtatagtactaatggagttctaagggcgaatgggagggtgagctttccagggagtgtatgttgcctcatgaagaatggaagacttgaatctatctgaatggggacaactgtgactgcgattgggacaaggggaggggcattccaagtggaggaacgagtgtggaccaaagtagagaaatgggaaattgcagtgtggtgtaaggaatggtgtgaagtccagtgtggcttgagagtaggggctgtggacaccagtgagatgggagaggagcttgcaggattagggcagggccagaatatggaggtcctacagaaccaggtggaaaagcttatgtttatcctgtggtagcagtgggaaatgatcagatctatggatttggtttagtgatgtgggctcagagaggaggaatggaaatgaccccatgcctaatactttgtgcaacttggaatggacaagaacagaataaaggttactgtgtttggagtttagtgactggggagagcaaatgtcagtggactaaattttaaatcttaaaaatttaaggagatgaggaagtacaagaaatgagtataggtgacccttttaagaagttggatgtatcttttttcagtaatagcagtttaattgatgattccctaatatgtatcctgtggacattcatctggatggctaacatgactggagacttttttttttaaatattattagatcaattcaaaaaaggaaaccagtggttcacagaagaagtcacaagacaagggtcctaaaacaggatcagtaaagaaggaaaaagcagtaaagccagaggaaggtaatggccttttttgaaatttttagatttgtcatcaaagtttatcagaaataacttgtgtagtaagtaattcatgatgtttgatagcagtgtgtgtacaatataaatacttggtcttacatttctggaaaacaaagttcttatataatactgggagaccacgaggcaccttctgtttgcttaaacagaccagggcagtaagagtcaccttcagacccatgtcttctcctgtgcagggtggggtcaggtttaggtaattagaactgagtcatcctgagtaaggaaaaatcgaatggtgggtacaggtacacccttccatccagtgattcgcctctgctcatgaaaagtcccaaccaaatcagaggtgttctggctctaagaatatctgtgtcctcagaagcacccatgttagaacagtagactcgtcactttgtcttgacaatatagcaccaggactatgagtaagagtgacagagaggggtttttcctacttggcttttcctgtccagagcccttgatcctgtttcttaaaccctttatgttatcaacagtaacaaatcttgagagttaagggaagatatttgcaataatgtgggcattttcacctttgaattttaagttgcatgtcaatttaaatacacacaaacactgtgtgtgtgtgtgtgtgtgtgtgtgtgtgtactgtatagatgtagacatgtgtgttcttgttttaatctctttgttgcttcacctccttacctcacccttttgaatccagggactttcttgggtttgccattgctttggagacggagcctgttgctacttccttatccttaaaactgcaggaggtcaggcacaggtggcttatacctgtagtcccagtactttgggaggctgaggtgggaagattgctcgggcccaggagttcaggaccagcctgggcaacatggcacgccccgcttctctccaaaaaatataaaaattagccaaacgtggtggcacatacctgtagtcccagctacttgggaggccgaggtgagccactgcgctccagcctgggggaccgagtgagatcctgacaaaaaaaaaaagaggaaagaaactgcaggagatatttggtattgggagttgatcatcctgacttactgcctcttttatttctttttttaaaaggtatgggattttgaattcaggtatgagattttgaattcaagtgtggtttatgataccttattgacacaccccaaaaaacaaacagcacagaaggctgagacatttgttagttcttaccacgggcagtaaaaaatcagaatatcattagcaaacatatgttcttctgtacatagtcactaacctggctactcacaactcttaaagtgctcaaggcatgagggaggcttattctgagatttgtaaacattatttgtgtaaagagggaaaagccgggtactatgcttagtacctgggtgagaggatcattagtaacccagacctcagcgtcatgcaatatacacatggatctgcatgtaacagatgtaatatacacacggataagcatgtaacagatgtgatatacacacgaatctgcatgtaaccaatgtgatatacacacggatctgcatgtaaccgatgtgatatacacacggataagcatgtaccagatgtgatatacacacaaatctgcatgtaaccgatgtgatttacacacggatctgcatgtaaccgatgtgatgtacacacggatctgcatgtaaccgatgtgatgtacacacggatccgcatgtaaccgatgtgatgtacacacggatccgcatgtaaccgatgtgatatacacacggatccgcatgtaaccgatgtgatatacacacggatccgcatgtaacagatgtgatatacacacggatccgcatgtaacagatgtgatatacacacggatctgcgtgtaaccgatgtgatatacacacggatttacgtgtaaccgatgtgatatacacacggatccgcatgtaaccgatgtgatgtacacacggatccgcatgtaaccgatgtgatatacacacggatctgcatgtaaccggtgtgaggtacacacggatccgcatgtaaccgatgtgatttacacatggatctgcatgtaaccgatgtgatgtacacacggataagcatgtaaccgatgtgatgtacacacggatccgcatgtaactgatgtgatgtacacacagataagcatgtaaccgatgtgatttacacacggatccgcatgtaactgatgtcatatacacacggatccgcatgtaacagatgtgatatacacatggatctgcatgtaaccgatgtgatatacacacggataagcatgtaaccgatgtgatatacacacggacccgcatgtaaccgatgtgatgtacacacggacccgcatgtaaccgatgtgatttacacacggatccgcatgtaactgatgtcatatacacacggatccgcatgtaacagatgtgatatacacacggatctgcatgtaaccgatgtgatatacacacggataagcatgtaaccgatgtgatatacacacggacccacatgtaaccgatgtgatgtacacacggacccgcatgtaaccgatgtgatgtacacacggacccgcatgtaaccgatgtgatgtacacacggacccgcatgtaaccgatgtgatgtacacacggacccgcatgtaaccgatgtgatgtacacacggatccgcatgtaaccgatgtgatgtacacacggatccgcatgtaaccgatgtgatgtacacacggatccgcatgtaaccgatgtgatttacacacggatctgcatgtaacctatatgatatacacacggatctgcatgtaacctatatgatatacacacggatctgcatgtaaccgatgtgatttacacacggatctgcatgtaacagatgtgatatacacacggatccgcatgtaaccgatgtgatgtacacacggatccgcatgtaaccgatgtgatttacacacggatctgcatgtaacctatatgatatacacacggatctgcatgtaacctatatgatatacacacggatctgcatgtaaccgatgtgatttacacacggatctgcatgtaacagatgtgatatacacacggatctgcatgtaaccgatgtgatatacacactgatctgcatgtaaccgatgtgatatacacactgatctgcatgtaaccgatgtgatatacacacggatccgcatgtaacagatgtgatatacacacggatccgcatgtaaccgatgtgatttacacacggatctgcatgtaaccgatatgatatacacacggatctgcatgtaacctatgtgatttacacacggagctgcatgtaaccgatgtgatatacacacggatctgcatgtaaccgatgtgatttacacacggatctgcatgtaacagatgtgatatacacacggatctgcatgtaaccgatgtgatttacacacggatctgcatgtaaccgatgtgatttacacacggatctgcatgtaaccgatgtgatttacacacggatctgcatgtaaccgatgtgatttacacacggatctgcatgtaaccgatgtgatatacacacggagctgcatgtaacagatgtgatatacacacggatctgcatgtaaccgatgtgatatacacacggatctgcatgtaactgatgtgatatacacatggatgaacatgtaaccgatgtgatatacacatggagctgcatgtaaccgatgtgatatacacacggatctgcctgtaaccgatgtgataaacagacggagctgcatataactgatgtgatatacacatggatctgcatataacagatgtaatatacacacggatctgcatgtaaccgatgtgatatacacacggagctgcatgtaactgatgtgatatacacatggatctgcatgtaacagatgtaatatacacacagatctgcatgtaactgatgtgatttacacatggatctgcatgtaactgatgtgatttacacacggatctgcatgtaaccgatgtgatatatacacagatctgcatgtaaccgatgtgatatacacacggatctgcatgtaacagatctgcagatgtactccctgaatctaaaataaaagttcaaaaacaaaacagggaaaatcttcctgtatagctgtttctcttgcaaatgaaaaattaaattctgtgccctgcaactaactgaataaactctcctctaggccaagggtacccaatggaacctgaaaatctattcagaccatgaagggaagacaatgttggacgtgccttattatactcccctgcctttagagttcaggcacacaactgacgagcattaacatttatatagagatcctaagactgacagaacagtctctttgtagctgtaagatacctaattccaacctcactctattaaaataatagagcatcacaggacagatagcagggccctggaagaaatgcatattttgaaatgtctctgcaaagctgtctgttgaaggggaagttctgcattacgtagagaatctccttcctttactaggtctctccagagggtctgacacctttgataggagacattcacatctgttctctctgacgtctgctactgggaggcttcatctacatgacaagaaccttggcgtccacaccctgtcccccaccactcccccaccactcaagctaatttcaactcttcaggcagagcttaaccctttcaaccaattgccaatcagaaaatctttgaattcacctttgacctttaagctgcacctccctgccccatgttgccccacctttccggatcaaaccagtgattaccccacttatattgattgatgtctcatgtctccctaaaacataaaaccaagctgtaatccaactgccttgggcctgttctcaggacctcctgaggctgcgtcactggtcatgattcttaaccgtggcaaaattaactcctaaattgattgagacccgtctcaaggtactttctggtttacattctgtattctcatattagtgttaagaatctgagtgcgccagggagatcctcaggaatatatttgaaccttttctctcctccagcagccagccagttactatgtcctactgaatttacctcccgaaactccatcccaccatcacaaccccagttcaggcctttatcatctcttacctacagtgttacagctgcctcgttttgaacctgtcttccacacggtcagctgcgagatctagttaaaaacatgagaccagctaggtgcggtggctcatgcctgtaatcccagcactttgggaggctgaggcaggcagatcacctgaggtcaggagttcgagaccagcctggccaacatggtgaaacctcgtctctactaaaaatacaaaaattagccaggcgtggtggcgggcgcctataatcccagctacttgggaggctaaggcaggagaattgcttgaacccgggaaggcggaggttgcagtgagctgagatcacgccactgcactccagcctgggcgacagagtgagactctatctcaaaaaaaaacacacacacaaaacatgagaccaaccaactttcctgcatggagtctttcagtaaccttccattttcaaatattttccctgatagggcacatacagaaaaggctatttgtgtggaacacaggaggcatgaaagaggctgctcgctcccagaggcagctggtgtggcaatatcagccatcccaggtccttcctagcccaacagaagtcagacacacctgtcaccctttctgttgagaagttctttgtggggccaaaattcaaagcctttcttctgtgaccacagcctgcttagtcggcctcatctcctgccattctttaagtgcacatctgttccagctgtgccgaatcactgtggtggtgtgttttgctaccccgtgcctgtgcttgtgttgttttctctgcctgctctctcctttccccacccggtcatctgtggcttaccttttgagaagcaatacagaaagtcttacctgaaacatgcctgccaaccaccccacacctaagccaaataggtcaagtatgcctcccaggggttcccatgctgccctgcgtatagctctatcatcacattgagcacatttcactgtaattatgtgattattgatctgcctgtcctaccagtctgtggcaggctcctcagccaggtccctaggggtggggacctggtcttcatcctctttgctgctcctgggcttcatcctgggtctggtttgtggtaggtgctcagtaaatgttaaatagatgaatgaatgcttctgacaaagaggaaatctaatctagacccctgtgaagctgccggttgtccgattctgttgctctgcaggtgacttagttttatggaaatagttcttcccttctgagtccatgtttctttttttcttacctagggcagcttgtgcagctggaagagaaagggcagggttcagtgccctggtcagtatatggtgtctacatccaggctgctgggggccccttggcattcctggttattatggcccttttcatgctgaatgtaggcagcaccgccttcagcacctggtggttgagttactggatcaagcaaggaagcggggtaaggttactcataaatgggaaagttctgtgtctaagaatgtggccgtttctccctattccctggctattcttagggaaactgttctagttttcacttaaaagaagctgtaaagagagatttttccaggatgaaaagatgagtccctaatgtagcctcaccagaaggaaaaaaacgctgaccaacccacagggcagtagggcgtgcagtaggacacctgcaggctatctgttctcatccgttgtgtattagtccatttttgcactgctacagagaaatacccaagacggggtacttgacaaaggaaagagggttaattgactcacagttccacataactggggaggccccaggaaacttacaatcatggtggaaggcaaaggagaaggaggcaccttcttcacaaggtggcagaagagagacaagacagcgtgtgcgggaggacatgtcaaacacttttaaactgtcagatctcatgagaactcactgtcacgacaagaatagcatgggggaatccaccccacaatccggtcacctcccaccgggtcccttcctcaacacctgggaattacaattcaagatgagctttgggtggggacacaaagccaaaccatatgacattagaatagagagaaagagggctaggtgtggtggatcatgcctgtaatcccagcactttgagaggccaaggcaggtggatcacttggggctaggagttcaagaccagcatggccaacatggcaaaaccctgtctgtactaaaaatacaaaaattagctgggcatggtggtgcacacctgtaatcccacgtacttgggaggctgaggcatgagaatttcttgaactcaggaggcagagggtgcagtgagccatgattgcgccactgcactccagcctgggtgacagagtgagacactgtctcaaaaaaaaaaaaaaaaaaaagaggtggacaaagccatgaccaggtcccagggtgggtcattatcctgtaccctgccctgcccttgagctgagaatggcgctgagcaggggctcttggcagtcgttaggagtctggcctcatagaactttggcttcaaacagaacaccactgtgactcgagggaacgagacctcggtgagtgacagcatgaaggacaatcctcatatgcagtactatgccagcatctacgccctctccatggcagtcatgctgatcctgaaagccattcgaggagttgtctttgtcaaggtatgcattggtgggtggtctctgccctcctccctggtgacctgtggtcaggctttggtgtggcgtctctcagttcatgctgagtaggggagctcccttaaccaggatggccctggctgagatgactcatattccgttagcctccaccttttctcacttgccacctgtccctcctgacccctcacacctccccgctttgggagtggatgtgctgcggagcggttctctggaccagtaggaacagagccgtccctgggccctgaccactctgtgctctgctcctcagggcacgctgcgagcttcctcccggctgcatgacgagcttttccgaaggatccttcgaagccctatgaagttttttgacacgacccccacagggaggattctcaacaggttttccaaagacatggatgaaggtatttctcactgagcctttttttaatactctggagctcactgtgcttccagccttctagatgattctccaaatgtgcagatctgtctgtctgtagatcctgagagcacagtgactgctggtgttttcaccaggaacattgcaactgcattttctgtcttgtttgacctgaaaataaattcaatgaattgagttagcagaaaggctttgaacagaggcatctgagattctgaaacacacacagattttaaagcaatgcattggtttctggatgcctacaacctggcaggttttctggctgttgtatgggctgtgcctgcaccagaactgaaatactgtacccccacagttcagagtaacagtaaagcccctgacattgacagggggcttcctgtgtagcaagcagcatgctcagtgttttatgcatgttaccttaatccccgcagcaggcctgtcaggcgggtgttgtttcactccttgaataatgagaaagctgctatctggaaaggtcaaggaactggcccaagatctacagctattgagtgacaaagctgcaaattgaacccagatctttttgaccccaaagctaatgtttttaattgctgcactgtagctgccttcatggaaggggtttgtttcaggcattgataggccattgtaaacccatggccagaggtaacaagaaatcagaactatccctgatactcgaactgatacataacatgttcccatttctgctaaacacacacgcatgtgctcacacatgaatggaaaaaagaaaaaaagtaaataatagcaacatgtctgggatttgcatgaaaatactttaaccagaagaaaaaaggcggtggggtggggagacagccaaaaagagatgaaagttgataactgttgaagggtctgtgctcttcctttaatttttatgtatgtttaaaaattttgcaagacaaaaaatgtcttaaatgttaacagcagttcattggtattggtaagaatatagtttttgttttcttcttcacatatttattttccaaacattttaaaataagcataagttactttgtaaagggggaaaatgtttaaagcagtggggcaggaagggaaccaagaaaagggagtggagtaagaggattttcttgagacgaaaaaaaaaaatcagagcatccaggtttctaaatttttctttgatcagactgtttaaagacaacatcacaaacttcagatagagagtttgtggaacccctttttgtttttttcaattttcagttccatttttccaaaccatctgacacttgctcctttatttgtttccacagttgacgtgcggctgccgttccaggccgagatgttcatccagaacgttatcctggtgttcttctgtgtgggaatgatcgcaggagtcttcccgtggttccttgtggcagtggggccccttgtcatcctcttttcagtcctgcacattgtctccaggtaaataggaagcgttcatgtctgctggggccacggagaagcctcagttgctgggtaggtgctgtgacacggagctcattctctctccagggtcctgattcgggagctgaagcgtctggacaatatcacgcagtcacctttcctctcccacatcacgtccagcatacagggccttgccaccatccacgcctacaataaagggcaggagtttctgcacaggtttgtcctgatgggggctagaggcctcaaaggggagtcagcatcccagcgtttgatacttgtccgggaggctcttcaaggccagagatggggattataaacctcattaccaagggtattcatgatttaatggaataatctctgattaaaatccaattgcttggcgggactcctttctgagcaagtgagaaaacagaaatacagatttgggccgcatgcggcatcacgtgcctatagtcacagctactcaggaggctgaggctggaggatggcttgagcccaggtgttcaagtccagcctgggcaatatagtggaccccatctcaaaacaaaatacaaggaacaaaccccacagattaggagtctattggccttggccctgaaaagctatatttcatagagttttgctttttcttttaagtagtaaaaggtagtcatgacatttgagtagattttatttaagcatcgagtattgtttatttgtgaaacttatgtgcattgtcattgtggagctttgtattaataagagattggaactaaaatgttcttcaatataggacaggttgaataagctatggtatatccatagagtactatgtggcccttaaaaagaatgagggagctctataggtactgatagggaatgatctccagcatatattagtgaaacagcagagtacagatgtgtgtattaatatattgtatgctacctttgagtatgtgtttttatgtataacatttagaatatcaggctgggtacagtggctcccgcctgtaatgccagcactttgggaggctgaggtgggcggatcgcctgaggtcaggagttcgagaccagcctggccaacatggtggaaccttgtctctactaaaattacaaaaaaattaaccaggcgtggtggcaggcacctgtaatccagctactcaggaggctgaggcaggagaatcacttgaacccaggagacaaaggtttcagtgaggccagaccatgccattgcactccagcttgggcgacaagagcgagactccatctcaaaaaaaataaaaataaaaatttagaatatctctgaaaggattaaaaaaaaaacctgttagttgccactggaagggagaactgggtagctggaagatgggaatgagacagacttgacctttcatggtaaacctttggtaacttttaaattttctattctgtgtatatgttgcctattgcaaaagttgggtaattatttttagagagaaaatttagaatagaaagtttagaaaaaattattttcaaaatgttaaatgactcagaaaaataattcctaaactttaagcagaaaagaaagtgaaatgtactaaatacgtacatgtgtatatacctacacacagtaaatgtcagtgcattgaaaaaaactgctgggaggaaatgcagcggaatatcaactctggttttaacagggtgatgagattactggaattttacattttcctatttctattgcattttctaaattttctctaaagattacatattttattggaaagaggaaaagtgatttttcaaagcaaagcacatctgcgcagcaaaacttcctgctctggagttctagtcgtacatggtgcactgagccttcagaggggtctggtctgctctctgggacccctactgatggccgtgccatgctccttcagtagcagcagtaaacattgcctgagtcccttttgctgtggtttagcttgcttctcctggtgcttggctccatagctggggaacaagtgccattctgcatggtggcggcatgtgcacacacttatggtgttcccatattcactctgagtttctttttcctcgccttgaaccatttctgctgttggcgtttgtaacctttccttctttcagaaaatgccttctgacctaagatatttttctaaagtttaacacaagcctctttattcagtctcttttcccatgtttactctgtgctgagatagatgttttccataacatctttaataggatttttttttgtttttaaagagtaactaagattagaaaaacttaatgtcctcctatgcatgcggcctagaatacctccagaattcctagaataccctcctggagtttccagggcattctctcagttagaaacaggaagtatttaaatacgtgccctccatcatctgattcgctgaagctttgtccatgcgcggggttgtgtagtactttctttgcccattaagtgttgtctttctcacagataccaggagctgctggatgacaaccaagctcctttttttttgtttacgtgtgcgatgcggtggctggctgtgcggctggacctcatcagcatcgccctcatcaccaccacggggctgatgatcgttcttatgcacgggcagattcccccagcctatgcgggtctcgccatctcttatgctgtccaggtcagtctctgggataggagcgtcatctttgcttgtttgagcccttcctctgctgacgtaaaagagggatgattgtggggggctccaccctgagccattatttcacctctggacccctagaattgctcatggtctgatttgaccgtaacaatctggatttgactggggcaggtagggataggagagaggtaagtgtggaatccaggaataaaggaatcgaactctgttgcatgtgtgtgagaagtagatgctgttttcttcaaaaagaaatatgatcttgaaaatagtttcttaattgtgggtttctgtgttcaccaccatttcatctctggcctctttctagtcttctaagaaatgttatagactcaatatgcttcttacgtgcattttcttctcagggccctgattttcccaatactgttatatacataaaaccttctagcccctaggggtgattgagggtcttcaaatagctcagagaatagttgagaacttgagcactgactagatattttaagatgttgagtgattattattaccctctaaaataatggtattggaattatgtttttaaggagtctatattttagagaggtacaagctgaaatatttggatgagataagctctctgcgatttgcttccaaataatatggggggtgggggtaggaatggaagggaatacagatgaaacaatattgactgtaagttgatcatttttatggtagagttttggtacctgggagttcattatactactctttctactcttgtgtgtttgacatttttctttattgaaaagataaaaataaatagtcaaaggaaccccagagatatgtgtcttcacagataccccgagatgtccagccacattttgcaatttacttgacaactggttggggaagacaatgcattatatagactgtttttagactccgcagtctatggagcacaggggctccagactcactcatttcccagcattatgtatctgatttgactttcctggaaacattcttactagttgctcataggttgatatctccatttgttgtgactcccacaaacaggctcagatacaagtaggaagtccagaagtgaatcagttgcagatatgtgttattggaaatgtaaagatgaatagaaaggctttgggtacaaggaagtggttccagcagtgccatgatactgcccgcattcactgagcattgcagttgatggggtaacaggtatgccttaaaagccaagagaatgactaggtccctaagaccagctgctgcatgtgctcagttcttagtagtcctctagatgaaggaagttctccagcattggcctggcgtgtattgataatgaattatctctttgattgttgttttccattatcagttaacggggctgttccagtttacggtcagactggcatctgagacagaagctcgattcacctcggtggagaggatcaatcactacattaaggtcagactgctgtaggccttttaccgtgatctgactcctcttggagtcggtttaccctttgctgcctcagctgggtgtacaaggaggaggcttgtgttctctgcctatctaatcccacagaatctccagcaatctctcaaccgtgcttggaatgggaaagagattaccgtaagagtttctaagtatatttgtaaattatgtcgagctgagaacttcattggctaatttccagaatgttcagaaccttgtcagttcagcttaactgactaatggagcattttccttacactgtttaaaaccatgtattgttttaattcttactatgtccaattgttcttaatcagggatggccatcaggaccccctgctgagcttttggcaggacaaacgtggcctcatctctggattctgttgcagtggattggggtgggacccaggcttctatagtttgaaaagctccatagcgaattctaaactgctctcccaacttacaaacgagtaaatttaattgataccagagtatccagctcttcccacctttccccaggaaccccttccgtcttgccgtgggtggcaggcatcttgctgctgtcctaactggcactcttaaacaatttcctacagggatgtcttaatccatttcacactgctgtaaagaactacctgagattgggtaatttatgaagaaagaggtttaagtcactcacagttccgaaggcttaacaggacgcatggctgggaggcctcaggaaacttacaatcatagcgaaaggtgaaggggaaacaagcacatcttcccatggcagagcaggagagagagagaagggggaagtgccacacactttcaaacaaccagatctcctgagaactcactgtcacgggaacagcaagggggaagtccacccccctgattcagtcatctgccaccaggcctctcccctcacacatggggattattatacaattcgagatgagatttgggtgggaacacagagccaaaccacatcaaggggtgtccaatcatttggcttcccagggccacattggaagaagaattgtctcaggccacacataaaataatactaacgatagctgatgagcttaaaaaaaaagatggcaaaaaaaagtctcataatatgttaagaaagttgacgaatttgtgttgggccacattcaaagctgtcctgggctgcatgtggctcaagggccacagattggacaaatttgcttataaagaagcagcatcatgagtagttagattctcaaattgaactcaattcttaagagttatctattttattgaactgctgtgagactttacaagcatctgtgtcattgtttatatgtgaagagtatattctgagttcccaacacttgactttgaaacatagttttgaaaagttagctttttttctttttttccttttttaatttattttttatttttttattttttttgagagagggtcttattgtcacccaggcttgagtgcagtggcatgaatacggctcagtccagcctcgatctcccaggctcaagtgatcctcccacctcagccccgccaagtaactgggactacaggcatgcgccactaggcccagctcatttttgtattttttgtagagataggtttcgccatgttgtcccggctggtctcaaactcctgggctcaagcgatctgcctctgcctccacctcccaaaatgctgggattatagacaggagccatagtgtccggcctgaaaaattactctttcaattgggaactgagtgtacgtaaactggattctctaatagagatgtgcttcactgattgttttgacagtgagcctcattagtggtagaatatttcttaagcttacaaatgaataactttcttattctcagaaaggatggcaggtggctgcccagtgtatctagtaatagctcttctttcatgtttagaagttagcctctttgcacactgtcctggtgtgtagatgacccgtgtgtgtacatatgtgcagtgtttgagttaatgttatggttggcgagagccttgtgctggagaggttaggattacggtcagtggtggtacaaagtggaccctgctgaaaccggtcacatttcagaggcctgccctcccactgactgtcccaacacagagtccttccagcttggagttttagactttaggcttaaccccccagagtgctacagtctttggcccttacttccccccataaggctatatactccatggccaattgccagagagttttaaaagatcatgagatatgattgttgatgataaaaattacccaagcagttatatcacagcattttgagctggaatagattctcaagatcatctaatccagtccccacaatttgcagataagaaactaagatgcagaagaagtggtgatctgtccaggtcacacagtggcaaaattagaattagagtctgtgtctcctggattgaccaagacatgccagaatgccaggatccaatcagatgttcagtaaatattagttttcttcctttggatttaagccaatgattatcaaatggtagaatcctatctcaaagaatttcagtaaaaactgctgtggtggaggggtggaaggcctcatgtctgcccgtgttggttttcctttggcccccaaggcagctttgtggaatagttccttgagacaaaaggtagtctgaacaccacttccctccccaggctgctgctagtagccatgacacttagccattgtgctctgtctctgtcgagtttagtgatgataagcatttacttccaagggattctttcctagcaaggtgacagggtggcagctacctctgtgtggctactatggttgtcctggttttatttctctgtgacaaagcctgcagctccccaagaatctgtggtcagtctgaactggccacccttgtctccccagactctgtccttggaagcacctgccagaattaagaacaaggctccctcccctgactggccccaggagggagaggtgacctttgagaacgcagagatgaggtaccgagaaaacctccctctcgtcctaaagaaagtatccttcacgatcaaacctaaagagaagattggcattgtggggcggacaggatcaggtaaggatgtgcaaagccttctttgaatccattggaacgtagcagtttatgaaatatcactttcacccctttaaaccggatccttgtttgtttgatgagcaattagtgtctcagccccctactgaaaccaattttctaggtttattgttgaccccactttgatgacattgagtgcttttcacagtcataaatgtgcacattctcaatgcagaacactggggcacacagccaagtacgaaagaggagcagcacccacaactctgctacccagagagaagcactggtaacattttggtagctatcttgttaggcttcctctagtaatatgtaggtttacaaaaatgaggtcattgacacatgctgtttcatggccttcttttaaaactatcagtaggctgggcgcagtggctcatgcctgtaatcccagcactttgggagggcgaggcgggtggatcacctgaggagttcaacaccagccagaacaacatggtgaaaccccgtctctactaaaagtccaaaattagccaggtgtggtggcacatgcttgtaatcccagctacttgggaggctgaggcaggagaatggcgtgaacctgggaggcggaggttgcagtgagccaagatcacgccactacactccaacctgggtgacagagcgagactccgtctcaaaaaaaaaagaaaagaaatgcgtaactgtagatcctttagatttctagggtcaggacttgagtaatttacttctttttttttttgagacaaagtctcactctgttgccaggctggagtgcagtagcacgatctcagctcactgtaacctccacctcccaggttcaagcgattctcctgcctcagcctctcacgtagctgggactacaggggcgccagctaatttttttgtatttttagtagagacagggtttcaccatgttggccaggacggtctcgatttcctgacctcatgatccacccgcctcagcctctgaaagtgctgggattacaggtgtgagccatcgcacccggccccttttttctcactttcgttcctgaattgcattccaaagactgaacttgtcttcttttactgtcctttttatccttgtataagaggtatctttgattcagttttcattagttttctaggctccatgcttctttggcatcaaaactcttctagcttttttccttgccattaaaaaaaaaaaaaccttttgtcttttctggccaattgattttaaagaactttctaaggaagaaaaggaaaaagccatttcctgctttctgtttgagggaattacttcacgtcaaaacaagacattgctccaggtctttcatgctggaagggaatctttagccaagcagggtgactctccccaagcctttttactgttctctcccttgagcccatctgctgcattcgtccccaggggtacactgctcccctgaaagctgactgatgtcctttgttatgatttccctttaacacaggtgagataggccaaaacaagcaccacaacttcattaaacagtagttagtgacagaagagaaacaagaaaaagaacatagtggccaggtgcagtggctcacgcctgtaatcccagcactctgggaggcccaggctggtggatcacctgacgtcaggagttcaagaccagcctggccaacatggtgaaacctcatctctactaaaaatacagaaagttagctgggcgtggtggtggatgcctgtaattccagctactcgggaggctgaagcaggagaatctcttgaacccaggaggcggaggttgcagtgagctgagattgcgctattgccctccagcctgagcaacaagagcgaaactccatctcaaataataataataataataataataacctgatttacactccggttctaatagggcttcttccaagtttcacgggtaacttggaaactctcctgtggtcatgtcagtcaaggacaccatcttgaggacttcactgcctttcttaccagcacattccatcagtgcaaaggtagtcagattcagaggactctaaagtcttccagtccaggtggtccaaacctaggcaccttttgttaaactggaacaacttgacccattgtttcgggcaccattccttccttagcttagatcttaaagccctgcctcggcccagagggaatgtctcctcccctcctatctgggaaaggggccagtaactgagtcccccaaccctgaacagagtcattcattttttttttttttttttttttttttcctgagacagagtctcagtctgttgcccaggctagagtgcagtggtgcaatctcggctctggagtagctgggattacaggcacatgccaccatgcccagctaatttttttttttttttgtattttttagtagagacagggttttgccatgtttgccaggctggtctcaaactcctggcctcaagtaatccacccaccttggcctcccaaagtgctgggattacaggtgtgaaccgctgcgcccaccggcctggagtcactcatttctaggaggagaactatcctgctagacggaccaggtttcctaactcgtttctggtagaaggatgtgaggattgttgcattaggaagatgggtcctaatacagctttttccaagtttcctgggcgttacttcttccaagtcttatgggtgtttttcaggttcccattaggctgttagacagaggtatgcccagggggtagatcccgacagtggggtcgtggctgtagacactggggcaaggcaggctgtttgcgccctccatgagtgctgaagagacagcatcgtggtgatctcgatgaggccctcacaagaggtctttcatgacatggtggcacgagaaaggtaggagggtcaagaaccaggcgtacagccaaggaaaagtgattcaacagctaaaaccctgtagttctaaatctaaaccatggaaccaagttgcagaaaggtagacaggactatggcaaacttcttttctttttggctctgtagagagagcaccttttaaatgtttatatcctttgacacagtaatttcagttctaagattctttcccaaggaaattgtctgaggtggcagtaaagtttcagcactaagataataggacataacattattataagttttacataaactaaatgttgacccttagagggctggctgaacaagaatacatgcacatgatggaatgcaaccactaaaattttatcttgaaaatttttttaaaagatggttgactgagtgttatacaatgcttttgttttgttttgtttgaaacagagtctcgttctgtcgcccaggctggagtgcaatgatacgatcttggctcactgcaacctccgcctcccaggttcaagtgattctcctgccttagcttcccaagtacctgggattacaggcactcgccatcttgcccagctaatttttgtatttatagtagagacagggtttcaccatgttggccaggttggtctcgaactcctgacctcaggtgatctgcccgcctcagcctcccaaagtgctgggattacaggcatgagccaccgtgcccggccaatgcagtgttaagtgaaaaaagcaattacaatattgcatttctgatatgatctcaactctgaggaaagaccgaaaggaagtgtgcctaaaatgatagaagtgagattatgggagattgatgatgtcatctcgtattacttatgtaaacttttcaaatgaagatttggttaacctgttctgctgattactgtaataacactgatcccccaaacctgcttctctgccatagtttcctatcacagtagggccattgacagctactcattgagtcgaggcaaaacctccttcccgtatgtgtttatttatccctggaacttcttcaattccccagctgctgctgtggcaacaggaggccttgtcttagtctctctctcagccctaataagggggtagggagaaaaaagacatcttgtcctctggtttgcccctcaactgcttgctgtaagatctctgttctcctaactttgcctaagaagcattcagctctgtgcacctgttcctaaggtgaccaggaggcatttttccattttactctcatgaaaatggaatggtcagccaggcgcggtggctcacgcctgtaatcccagcattttgggaggccaaggtgggcggatcacgagatcaggagtttgagaccaacctggccaatatggtgaaaccccatctctactaaaaatacaaaaattatctgggcatggtgacgcgtgcctgtagttccagctacttgagaggctgaggcagaagaatcacttgaacccaggaggcagaggttgcagtgagccgagatcgcaccaccgcactccagcctgggcagcagagtgagactccgtctcaaaaaaaaaaatgaaaatggaatggtcccttcccttccttctcaggctgaagctgtgtaatttgaaggtgtctgcctggtatctcaggaaagttaattgcatttttctatcattttatacattatctcagttaatcagttgaaataacaactgaatagaaatggaaaaatagttggcattgccctgaggctaaaccagcattgtcctcacagactttgctaacagctcctctcttgcatgtcttctgactcatcagggaagtcctcgctggggatggccctcttccgtctggtggagttatctggaggctgcatcaagattgatggagtgagaatcagtgatattggccttgccgacctccgaagcaaactctctatcattcctcaagagccggtgctgttcagtggcactgtcaggtgaggacctgagcacctgcatgtctcgtgcgtcacttagaggccagatgagcatgtgggaccacatgatgctagcaccgccccctgggaccatgagctcaccatctctagtctggtgcttttcccactgcaccatgtgcttgctggtgcagaagggagaggcagcaccactcacaatgccacttggttgactgaagggtgcagggaggcctgcaacacagtgctgaagaggccagagaggtctgggcccagggctctgctccgtgacttcggacaagttatttaaccactcctgtgcctgtttcctcaaccataagatggggatgctttaaagacctgttgctgtgaaggttgaataagttcatgtaaattatataagcacagggcctggcaaatggtaagcattcagcaaatggtggctgctgtcatcagcctcattgacatcatcctcatctgccccccactccattctgtcatctctcctaggtgcgctgaaagttgcagtttttttgttctgtttgtttgagatggagtctcactctgtcacccaggctgaagtgcagtggcacgatcttgactcacggcaacctccgcctcctgggttcaagtgattctcctgccacagcctcccgaatagctgggattacaggcgccctcccccaggcccagctaatttttgtatttttagtagagatgaggtttcaccatgttggccaggctggccttgaacgcctgacctcaagtgatccacccgcctcggcctcccaaagtgctgggattacaggcgcgagccactgcacctggccaaaagttccagttccaatggtggctttcaggcattattactactcatgttatttcattttctactatcttcccctacctttgatactctggaattatgtcactttttgaaatctgccaggttgccagagataaaatccttcttcttggcctattaaaacagtccaaggagaaagcatcacattatctttcctaagcttacctgatcctacccttagccttaagcttcagcctcctgaaaacagtggatttccatcatttgtgtccctgtctattaaaaaatcattctggcctggcacggtggctcacgcctgtaatcccaacactttgggaggccaatgcgggcggatcacgaggtcaggagattgagatcatcctggctaacacggtgaaaccccgtctctactaaaaaatacaaaaaattagccgggcgtggtggtgggcgcctgtagtcccagctacttgggaggctgaggcaggagaatggtgtgaacccgggaggcagagcttgcagtgagctgagatcatgccactgcactgtagccagggtgacagagtgagactccatctcaaaaaaaaaaaaatcattctaaaagtaatttttagcagttttcagaaaaattggtaccaacctaatttcaaataatcataggcagtgttcagacttgttttaaaactatcccctccacctttggaaatggcattttgaactcaaggaactttggtagatatcttagtctgctcaggctgctgtatataccaacataccatagactgggtggcttaaacaacagaaatttatttctctcagttctggaggctgggaaggccggggatgggtgtctgctgagggccgtcttcctggtttgcagatggttgtcttgttctgtcctcatgtggcctttcctcggtgtgtgcctgtggtgcatgcctgtggtgtgtgcccgcggaaaggagagctcttgtgtctcctcttcttgaggccccaccctcatgatctcatctaaacctaatctcctccttacagccccacctccaaacaccatcacattggggtcagtgtttcaacagtttaattctaggggcacacaaacctgtagtccatagcagtaaatcagcagaattctcacctgtgtttgtgtagtgtcaacaccctagagtatgtttattttggtgtttctgtaattgaatctggacagcatgcactgtatctgtggttgataataaaccattctctttgggtattgaggtaataaggtcagacaagcaatatcagaagaaaattagaatttattggtcaggcgtggtggctcacgcctgtaatgccagcactttgggagggctaggtgggcggatcacctgaggtcaggagttcgagaccagcctggccaacatggcgaaaccctgtctctactaaattagccaggtgtggtggcccatgcttgtggtcccagctactccagagctccagaggctgaggcaagagaatcacttgaacctgggaggcggaggtggcagtgagctgagatcgtcccactgcactccagcctaggtgacagagcgagactctgtctcaaaagaaaattagaatttattgaagatgaaagcctaaaaataggccgagtgcggtggctcacacctgtaatcccagcactttgggaggctgaggcgggcggatcacgaggtcaggagtaccagaccagcctggccaatatgctgaaaccccgtctctactaaaaaatacaaaaattagccagtcttggtggcacacacctgtagtcccagctacacgggaggctgaggcaggagaattgctggaacctgggaggtggaggttacagtgtgccgagatcatgccactgcactccagcctggacgacagagcgagactccatctcaaaaaaagaagccattgcttggccaggcgtggtggctcatgcctgtaatcccagcactttgggaggccgaggagggcggatcacctgaggtcaggagtttgagaccagcctggctcttcccataaatctccctatttttagatgccacaggaacaccttgaaaaaaaaaattggccttacaatatttggctttggccataagaactagttttttaaatcatcatttggaagagaattaagaaataaagcacgttaaacttgagatttcttttgaaactgctgccaccaagaagcctcagttttaatttaacaattttatagcatttcatttgggtttgtgaaatgggggcttctagagttagtggttaacaactgaccatgaggccaggtgcggtggcttatgcctataatcccagcactttgggaggccgagacggaaggatcacttgagctcaggagttcgagaccaccctgggcaacatcgtgagacgtcgtctctgcttttttaaattatataaaatgttaaaagaaaaagaattgaccatgggcgcgtgcagctggtgtgggtagaacatcgtgcgcctgtagctttagtagaattggaaccatttgtctccagagaaagaaatgttgactgctttgtggctagctcagtagttggtacactgctgtcctgggtttgtagctactgagcttaggtgcagcttaggaagtcagctgtgcaaagtgagaaaatcatttcagttaaatttttgccagctctaattttggctttttagtctgtagtagacactgaggaagaattaaatgctggacttgtcttttatcccctaaggtttccttttatcctctcaggtttgttacggatcccagagaatgttcagctcttggtattcttttgtttttgagacagagtctcgctctgttgcccaggctggagtttcagctcactgcaacctctgcctcctgggttcaagtgatttgcgtgcctcagcctcctgagtcgctgggaccacaggcatgggccaccatgcccagctaatttttgtatttttagtagagacggggtttcaccatgttggccaggctggtctcgaactcctgacctcaggtgatctgcccacctcagcctcccaaagtgctgggattacaggtgtgagccaccgcgcccagccagtattcttttgctttagttagaagatagaaagcctatgatgagtttcccaaggcacaggcaggataaataagctgtttcctcagctgcctcctagagactctgaatctggaaaccgcgcctccaccaccattagccagtattgagggtgggtacctcttcttgagatacctgtaaacaattaaaacttgaaaggaattcttagaggaaaagcaaggtaaaaccaaaatcaaaccaacaaaactcagaaagtcacaagataaaaattgttgagttgttctgtgtacaaatataatctaatctaaatcataggccagataatttgggaccacaccccttccttagattagccagaatgtcattctagtacctgcatcctggccctcctttatctgcctgtgtgggcttgagctctccagcctgtgtttctgcagctccctattgttttgccctcatgattgcctccaagaagagaggccccttttcatccaggccttaaaacacttttgctggcctctgtctcatggccctagctttccccaccttctcccagagctccctgtgcttcctggacccaggaaacccagccctggcctctgtcctatcccccgcagctggagtgtttttcatcctgaggactgtctggagcctggctaggctgacagtgagctgtccccagctgtcactctggtatgtctcttgagtcttcgtcccctgtgagtgatgggtaccttgtctacccggagcacttctgcctggtgcccattcattagcaagaaacagtgttctcatttcttcttcttcaggtgccttctccttttgatctgctcattaaatttttttttttttttttttttttgagacagtctcgctttgtcacctgggttggagtgcagtgacatgatctctgctcactgcagcctccacctcccaggttcaagcagttctcctgcctcagcttccccagtagctgggattacaggcacctactaccacacctggctaatttctgtatttttagtagagatggggtttcacatagttggccaggctggtggtcttgaactcctgacctcaggtgatctgcccacctcggccttccaaagtgctgggattacagccatgagccaccattccccacctgtcataaccatcttaattgtatttaacaaatgctcaaaacttcataagacagacaccattgttatgcatattttattttaccaaatagtgaggtttcactatattgcccaggctagtcttaaactcctgagctcaagagattctcccacctctgcctcccaaagtgctgggattataggcatgagatgccgcccttggccattattcctgttttatatagatgatgaaactgaaatccagagagtgagagtaatttgcccaaagacacacagctaaaagtggcagagctaggatttgaacccaggctggccggctggctctactcattacactcactgcattgcctcctgaagcgtgtgtcacgaccccactgttaaccacgaccttgatattccatctctccaaaaaacagttagacgtgcctctttgtggatcttgacctttagttacatttcttttcccagcatcttcaaagtctcatctgccttcctcatctcaaaaacgaaaaaagaaagtcacacaatctatgccgttctctctagtatttttcatttgctctactttttcctcttaacttttttcacctaatctgactcttaacaactaaaagccaaaatcagtccgtatttctgcatacctcagaataagatttccttttgcttcctgatagaagaaggtatgtgagtcccaaaatctcctgctctgaaaaccaaggctactatgaagcacccagcacagatgacagggcagcatggtttactgcagtgttttctactataccgagggtgaattgctgtgttgtctcacactttgggagatattcttggcttcatttagcagtggtcaatgttgactattgctaaaaataaaatatgaagaaccaaagatgaaaatgtacctttggcaagatcaggactccaggggttctgattgttaaaaataattgccctcatgttcagacacttttctatccaatcacttaactgaatccttttgattaagtggatgcataactttgctttcatttctgtctgtgggtcagacccaggaccatctggcttctctaatgaggggagatatttttccattcctgattgagctccctgttgaggttggtctggtctgccttactgtgtaccacctacgagtgtatgcaaatattcattttctatctggaacccattgtttagtggtctgaggctccttcagctggtgtgatggacctgggtgaattgaatgttaagcctgggctgggcacagtggctcacgcctgtaatcccaacactttgggaagccaaggcggatggatcacctgagacctggagttcaagaccagcctggccaacatggcaaaaccctatctctaccaaaaaatacaaaagttagccaggtgtggtggcgcacacctgtagtcccagctacttgggaggctgaggcatgagaattgcttgaacctggcggggcagggcaggggttgcagtgagctgagatcatgccactgcactccagcctgggtgacagagcaagattctgtctcaaaaaaaaaaaaaaaaaaaagttaagcctgttgtcgtatttgcccatagaaaatctgatagggccggctactcagtgggcaggagaccgcgcttttgtgtacagcagttctcgcttctccatggtttcactttctgcagtttcagttacccatgatcaaccagggtccaaaaatattacatactatattttgcaagagacagaccacagtcaaataatgttcattacagcatattgttataattgcttgatttcattattgttaatctcttactgtgcctaatttataaattaaactttatcataggtatgtatatataggggaaaaaaacatagcatttatacggttcagtactatttgtggtttgaggcatccaccggggctccctggagcatatccttgtggatgaaagggggctccatgcctgctctttgatccagaggcatctgatggacttacttgctgtatgtgtttcctggggctgtcataaacagtttaagccacaaactggatggcttcaaacaacagaaatgtactatctcacagttccgggggctggaagtctaaaatcaaagtgtcatttgggccatgctgccactgaaccctatagggaaggacgcttccttgcctcttccagcttctggtagttgtggccatctttggcattccttggctttggatgcatccctctggcctctgcctccattgtcacatgatgccctcccagtgtttctctgccttcacgtggccatctctcataaggaccagtcatatgggattaagggcccacccttctctattactctggtatgacctcatcttaactaattacatctgcaaattaccctatttccaaataaggtcacattcttaggtacttaggtgtcttttggggagacacaggtcaacccattaaactgtaccatattaaacaacacttcctgggccaagggtagtgagaagcgagcatgttccaagcgggaaaaacgccgtgcaaagggcaagaggcgctggagagcaaggcgggtcagaatctcccaggagatcgagagatgcccagatagcaggaatgaggcggtgccggcctgctgtcctctcactagagttctgtgataatgacgtgattgtatttgcatgcctgtaattagtaaccccagatatggagacaggtgtgtggcatagagtaaaagtccatgtttctcccagagagtttcctgtttcccacatgccaggcataattttatgagcaaagcaaatatacttttcagattactagacctccaaatgttatgtgtagatcaagacaagccgtccaaaattactgtaacatcccagttttccaccaaatacctgttccaccaccaattctccaccctcatcctcagtggcaaagataattttctcctgtcctaaacatttctagtcctggccgggcacagtggctcatgcctgtaatcccagcattttgggaggcccaggtaggctcatcacttgagcttgagcactggaatttgagaccagcctgggcaacatggcaaaaccccatctctacaaaaaacacaaaaattacgtggcatgcgcctgtaaaaaaaaaaatttctagtctcgttcttttggtatcaactctgatttccttgaggtagatactgttggcacagtaagcaaaaatggtccccaaactggtcttctgtgccaggaaaattcctttttcttgacttgtcctttattctttctctccttcttcctcttcccttctactggatcagtttctttccctggtcaggccagctgtcctggagccccatactcaattacagggttgtgaaccaggtaaaccaagagaaagagggtgcatttctaagtttgtacgtatggagagatttattttttattttattttattttatttattgagatggagtctcactctgtcgcccaggctagagtgcagtggtgtgatctcagctcactgcaaccactgcctcctgggttcaagcaattctcctgcctcagctttctgagtagctgggattacaggtgcccaccaccacacctggctaatttttgtatttttagtagagacagggattcaccatgttggccaggctggtcctgaactcctgacctcaagtaatccacccgcctcggcctcccaaagtgctgggattacaaacatgagccattgcacccagccgaaagatgtattttaacaaatacacgcacaggaaaaaatctagaaggatatttgccgatatttgcatttataaattgttctataactagtattatttacatagtaaaaatagtaaaagaataaatcaagttttatggagctgaggaggtggcccagtgtgctgtcagagctcccatctgtctggttgtggaatgagccgtctgtgaccatcagggtttggagtcttctctccctatgcatgtgtgttaaacatcttccacagacagcctttgccaatgggtcgcttagggtgggaccactgagaaattcctgtgtttctccctagatcaaatttggaccccttcaaccagtacactgaagaccagatttgggatgccctggagaggacacacatgaaagaatgtgtaagtgaagagcttaggggaagccgtgctgagatggtgagggtggaagcacagcagtgcccttgccacaccccgtctgctctggccgtgcctccaggatgcctgtggacaaaggcttcgtggcagggctctccaagtctttcagatacctgggaaaagctgatccctctcaaccccaccgcccacactgcctacggtcatattggccttgcactatccattgattgaagatagtaatgacaactacttagaattaagtgatgcttttaatttattagtcataacagtgtaacatactttgaagcgtccacatatacgcaaaagatatataacgtggccgggcgcagtggctctcgcctgtaatcccagcactttgggaggccgaggcaggtggatcacctgaggtcaggagttcgagaccagcctgaccaatatgatgaaaccctgtccctactaaaaatacaaaaattagccgggtgtggtggcatgcacctgtaatcccagctactcaggaggctgagacaggagaatcgcttgagcccaggagacagaggttgcagtgagcgagagcgcaccactgcactccagcctgggcaacaagagcaaaactctgtctcaaaaaaaaaaaaaaaaagatacataacatattgagtctgcagaaagcacacagtgtgcatatggaccatggaccacagacattttgggacaactcagtaggccctcacaggccctcacgagcagctgcagtctacaggttgataccactggcctagggtgaggcttctgttatgcctgggttgagtcaggatccaggatcccctgccctaattcaactattagtagatgagttctgttttttcctctgctctatcgggattcttctcatttgaagaataagttctgcagcttacaaaaaatgtttcacaggcacgggcctacggctttggacttcagaaggagagtacttttccttactatactatttcctattgcaagaccatattttcagaaccaaaacttaaggcccactatgtgactggattttggggacatgaaagcgttgggatttctgggatgttttaatggtataaagctaacagaatagtctattggaatcagggactgccttggaagtgggtcctagcacgcatgatcagtacacctgcaccttcattccagatgagacaggttcttggctaatagttctttcatcgctttcagaatcatttctttctgtccttggattttcaggaaattcagcttagtttcttacccctctgatctctagtttctttctccctagattgctcagctacctctgaaacttgaatctgaagtgatggagaatggggataacttctcagtgggggaacggcagctcttgtgcatagctagagccctgctccgccactgtaaggtaaggcagtttggggttggcagcagcagagaatgggaatgttttagtgcagccttgccctgacacactggggtccaaaggtattcctggctctgatccctgttggcactttctaagagcatgaccagagataactctaaccctgacacaatttgggtatattggttctggggagggagaacagggttgctttgtttttaccttcatccaagaccaacttttgtttctggccattgagtagttgtacgactgcaaaccatagacatagaagattttttttttttttgagacggagtcttgctctgtctccaggctggagtgtagtggccaaatctcggctcactgcaacctccacctcccaggttcaagtgattctcctgcctcagcctcccgagtagctgggattacaggcgtgcgccaccatgcccagctaatttttgcatttttagtagagatggggtttcaccatgttggccaggatagtctcgatctcttgacctcgtgatctgcccgctttggcctcccaaagtgctgggattacaggcgtgagccaccgtgtctggccgacatagattttaaaattgcaagagactttaaggtcatccaatccagccccttcattttataaacaggaaaagaatgtccttttgtccagtatgttaccagccatattggattcaagggaaaaaaagaattaattgtacatgctcactgtcacagagcatgtaggggcaagtatttgattaaatccgtggttttgttttgttttgttttgtttttgagacagagtctcactctgccacccaggctggagtgcagtggtgtgatctcggctcactgcaacctccacctcctggattcgcgcgattctcttgcctccgcctcccgagtagctgggactacaggtgcgcgtcaccacgcccggctaatttttgtatttttagtagagacaggttttcaccatattggccaggatggtctcgatctcttgacctcgtgatccgcctgcctcggcctctcaaagtgctgggattacaggcatgagccactgcgctcagcctagatcagtattttacaaatatgctgttttggaaatcaaggcaaacatggttttgaaattgtatcacttctaagcaaaaggatgtttttacatatatgcgtgctttcttagaaaaaaaaaaaaaaaacaataggctgggcacggtggctcaagcctgtaatcccagcactttgggaggccgaggcaggtggatcgcaaggtcaggaggtcgagaccatcctggctaacatggtgaaaccccgtctctactaaaaatacaaaaaattagctgggcgtggtggcgggcgcctgtagtcccagctactcaggcggctgaggcaggagaatggcgtgaacccgggaggcggagcttgcagtgagccgagattgcgccactgcactccagcctgggcgacagagcaagactccgtctcaaaaaaaaaaaaaaaagaaagaaaagaaaacaatagatagtgtaaaacttaaatgaaatacattttagtaaaatctagattaaccagaatgctaaaggaatttaatcgagtttctttctcctctgcttctctggcagattctgattttagatgaagccacagctgccatggacacagagacagacttattgattcaagagaccatccgagaagcatttgcagactgtaccatgctgaccattgcccatcgcctgcacacggttctaggctccgataggattatggtgctggcccagggacaggtaccgagtccttcaggaactttggcttggcatgtctgggaggaaactggcccctggcagggatggactgattgccatctttgtagggttctgggcattcagataagcacttgcagcagcgctatttacttgctattgggagggatacagcctccgaatcacaagattactcaggcacctctgatggggttctcattttactttactaatttgtccttttgttgcttgtgagtagcgacactgacttaagtcagagagtacatgtacttagtgattcattcacatacacaatgatcacccctggcatacttaggccagagagtatagatacttgtgattcattcacatacacaattatcatccctggtacatgtacttagtgattcattcacatacacaatgattaccgctcccggaggcctactgagaccagccagcacatgtttgcttttttgcaatcacgcagcggcaccaaacttcttaccctgttgtttcaggcgttcccacagcctggccctagccttgccttcttcattttccactcttcctttgcaggtgcggttggctatagacatcttgcattctccaagctttttatctgtctttagtcagatagttccatctacctaaaaggccctttgcccttctctctcccatatccacctgctctcaacctgcctgtccctgaagaatgacatggcccagatgccaaagcctccatgaaaccccctggctgcctcagccgccctagactgtatctgtacctctcttgtagctcttctgtctcagttgataggaattgtgcaatgccctgtctccctagagaactccctgaacgctctctgagggcagagtcaccgctcattcatctttagggccccagcagtgcttagtactacagttctttatacaggtgatgttaagtacatttatgttagacaaatacctcttttgcatgcccctaggatacaagtaaattaataatttggaggaaatagcaagccatttataatgggtaacatgtcttctattgtagaagctcccacagtgacagctactataatagctacttctactgaatgtttactgtgtgtcaggcactgtgcttagtgctttacatataatctctcaacataccatcagtcatcacaacaacctagagaaagacatagcctggattctgctttacacatgaggagacaaagtctcagggaaagtccataggaagtggagtaggccgggcacggtggctcatgcctgtaatcccagcagtttgggaggccgaggcgggcagattgcctgagctcaggcgttcaagagcagcctgggcaacatgacgaaacgccgtctctaccaaaaatacaaaaaattagccaggagtggtggcacacacctgtaatcccagctactaaggaatttgaggtggaaggatcatttaaccctgggaggcagcggaggttgcagtgagctgagatagcgccactgcactccagcctgggtgacagagtgagacctcatgtcaaaaaaaaaaaaaaaaaaaaaaagcaaacagtaaaaattggtgggatttaaaaaaaaaggaagcggaggagatgggacaggactcaggccagcaaccgcactgccagcacactgtctaaattgtggagaaatattgagaaaaggttaaatagcgcaggttcagcctgggcttcaaagctgaattgagagaacttgggggctaaggatttttctcctcatcttgaaattattttcacactagtgttttttgtgactatctttgtttgccttaaactaagtgttgactgagattctgtcatacataagatacgttgagctactactttgtaagtaggtgttaaaatagagcctagtaaggtataatagatgggaccaagaacatcttctgggaaattctttttttctttttttgagccagagtctcgctctgtcgcccaggctggagtacagtggtgcaatcttggctcactgcaaccttcgcctccggggttcaagcgattctcctgcctcagtctcctgagcagctgggagtacaggcatgtgccaccatgcctggctaatttttgtatttttagtagacacagggtttcaccatgttggccaggctggtctcgaacttctgacctcagataatccgcccacctcagcctcccaaagtgctgggattacaggcacaagctactgtgcccagctggaaattttttcttaagaacacaaattgagacccctttctttcgatgggtggcttgatgttttggagtggggagcccattcactctttatgagggactctatccttctcttcccttaatttttttcttgctaattaaaatttccttgtaatttcaggaaagcctaaaaaaaaaaaaccacacacacaccagaaaagcataaaggcaaaaacaggatgataagccatttacccccagagacgagcattgtaatacactgacttaccccagctgtgtttttcttgcatctgcacacacagactccaacagatgggatgctctctgccgcagacacaaaataccagactaaaaggggtttggaggatgggattttgttatcccacatgggttggtttttgtgcagctcagcagtgtggggctctgtatcactctcagccagtactcaccttcccctgctggtacaggatgcctgctcaagcacccaaccaaaggaaggacacgtgtccaaaggaaggacacgcttatgttctccttgtggcctgtccactgagcaggacaccctctcctaaagcaccaaggagacttcctcttacatctccttaaacaaggttatgttccatgcctttgccctgtggcgggggcggctgagaaagttgagtacatgcatttcagcctctgccacaggaggtgggttctgccagcgtatcattcagggttctgctgccacatgattttccacggctacatagaagtccatcataggaatggccacctgactaagtcactccctgacttcctttttctcccctgacaactagacattctgagctcttccatttccctctataaggttagatcagcttgcataacaaaatggcatttgtctggtgtgcccttgacttgagctgcaacttctctcccctgcagtttatttattttattttgtttatttatttatttatttttttgagacggagtttcgctcttgttgcccaggctgggagtgcaatagcacgatctctgctcaccacaacctccgcctcccgggttccagcgattctcctgcctcagactccccagtagctgggattacaggcatgcaccaccacacccagctaatttttgtattttcactagagacagggtttcaccatgttggtcaggctggtctcgaactcctgacctcaggtgatccgcctgcctcgacctcccaaagtgctgggattacaggcatcaaccaccgcacccagcctgttgttttttatttatttatttatttatttatttatttatttatttatttattattttgaggcagagtctcgttgtgtcgcccagcctggcatgcagtggtacaatctcagttcactgcaacctccacctcctgggttcaagcgattctcctgcctcagcctcccaagtcactgggattgtaggcacccgccaaccatgcccagctaatttttgtatatttagtagagacagggtttcaccatgttggccaggctggtcttgaactcctcacctcaggcagtctgcccacctcagcctcccaaagtgttgagattacaggcgtgagccaccagcctcctgcagtttatagacctggttggttggttccttcactcccaaggctgaaggaatttggatttatgtgaaggaggtctggaagtcgttttctttttttttttttgctatgatactactttattaggcaaaaccacatactacaaaaatgctggaagtcattttctctgtcctttcccttactccctggatagttgaaaataaaaaaataaggggggaggtgcacgcagggctagttgaattgtccccagattctaccctcagagggcactggcacttactgagccgtggatcctctgaatcaccctgcatgacccagagctgtgtcctgacggcgtctccttcttttgcaggtggtggagtttgacaccccatcggtccttctgtccaacgacagttcccgattctatgccatgtttgctgctgcagagaacaaggtcgctgtcaagggctgactcctccctgttgacgaagtctcttttctttagagcattgccattccctgcctggggcgggcccctcatcgcgtcctcctaccgaaaccttgcctttctcgattttatctttcgcacagcagttccggattggcttgtgtgtttcacttttagggagagtcatattttgattattgtatttattccatattcatgtaaacaaaatttagtttttgttcttaattgcactctaaaaggttcagggaaccgttattataattgtatcagaggcctataatgaagctttatacgtgtagctatatctatatataattctgtacatagcctatatttacagtgaaaatgtaagctgtttattttatattaaaataagcactgtgctaataacagtgcatattcctttctatcatttttgtacagtttgctgtactagagatctggttttgctattagactgtaggaagagtagcatttcattcttctctagctggtggtttcacggtgccaggttttctgggtgtccaaaggaagacgtgtggcaatagtgggccctccgacagccccctctgccgcctccccacggccgctccaggggtggctggagacgggtgggcggctggagaccatgcagagcgccgtgagttctcagggctcctgccttctgtcctggtgtcacttactgtttctgtcaggagagcagcggggcgaagcccaggccccttttcactccctccatcaagaatggggatcacagagacattcctccgagccggggagtttctttcctgccttcttctttttgctgttgtttctaaacaagaatcagtctatccacagagagtcccactgcctcaggttcctatggctggccactgcacagagctctccagctccaagacctgttggttccaagccctggagccaactgctgctttttgaggtggcactttttcatttgcctattcccacacctccacagttcagtggcagggctcaggatttcgtgggtctgttttcctttctcaccgcagtcgtcgcacagtctctctctctctctcccctcaaagtctgcaactttaagcagctcttgctaatcagtgtctcacactggcgtagaagtttttgtactgtaaagagacctacctcaggttgctggttgctgtgtggtttggtgtgttcccgcaaaccccctttgtgctgtggggctggtagctcaggtgggcgtggtcactgctgtcatcaattgaatggtcagcgttgcatgtcgtgaccaactagacattctgtcgccttagcatgtttgctgaacaccttgtggaagcaaaaatctgaaaatgtgaataaaattattttggattttg

SEQ ID NO: 15303 - DNA, 30146 bp, Homo sapiens
ccgctataaaggcttgttttgctgcagggctcatgctcgggagcgtggttgagcggctggcgcggttgtcctggagcaggggcgcaggtaggtgatggctgctgccgcacccctgccctccagctcggttgtcacggggatcacccctttgcatttcctcggggcgtggcgggatgtggccagggctgcgagcagttcgggggacactggagacttggggaacggcgtatggcctccccctggtctcctgccgccgcctcctaggcctgtgagcccggggtctggtgacggggtcgtgtgctggaagacaggcaggtaggatcgggatgagcgggcagggacgcgggctacgtccctggccgcggccgccagggggcgctgcgcccgcgggccgtgggtgtgggtcgcgctcgcctgggcaggccggagcgggctgtgggaacgccctagggcccgggcatcccaggcgaagcgggtctgagagaaacgcccacctgggaggctgtgcagcgggtggctcggggcaccctgctcaacccgcagcggagccgccagcgaccttcgaagtaagtcatccccttcgtttttgcaagcgggtaaatggaggtacgtgacataagcacgcgcagcaaagccgtggctgtgccgggaacgcagcccagatctctccacggtcatccagtgctcttttcgcttctgccacacagagccgcgggtggctttgtgtttatcacacaggggccatttggtttctgcacagacggagaggctggaggcaggtgggcacaggaacgacggggaaagtttcaggaggtcttggaggaggagatggctaggttttactgtggtccgcagcgtgtatgaaaggtgaggctgcttggagacgcaacaagtggattacagtgggtgtggtaaatacgtatccctttagcgtggtgtcttcctcgtgcagcttgagggcctggaggtgatggaaacctactcatgagtgttgggatgactgcagcttgcacacaccagtctggtaatcccgtgcaactctcctcctgccatgcagttgaatcagtatcattgtgcagggagagtgtctacacttttatcagtggaaagagaatcttggtaaaaaagggcagctgactaagtggcctcaaccctattgggcacttctttggggttctcccacgttgattattctgcttctacccttgtacatgtctggacaacaggtttgttttttacaaacaaaaatcccttctctttcttcctctcttgatagctgaggcaagtgagcatttaaaaaagatattccaacaactttaaaggaggacacgagaagatagggaaatataaatagtatcagtaaaatggctggcctggggatccatccttgcttgcttgcttgcttcagactggggctttgtttctttccaaacctgtcaggattcccagctcttcgccggcctccacgtggggtgccctcttttatgttccagatacacagacgatggtgtccttatgttcaaggccacagacagtaactttgtgcctactttgggcctgcctgctctcctgattgtgcctctttttccaggaaagtagagatgagtgtgttagagataatggaacactgttccccacacccttcatacatagaataacttagtcccttaggatagtttagcagtgtctaccacagcagtcactgtaggcacaaaacagtcattatttgtgtcataacagggaagtcgttttgtccctgcctctctctgctcctgtgctccactgattctacttcatcctttgaaataaaagtggttgaaagaatctttggttatcatgggtgcttagataattaagattatgttcgtgttcttcttgatgtggcatttcatattgtggatgagttccagtgacctcctctgtttcaaactgctcaccgccccaacccccaccttttaaaaaggtagtactaatcttttcctcttccagataatcagctaagctagggaacccttgaaggggaaggttagaatttcgtgattcccgtaagaaggttactctgatctacagctacagctcaacactggggacactggcagatgccaggtctgtttatagtttagccttaatgaggtctcaatgacgtgattgctgcactctggcttggtgagccgctgttctttatggtgtagtttgtcattggacaaggtgactttttttttttttttaaagataagtaacagctatatcaacttagggtacttgaaccagaattctgaaaggcaagaaatcaagctttctttggactggaaacctgtctttgcataggagatttagtcctttttattcagaggattagtaagtgttctctttttatctgacactttaaaaattgcattataatggttagaattttgtgctgcagaagtagtagttttaagtcacagcgatagccagggatttatggaatccagaaggcgacacggctacacgtctttaatttccgttggaggctagtatgaaaggtgttttctcagcttgtctctgggaggctgtgacccttcttagaggggggaaacattttggagaagtatgtatgtgttttttgtttttaagtgacctgagttgatacagcatattgattagacttagccaggcaagcagtggtttagaatagagtttcaggtaaaaactaggtaagacttagtaatacagggtggagaatttgtttttgttattgttttttactaacagctttgttgccataggatttatatgacatgaaattcactcttttaaagtataaattcagtgtgttttttttcaatgtattcactgcattgtgcaaccattaccactatctagttttagaacattttcagtacccagggaatttgtgtttgaagttaagttataacattgttttaactggataacttcatggagctttaaaataacaccagctaacccattagttaattataaaaaggcagagatggaatatatcattggtagaataagtgtttggtaagtttttatttagtaaaatttagtagaagaaatgatgtccactttaaaattgtggagtttttaatacttgggacaaactgaaattgtttctagaaagtctttaaaaaaaaaaccaacctttctattgtatacactggatttgagcttagttgaagagaatgggtgtctctttactagtgtgtttactgtttctaattttttttcccttagagttgggagaaggtaatttttcttgattctcttatactgaatctttttctttaaaaaaatgaaatcaaaatctttgaactttttttgaaaattaatttttgtagctataacagtagaaagctttagtacttttgccttttttttttttttcctatttttaaggcacttgagcttatggttaagtactgtttaggaaataatctatttcttgatgaatttttaatttcaggaattctgatgtgaaactaacagtctgtgagccctggaacctccactcagagaagatgaaggatatcgacataggaaaagagtatatcatccccagtcctgggtatagaagtgtgagggagagaaccagcacttctgggacgcacagagaccgtgaagattccaagttcaggagaactcgaccggtcagtttcctttcctaagagtctcttacctgcttgttgtactaaaacacatcttttttcgtataatgggtaatttagaaacttattttttggccgggcgcggtggctcacgcctataaacccagcactttgggaggctgaggcgggtggatcatctgaggtcaggagttcgagaccagcctgaccaacatggtgaaaacctgtctctactaaaagtacaaaaattagccaggcgtggtggcgggcgcctataatcccagatacttgcgaggctgaggcacgagaatcgcttgaacccaagaggcggaggttgcagtgagctgggatcatgccactgcactccagcctgggcgatagagcgagactcagtctcaaaaaaaaatgtgtttttctttattggctttaggttactgttaagaatttatggttattgataagtctctggtccatagtaagcactcaataagtggaagagaggctggctgtcaccctctcacccggtctgttctgagcattctcctctttttcacttttattctatgttggtgccttctgaaaaggctatacttaacagaagacaacttattgagggggagggggtcatggggtcaatgacagggaatataaagccaattaagcttcattcatgtacctaaacaaaattggtgttttcttctactttctgtcatgtgtgtttaaaatgtgaacctggccaggcacagtggctcatgcttgtaatcccagcactttgggaggttgaggtgggtgggtcacttgaggtcaggagtttgagaccagcctggccaacacggtgaaaccctgtctctgctaaaaatacaaaaattagtgaggtgtggtggtgggcacctgtactcccagctactcaggagggaggcaggagaattgcttgaatccaggaggcagaggttgcagtgagccaagatcacgccactgcactccagcctgggcaacagagtgagactccgtctccaaaaaaataaaaaataaaataaaatgtgaatcctttggagagactcagatttcagaacaattctagatagttgtgggattatcagtatgtttttcaagcgaattcataagttaagcagtctttagataataatctaatttcctccaagggaaataatgaagatgcgtttttacctcgagaaaatattctttttcctgaggaaaaaaagcattataccttttcttacaaaagtacctaataaggcagaatggactaggtttaggaagttgaggtttttgttggtgtatttgttatgtgaaaatttgagaaagataatggactttgcagctgacactggcctttccttagcctgatactacctttccctctttggttgtgttaaagccattgctttattaatgaacattttcttgctaatgagtcttttctgtaccctactgtgtattatagaatgcttttccattcaggtttaacttcagagaaacaggcttaatgtaatcagtgtcaaatgcttctcgtggtgccagttttataacttcctcatgtccttttgtctagaccttatgttgattaaacatctatccattacatctgagtgctagacacatttagtgtaacagttaagtctggaaaaagtcagaaggtaacattggggcagggccttaaagggtgattaggtggggaggctttttaggcggtacaagtacagacccaaaggtatggaaagagcgtgtgacatattgggactttggataagctacttacgtcatttgtatataaaatggggttgacagtagtacctgactcatgggatcactgaggagtaaatgagataatacatataaaatatttaaaatggtacctggcacatggccagtgctcaataaatgttagctcttagaactagttgttcagggcataggatgtgtaaagagattataggtcgggtgaaattctgcatgccatgctaagaaatatttcactgtgggcattagggaactattggaagttaatgagattaaaaaaaaaaacctttttattttgagctaactgtagatttacatgcaattataaaaaataatatagagatcctatatattcttcatccagtttcccccagtggtaacatcttgcataactatagtccagtatcacaacaggataatgattgacattgatacaatccattgactttaggatttcaccagttttatatgcactcatttgtgtgtgtgtgtgtgtgtgtgtgtgtgtgtgttgtgttctatgcattttttaaaggtgtaaatttgtgtgaccgcttccacagtcaggatgcaaaggttccatcacaaggatctctcgttacccttttatagccacagtcatgtcccctcaaccccagtctctggcaactgctaatcttttctccatttctgtaattttgtcattttaagaatgctatatacattgaatcatatagtatataacctttcgagattgcttttttcactcagctgaactcccttgatagccatctaattttgttgtgtgcatcaatagttctttcctttgtattgctgagtagcattccgtgttatagatgtaccatagcttctttaaccattcatttgttaaaggacatatgggtcatttccagttaatggcaattatacataaaggtgctctgaaccttcagttacaggattttgtgtgaacataagcttttatttctctggattaatgcccaggactgcgcttgctgggtcatatggtaagtgcatatttagtttgtaagaaactgcagtactctttcccagagtgtctgtgccattttacattcccaccagcaatgatccagtttttccacattgttgccagtactcaatgttataatgtttattttagccattcctatagatgtgcctggtatctgattgtggttttaatttgcagttccctaatggctacgatgtttgagagtagatttttatcttagattagtcttgaagcaatgcagaaaaaaacctgtacaggagaaagagaccaaatataaagagcattcaggaagcggctctgcctatccatgtcagagaggccagggttctgttgtaaagcacagaagtgaggatggaggaaaggcgtttctagaagatagggaggcattggggtgtctgggattgatggtaaggatttaaacctattcgtggacataagaaaaggagattggggagatattaagaatgagtttgggccgggcacggtggctcacgcccgtaatcctagcactttgggaggccgaggctggtggattgcctgagctcaggagtttgagaccagcctgggcaacacagtgaaaccccatctacttgggaggttgaggcaggagaatcgcttgaacctgagaggcggaagttgcagtgaaccaagatcgcgccattgcactccagcctgggcaacagagtgagactccatctccaaaaaaaaaaaaaaaagaagaagaatgattttgattttgaagatgttgaatttgaagtgcatatgggtaaaattatcagtaggtagagcatagacaagaagtagtgtaggaaaaaacatttagagcctttagtgtgtccacataggtgaagctgtgagagtgagcaggcttacccaaggatggcttgcagagcaggagaaggtggaggctgtggagctggtgtgtggtcctgtgaaatttctggggatagggtccccagcttgtgagagtagagttgacatcagggtttgcagtggcagcagcgagcttttcctctacgaagtggagaagaacagcaggtaggcaccgctgggctttgagtaccctaaaggatatggagtcagccaccactgtagcaggttttcaacatgccactgaagccttatctcagagaaatatgaaggctaataccacttttataaaatttcaggaatccacatgaattttatgaattttatttttattattctttcatgtttcctaaactttttttttttttttttttttttgagacgaagtctccttctgtcacccaggctggagtgcagtggtgcaatctcagctcactgcaacctccacctcccgggctcaagcaattctcctgcctcagcctcctaaacagcaggtgcctacctgctgttctctgttaccacattggccaggctggtcttgaactcctgagctcaagtgatccgcctgccttggcctcccaaagtactgggattacaggcgtcagccaccacatctggccatgaacttttattttttattaaattttttttgtttgtttttttgtagaggcactctcactgttggccaggctgttgttgaactcccagcttcaagcaagcctcccgcctcagcctcccaaagtgctgggattacaggcatgtggcaccacaccctgcccctaaactttgaaatttgagtactgttttcctgatttttactgtatccttgtaatctctgaacttttttaaaagatttcttttattctactctctttctgttacttagtctagacctagcaaaacaacaacaataagcccataggtttattcaagctatttttgtatatacattaaaatgaatgcatcgctactaagtatttttgtaagttcagacaccatctagaatctgcttgaccgttacctgtcaaaaaacaaaatttctcagatgtatttatctttaacttgtcttcatgttacaagtttgctgacagaagcaaccagcaagatgacaagaaattttgtggtctgagaaaattgtataaatggtataaaatggataatgtaagtagttgggaagcagaattcctgtataagcatatagtttttctttttttaaagtaagcagttaattgggcagagattgcaatttcatgtcacatcatcattaccatcatttttatatttgttagagaggaaatctgggacaggatctcccaggatgccaggtatgcctactatctgtcaaaaatttaaaacaaacaacaaaaaagcctctaagtaacaaaagataaggatacatctatggctcttatgtggaaagcaaggtttcattcagcactattagcctttaacacgtggaattaaccgagaagcaggagacctgtgctgctggtgcctcacgcctgtagtcccagcactgtgggaggccgagggaggaggctcgcttgagcctgggagtgcaagaccaacctgggcatcatggtgagacctgtctctacaaaaaaataaaaataaaaataaattagctgggcacaggggtttgtgcctgtagtcccagctacttgggaggctgaggtgggaggatcacttgagcccaggaggtccaggctacagtaagctgtgattgtgccactgcactccaccctgcgtgacagagcgagaccctgtctcaccaaaaaaaaataaagaaagaaagaaaagaaatggtgtcaaacagaagtcagaagcaaagcaccaaagaataagttctgactttgagcaggccagtgcttttcttcttcaaggtgtaagtgaagatgcagattacatggtttgcccatttctcagtattgtgaccaaatcattcttttggaatatgacttggaaaaattgctctattagtcacatcttcaaatatttataatttctcacgtatgcttagaaataattagggttgaaataaagcattcgcacatctacccactttcttcgggactgtaatgttaatgcttgtggccacacacaatttgaggcttagcaggcatcctttaatcctgaagtgttaataaagtggtggtttctgttgctgttagttctttgagcctgagtactaactttggctggcattaggctggcgttacttcagctaacatgaagttttatacctaggctgctcctaaacactgttcctttgcctgaggcatgattattcaggcatggttcctttttttaatcctatttatatatgcacatgtagatcatatgactccacgagccctgatttttttttaagatgcagtcagtgtttattcatttttttaaatttagcaaatatttgaacactcttcaagatgcatgcacagcactgaaccgagtggtctggtgcagataaagataaattggtgctgggcctgcttgtccaccaatagaagcttaaactcacaacacgtactctacatagatgactgtaatttagatgctgtgggaattagtaaaaggagaaagtgcttctctctcagggaactctttaggaggaggtatcatttggctggaaacttgaggaatggatagaatttggagaaatgaagaacttgccaggcaaaagaaagagttgtgggatagggatacctagtccttgttggtattgagcatcaaatgtgtgaagtcttagctatagtgcaatacctcagtgaatttcacattatgtgtggggtttttttgttttttgttttttgtttttgaggtagagtctcactctgtagcccaggctagagggcagtggtgcgatcttggctcactgcaacctccgcctcccaagttcaagcgattctcctctctcagtctcccaagtagctgggattacaggcacatgcaaccacacccagctaattgtttgtatttttagtagagatggggtttcaccatgttagccaggctggtcttgaactcctgacctcaggtgatccctccgcctcagcctctcaaagtgctgggattacaggtgtgagccactgcgcctgggcatgtgtgttcttgaataataagccaaggagtttggattttaattgctttaaattaatatttaagcaaaagcaagacaaagcttgtcagatgcttttatgagctttattttattgtggtggtggtttgttttcttagtgctctcaggcaaaggtaagggtgccttgtttttcattagcatgtctaatctgggaaagaaggaagaatggaaaaataagcagaagtgggccgggcgtggtggctcacgcctgtaatctcagcactttgggaggccgaggcgggcagatcacaaggtcaggagattgagaccatcctggctaacatggtgaaaccctgcctctactaaaaatacaaaaaattagctgggcatggtggcatgcacctgtagtcccagctactcgggagactgaggcaggagaatcgcttgaacccgggagccagagtttgcagtgagccgagatcgcaccactgcactccagcctggggaacagcaagactctgtctcaaaaaaaaaaaaaaaaaaaaaaaagcagaagtaaactaaagttcatgtaccattattactggcacatgaactttagttattttttccccttctctcaaaagtgtgtcattggtgggattttcttcctaccaaattagaatatcctgtgtctaggaaaggtaacaaagcaagtattcataaaatccagggctcttacttagtatttccttagttctgtggtaggctgaccctttaatcttggttggagttttcataattaatgctttgaaatattttggtgagctcaagttgtatcttagggatcaaagatgtgggtctaatctcttaccagaaatgattcgaagatgtattgttaggaaagaaatatgggctcattatagaaaatgtacaaagtgtgtaaagttgtagaaaaaaagtaaccacccttaattcctctacccagagacagccattgttttcataaaatagttttgtctagtacattgtacttttagagtttgctcctgaaagcttttctttacagactaaggacgtgtgaatttgtctatgcccttgtgttttccaagtcaagagtattacctgtgagtcggcttgctgttaggaaggagagcaggaggaaggagattagcattttgcagctctgcattatttttctcttgattgatactcggtgactcagcagattttctggacagggttaagataagtaagaatacctgcctttttttttttttttttttcttctctccctgtaggcatccataaagctttatgaggcacagtagtctcttaggcgctgctgggtgtgacaccgtatctggtctggtgccaggtgttggtctccaatagcagcccagagatctccggctgaggtaacaacagtgtgcgattggtgtggagcccaggtggctctcatgcttggtaactgcattgacagctcgctggggctcttgaggttgggctgctgccgggatcatcagctctcttatgccgtttgctgcaagactgccgcggctttcctaggaagtgctgcttaagggaaataaatatagcctgttggcatgagttaaaggaactttctgtcaaaggggaagaaaagtgttggaattagcttcctgttttttttttttttaagtacctaaatctttatttggttaagataacttggaagttacaaatggttaatgaaaactttttcaatgaaatattgtttccacagttaggtgggtttccgttaatgctttcttttttttagttattattatactttaagttctagggtacatgtacacaacgtgcaggtttgttacatatgtatacgtgtgccatggtggtgggctgcacccattaactcgtcatttacattaggtatatctcctaatgctatccctcccccctccctgttcatgctttttttaatgtcttaccgtttttccctctcttttagtcaaaaataaaaaggtcaacgcaaagaaacagggactccagaaggctttgcaatggttaaacctgtcattattaaactcacagactaatgtgaagttaatttggtgcactgaagtccactaatgagcagaattaaatttatccttttcctccctgccccccttttaaggagttagcctatttagataattagatgttatatatgttttaactatttaagattattttatgaattagctgttcaaagaatcaattgttactagatatcagatgagaacttccacttaccaaagcctgctcatggaggtagaaagcaagactgacatgtgtactttaaaagatggatggaacctcaaaggccgtcttgcccagtccccatttagcctcacctctctgtaggtgaggcccaggagagacacttactaggcagactatgctggggctgggtgagcttcccaaggatgttctttctggaattcggtggctcagaatacagcacttggctcctctttgaagcatgatggctctgttgcctgtctctggcccagtgtgctgggctgctgaaaagagcatggaaccacccaggagacgccacgacactgacagctgtacctgacctgagggttcaggatatgttttcaaaagcaaatctcgctaaaaaggatttgtatgttattatgaaatctatatttatgtggtggaaatagacacactcaggcttttagagataaactacacagaatgggttacaataaatgcttataattgtttggcttttttaagaatcctgttaacttgacaaccttctgtttacttttctttggtattatgcaggtatgatattgagcagtcacttagttttcttaaatgttgtgtctcacagtagaaaaatagccaaaccactcagcccctgacctttgtgtttgcttctcacggtgatcagcagttctggtctgctctgcagtatggtggtcacatgatggaacccagaaagccttgtactaagcatttaacacacattgtgttaggcactggaggaagtttcatttacaaattatattttggcctttttttttttttttttttttgagacggagtctctgtcacccaggctggagtgcagtggcatggtcttggctcactgcaacctctgccttctaggttcaagcaattctcctgccctcagtctcccaagtacctgggattacaggtgtgcaccaccatgcctggctaatttttgcatttttagtagagacaggatttcaccatgttggccaggctggtctcgagtcctgacctcaagtgatccacctgcctgggcctcccaaagtgctgggattataggtgtgagccactgtacctggcctttttttttttttttagctaaagcctgaaaatcttgttgaagggattttgtcaaatgcaaaagaccaatattcacaactctctaaatcagtggttttcaggccaggctgaatgttaaaatcacttgaagaatgttcaacaaataccagtgttggggtcctattccagaccaattaaatcagtctctgggatagaacccagacattggtattgttttaaaactcctctggtgattctagtaggtaggcagtgctgggaatctctagatctcatggaataaagtctgttctctcccctcactcaatggctccaagtgtttcctgtaaatcccgttttacccctgtgattcattttcagtttaatcctttgaaaccttaccatgctattaacaaagttaatcttagacccaacataacaggaactttgaataagttccttggaatttagcttatgaaacaactgaaagccctcaaattcctggtgattatggagtaatgctagattatcaactgcagacaaatacctgttttactgtggtggtggagatatgtttgtgaattgtattgctagctgatcatcggcttgagagtaacatagcacagctacagataagtgagctgatgctcaagttaattcttttctcagtgtagtatagctgttgagtgataggactgagtttagcagcttccctgacttggaataatagctctttcttttgtattctgcttcttccccatataggttgggttctagaattttgctgatcctcttgactgaaatggctactatttggaagttcttaagggaagagcttaagatggtcagggttgtgataacaacccactggggagtaaggatgtggtgggaattgcagaggaaacgtgcttggtaggtttctttaacttgttggagattaggaagggcgggaaggcctgaagtcagccggtcttgggaggacatcagtttttgatctttttaaatttaaaagtgaattttaattcacttttaaatttaatttctaatattctgagtcccttaagaagtatatctagtggcacaacagttccccttaaaagtttgtctttctagatgtttgtcataaaggctgcgtgggcctgggacatctgtagaaatggttttcttggccagaaggatgtatttgaagaggcgcccattgtcttgtttgtcttaaggtcttgtgaatgaggagaggagaggaagacagtgttgtgagatctgaggcctgttgattccgattgtgccccagataccgctttatttgaggggtgtgccagacaggagcaggcagcctttaacccccttggaaaccgaggtacctctctgttgccagttgacacctgcagtctctgccttcaggaacaacttggttgaatcctcagcccgaggcttattaggcaggctaccctgctgttgtccggcctccaggaagggattggattgttcagacggggaacgatttctggcccctggtatctgtcccagaggcctccgtgcaggggaaaagcccttggttgccctgtcagcaggcatttgctctggcagcctgttaaaatgagatgggacagctggagaagtggtggccatggggtgtgataggtgcgctgattatctgaggcctgaggatggcgttagcgcccgcagaagcgtcttttgcaagagcagatctgtctgcttatgaatcgaatgttacctgtttttcataccagaggtgtctatgaatgtgtgtttccctgatctttgtttgaaccttgacagaatctgaattgctttttgttattgttgtttttgtttttctcttttttttttttttgagacggagtctggctctgttgcccaggctggcgtgcagtggtgcgatcttggctcactgcaccctctgcctccttggttcaagcaattctcctgcctcagcctcctgagtagctgggatgacaggcatgcatcaccatacccggcttatttttgtatttttagtagagaccgggatttcaccatgttggccaggctggtctcgaactcccaaccttaggtgatcctcccaccttggcctcccaaaatgctgggattacaagcataagccaccccacccggcagaatctgaacttcattgtccctctttagcttccctgtgaccttactcctgccccattgccattaccttggtaggaaaaatgctgagtatcctagtcacatagtcatggggaagatataaatggcagtcatacttcctcgtttgatatttttctcagctcctggatctgccagtatttttccctttaagacaaagcagctgctgtgggtgcctttctgtgtggctgggtcgtctggccactgacagcctttcagtgtgctgtgctccttaagagaaatgggtcccctcatcttgtttcaggggaaactttaaaaagttacttgtaaaagggattgaaagcatcataacaaaaaacaaatggcctcataaaatacattcctctaggtcagcctatatcagtactaactgtgttagctcttcagctatctagggttaccttagtacgattgacattttgggccacataattctttgttgtgggggctatcctgtgcattgtaggatgttcagcagcatccctggactttacctgctagagctagtagcacccctcaaacatttccagatattgccacatgtcctctgggcaagcaaaacaccctcacttgtgaactcctgggctgcaccgtgcgacacagtactattgtggctattaagcatttgacctgtggccagtctgaactgagatgtgctgtaagcataaaatacctgatttcagagacttagtacgaaaaaagaaatacctcgtttgtaaaatacctaataatttttcacattgattatatgttaaaaaagataatactttgcattgggttaaatgaaatatattatttaaattaatttaccttttactttttatttttagagtcagagtctcactctgtcacccagactgtagtgcggtggcatgaccatggctcactgcagcgtcaaacacctgggctcctgtgatcctcctgcctcagcctcctgagtagctaggactacaatctcgtgccaccatgcctggctaacttttaaattttttatagtgatggggttttggagggttacacagactagtctcaaactcctggcctgaggccatcctcccacctcagcctcccaaagtgttgtgatgacaggcataagccactgtacactgcctactttttactttttaaatgtggctactagaaaaatttaaattacattatgtggcttacatttgcagcttgcattatatttctattggacagtgctgaactagagtgttgatctactgtaggttagccattgattttgtattaggcatttagatccctgtaagctgttgggtttaatgattttttcctttggaagattttcctttatgcagtaaaattatggagacacagagtatgtagtattacatattaccagtttgctctcctgaatccctgctggtagcatattaaaaatcagtttaatgttcagaccgtgtatgtttgtctatatttctctcctttccatattgcattttcttttccatattagattttatctcttttaaggcttatgtggttgtatcttaaatttaatttgtatttctcgattggtgacattgggtctgtgtgttctctcctgtatctagaacagtgcctggcacatagtaggccctcagtaaggactagttgaatgaatggatgaaaaaatactgtattttactttttcagtacaagtccactactcgaaatatattattatgttagctacttggttacttcttatttttatttatttatttatttatttagagacagggtctcactctgtcacccaggctggagtgcagtggcatgatcttggctcacttcagcccgatggtcctggctcaagcgatcctcccacctcagcttcctgagtagctggggctaacggtgtcccttttttgtatttttttgtacaggcggggtttcatcatgttgcccaggctggtctcaagctcctaggctcaagcgatctgcccgcttgagcctcccagagtgctgggattgtaggtgtgagccgccgcgcccagccacttggtcacttctttagctttatcttcccttctcttaatgctaatttccttacgcaaaaaagtttccttttcatgtttgaacctctcttccctttgatacatttctgcttgttgggtgtaaatggaggctgtcccccatcatagctggactaagtatgctatataatttatgtcatcatttttaatgtaatttttgggaggttaattccagatggattaatgtatgatatgaaacctggatatcaattaattcatctccaatctggttagttggtaggaaggtaggtagtaggtaggatgtgagtgactgtctctgtcacccaggctggggtgcagaggtgcaatcatggctcactgtaccctcgacttaccaggatcaagcgatcctcctgccttagcctctcaggtagctggaccacaggtgtgcaccaccatgcccggctagttttaaaaaatgctgtatatagatgggttctcactttgttgcccaggctggtcttgaactcctgggctcaagcgatcctcccactttggcctcccagtgctgagattacaggtgtgagccagtgcacctggcccaatctggtatttatttgtcccaacaatattcactgactcatgattccctaccttgttatattatttatgcttttgtatagtaagcccttatagcttgaatatattaagtcttttctcttggttcattgccatttttaatccattcaaccttagaatgttgataactcactttatggaatgttaactgtggtagaaaatatttatttttaccttcaaatagacatacttttttttttttcctggcatgcttggccatgtgagcttttttaggaagcctagagaggaagagaagttagacatccaagcatatagttagtttcaagtgggagacatctgtgcagttactggcaggttagtataaagatgctgttattttatgtttctttttttttttcttttttttttttgagacagagtctccctctgtcacacaggctgcggttcagtggcgcgatctcagctcactgcaacctgcacctcccaggttcaagcaattcttctgcctcaccctcccgagtagctgggactataggcatgtgccaccatgcccgcctaatttttgtatttttagtagagatgaggttgcaccatattggccaggctggtctcgaactcttgacctcaggtgatccacccgcctcagccttctaaaatgctgggattacaggcgtgagccactacgcctggccctgagtcattgtttatcttaatctggtattcaccctggggaagagagaagagccatttatgaggtacacctgggatcattttgtacagttatggtttatttgcttggttttgttttttgtttttttgttttttttgacaggcccatagcatagtgatcaagacccttagctcaaggctggattgaaatccctgctgtgacctaacatcggtgtgcctcagtttccttagctgtaaaacagggatactagtacctacctcaaagggttgttatgaggattaaattagttagtatctgtaaaccatttaaaacagtgtctggcacatagtacatgctatgttggtttgttataaatttgtataaattttcttaattacctttaagtgaaaagcttgcctttataaatgcatactagtcgtgagatttggctgtacacaaggaagattgctatagcttcctttatttcttgctaatgtcaagacaacctgaggtccacaaaatagaagtgaaagtactaaagttaatagcaattctcttttgcaataatactggagcacatatcctgtaataaagttaattggggcaaactgggtagaagtctaattgctaggagctacatttttttaatcctgtaaccccagggatagaatttatcctaaataatctagaaggagaaaaataaaactataattgtatattatactattaataataagcaaaagctgggtgtggagactcatacctgtaatcccagcactttccgaagccaagaatggaggattgattgcttgagcccaggagctcaagaccagccttggcaacatagtaagaacccgtctctacaaaaaataaaaaaattagccagacatggtggtagtgcatgcctgtagtcccagctactctggaggctgaggtgggagattgcttgagccagggaggtcaaagctgcagtgagctatgattgtgccactgcattccagcctgggtgacagagcaaaatcctgtctcagacaaaaataataataagcaaaacagctagagaatctaaacagaagtggaatgggtaagatcgcctcagtggtatatcatgtagcattaattgatgatatgtagaatgtaagggaaagaaggtattttgaaggtgttttcattgacgtttgaatactgggtgccaaactctctactatgccagaggccagggatataaacaagaggaagacagcttgccctctaggagctcttaccagaagcattgggctgtggtggtataggtacagggaagacataggaggaaggaagtaagttccccgaccttgaaagagtcagggaaaactaaaggaaagaagaaatcgttgagacagaccctaagatttattggctaagtaaattgggataatatagctaacatgtattgaatgtttattatatacccaatattttgctaagcacttttaattatcccattaattcctctcatccctatgtggtagatgcatgtatcattgtaaaaatgagtaaactgaaacttaaatctgtatctatcttctaaaattcatgtttgaaatcactgtatttactatggcttccagctgtgggaaaattctgcctgtggagatcttcatactttaaggccataagaaaaaatagttttgttggagtaagagaattattttctcttgtttttattttttatttatttatttttcatgttaacatttgaaagttcttgccaacagctgaatatctgttgcttattgttttgagagacctgtctctgaaggaggtaggtgcaaatatggagtaggacagtggttccttcaaaggagaagatcctgtatcatatcctgtatttccatcagatatttcattttcctgacttgggcaatgtgtaaagatatgacaacaagattgacaatttgggaaaacgtttaggaaagaataacagggacaggatgtgacttggaaagttcgttgcttagagtagcaaggtttgattctttttgatcaacaatatagacttttccatcctcttactgtgagaatttctactccatgctttgttacatgagaattctgagattagtgctatttcaaccacttttatgggggtttgttaggataaaattgcactgagtgcctgttctaaaaccaaaggcagcaggagagccctgagtctctgccatcagtagtgccactgcagtactcacgagaaacctggggaatgaagacttgcctggcagctttcatttgaatctttttaaaaagagcctttgattttgatgttttccaatataggaagtaacttactacctaggaggtggtgaaacatgacatagttatatatagtaaaaagaacaaaaaccatgcaatcagaggattttaaaaatattaagtccatttagttttctatgaataggttttagtgaaaactgtcactaggcattttagaaatgaagaaaatgaaatcagtgtgttatacacataggaactggcatttttttggttcccaccatctggaatagtcttacagatcggaggcactcggtaagttatttgtggaaagaatggatgaaagctgtgaagattctggtttcctattaatgctaatatgccatgctcatgtaaacatactgatggattgcttgccaagttttcctcttctgatgcttctcaaacatcaaagatgtttatagaacccttctggccggacacggtggcttacacctgtaatcccaacactttgggaggccgaggcaggcggatcatgaggtcaggagatcgagaccagcctggccaacacggtgaaaccccatctctactaaaaatacaaaaaattagccgggcgtggtggcgggtgcctgtaatcccagctactcgggaggctgaggcaggagaatggagtgaacccgggaggcggagcttgcagtgagcttaggtcgcaccactgcactccagcctgggcgacagagtgagactctgtcttaaaaaaaaacaacaacaagaaaaccccttctaactcttgaacttggttcacctggaaaagcaaaagaactagaatagctaaaacaattttgaaaaggaaggataaagttgaaggcatcacactatccaattttaagacttagtttgtagctacagtaatcaagtcagtagtatcaatgtaggggtagacaaatagatcaatgaaatagagtctagaaatagactcacacaggcatggccaacttttcgacataagtgcagcacacctcactggagaaatggtaatcttttcaacacatggtactggaacaaccggacatctgtaggcaaaaaagtgaacctttgccgaaaccttacactttatacaaaaattaactcaaaatgaaccatagatttaaatataaaatgtaaaactataaagcttttaagagagcacataggagaaaatcttcatgacctgggggttggaagaagagttcttaggcatgacactaaaagcacaattgtaaaagaaaaaaattggtaaattagacttcaaaattacaaacttttgctgcatgaatggccctaattaggaggatgaaacatggccataaaatgggagaaaatatttgcaaatcatatgacaaagaactttaatccagaatatataaggaacttgctaaactcaataataaaaaaaaaaattcacttagaaaataagctgtaatttcagcactttgggaggtcaaggtgggaggatcgcttgagcccaggagttcaagaccggcctgggcaacatagtgctgtctccacaaaataaaaataattagctgggtgtggtagcacgtgcccgtagtcccagctacttgggaggtgggaggatcacttgagcctgggagttcaaggctgcaatgagccgtgatcatgccattgcactcccagcctgggcaacagagcaagaccttgtcttaaaaaaaaaaaaaaaaaaacatagaaaatgggcaaaagacttgaacagatacttcagcaaaaagaatgtaggggtgacatataagtacacatagatgttaaacattattcgttcaccattagggtagtgcaaattaaaaccacaataagataccataccacacctattagaatggctaaaataaaatataatgccaatactggccaggtgcggtggctcacgcctgtaatcccagcactttgggagcccaaggcaggcggatcactaggttaggagttcgagaccagcctgaccaacatggtgaaaccccgtctctactaaaaatagaaaaattagccaggcgtggtggtgggcatctgtaatcccagcaactcaggaggctgaggcaggagaattgcttgaaccctggaggcggaggttgcagtgacccgagattgcaccactgcacaccagtctgggcgacagatcaagactccgtcttgggggtaaaaaaaaaaatgccaataccaagcactggtgaggatgtggggaaactagatttctcatccattgctagtgggaatgtaaaatggtactgtggtcaagtaatttcaatgacaactaatatttgaatcataaataatgtcaagctgctttatatacttcttgtgctatcaaaagttaaacaagaagtgagatctccacttgaagtcaggagtttgagactagcctgggcaaaatggcatctctactaaaaatacaaaaattagacgggttggtggtgggcatttgtaatcccagctacttgggaggctgaggcaagtgaattgctggaacccgggaagcggagattgcagtgagccaagattgcgccactgcactccatcctgggtgacagagcgagatgctgtctcaaaaaaaaaaaaaaaaaaaagtgagatctccattccagtacaaatttgtagtggatatatttttcaaactgaaattacagttctagtagtgatttttagacctcgatgatgtatgaggcaaatttccatatttcaagatccgtgtattttggaaatagtggcaatggttgtatagtattgtgaatataattaatgcctctgaattctatacacttaaaatggctaaaatggcaaattttatgttatatatattttgccacatagaaataatccatttaactgtggcatttagttgcttccacataactttccattgaaagtgattaatctgcagtggggtgcatgcatgtaatgatatgataaaggtaaatgtcaagagaggaatctaatagaattctataatgtcttccatgagataaaaggctcaattaaaaatgtgtattcctggatttagctcagtatttggaagttcctgtctttttttttttttttttttttgagacagggtcttgctctgtcacccaggctggagtgcagtggcacaatcttaactcattgcaatctctgcctccctggttcaagagatcctcctacctcagcctcctgagtatctgggactataggtgtgtgccaccacgccctgctaatttttgtatttttggtagagatggggattcaccatgttgaccaggctggtttcagactcctgacctaaggagtctgcctgcctttgcctcccaaagtgctgggcttacaggtgtgagccactgcgcccagcccggcagtaccttcacgaagacatttgcaaaagtggaattgtagactctcattgcaaatcagcattcatagatgaagatttgcaatcaattttgatgaaagggaaaactattttaaaccccagttaagtgaaatgttattcccccataaaagaatttcattcttctcatcagtagacctgcattacaaaaaattgtactcaattattataatctgaattgtgtcaacattttgtggagatttgttttctcttgtaataggagtacctacttaatatctttgattttgcctcttagcccacaaaactgaaaatatttacctctggccttttacagaaaatgtttgtcaacccctagcttaaagcattgatttttctctttttcttcttttatttttttattttttattttttttttgagacggagtctcgctctttcgctcaggccggagtgcagtggcgctatcttggctcactgcaagctccgcctcccaggttcacaccgttctcctgcttcagcctcccgagtagctgggactataggtgcctgccatggcgcccagctaattttttgtatttttttttagtagagacggggtttcaccgtgttagccaggatggtctcgatctcctgacctcgtgatccgcccaccttggcctcccaaagtgctaggattacaggcgtatatgctttgaaagcgatgaaaatctcaccttattctctgttttagctgcatcccagagatgttgatgtattgcagtttcatactgtttagcacagaatatgttctggtttccatttaatgccttctttttatttattaatttaaagagatagagtcttgttctgttgcccagtctggagtgtagtggtgagatcaaagttcactgcagcctcaaactcctgagctcaagcaatcctcccacctcagcctcctgagtagttgagattatataggtacaaattgtcatgcccgtttgatgttttctttcacttacattacttagaagtatattgcataatttctgaacattcagatattttaaaaatctttgttactgaactctaattaaatcctaaagtggtcagagtgcatgtatacatgatgtcagtcttgagatttgttgaggtttgctttatagcccaatgtatagtccattttggcaatgtatttgaagtgacatttttcagatcttttgtcatcttctgaagctttggatatccaaataaggctggtccctgtaacattctgtacctactctgtacagattcccagtttctactcacttaaagtaggtgtgcttgtatttttagtgtatctttctctctcaatccaggaggttttttccttccccttgtgattatatgcagctcataggtaagaaaaacctttgtaatgtacttaaatctcagcagtcctcagctcattatcaagtgccgtagtccctaaccactaaattaagtgttgaccttatacataaggacttcatttaagagcgagttcgttcttgttgttgactcctgtcatgttgtaccattattctcttgaaactggtctgacttgcctttgacaaaaggaaaggagtgtgctttgcagggctatgtgctttcctaataccagaagttatctaaagatacttaactgtgctgtgaactaaagctattgtgtttgatctgcccaggcatccagctgactcctgtatacaaaattctacccgttcagttctgttaatgtttaagttcccgctgttctttggtgggaaaggaggtgatgtataaaaatcaactgctttgtataaggcttggtgtgttaggtgctaaaccacttaactttttcttgatttggggatctattctccttgtttttttgtttgtttgtttgttttttgttttttttttccttcttttagagacagagtcttgctctgtcacccaggctggagtgcagtggtacgatcatagctcattgcagcctccaactcctgggctgaagtcatcctcctgcctccatctcccaagtagctggtactgcaggcacgcatcaccatgcctggctgattttttttttttactttttgtagagatggtgtgttgctgtgttgcccagggtggtcttgaactcctgagctcaaccgatccttccaaagtgtcaggattacaggcgcgagccaccatgcccagctgagatctgttttttactgtttcacaataattgctggaaatatttgtaataatgtgactttcactgctaagacagaaaaggaagataaggaaattgaggaaaatgaagcttctgcttctacaacaggaaagcataaacgtttgagttacttttagagtaaacgggggataagtgtgtctagattcttgacccaccctcttctgccacagtcagacttagaatgcacttttgcatgcacttttgttaatctaatgaacgaacatttatacactttctagttagtaaatacgtgtaactttatatttcagctcatgagatcctttgctgcgtgctgcagggaagtgtagagctcttcagctgtgcagccaggataagaactcacgttctgttctccctgctgctgctgtgacaggggaggcacgtgtacatccaggctctttctgtgtggcagggctgtttaattggggctgatggaaatttttgtcataggaaatgggcaatcagattttcagttagtagtgaaataattgactctcaatccatattgggaaacagaagataaaacatttggtaataaaaatgtaaattttagaacatagaacacaaagagtggtccataagctgggcgcggcagctcacacctataatcccaacactttgggaggctgaggtgggcggatcacgaggtcaagagatcaagaccatcctggccaacatggtgaaaccccgtgtctactaaaaatacaaaaattagctgggcatggtggtgcacgcctgtaacccccctactcggaggctgagacatgagaattgcttgaaccggggaggctgagattgcagtgatccaagatcatgccactgcactccggcctgggcaacagagcgagactccatctcaaaaataaaataaaataaaaacagggccgggcgcggtggctcatgcctgtaatcccagcactttgggaggccaaggcaggtggatcatgaggtcaggagttcgaaaccagcctgaccaacatggtgaaaccccacctctactaaaaatacaaaaattagccaggcatggtggcacatccctgtaatcccagctactcaggaggctgaggcaggagaattgcttgaacccgggaggtggaggttgcaatgagccgagattgcgccactgcactccagcctgggtgacagagggagactctatctcaaaaaaacccaaaaaaacaaagagcggaccctaatgtaacctatggacttcagttaataatgaatctgtattggctcatcaattgtaacaaaggtaccacactaatggaagatgttaataataggaaaaacagatgaggaggacgggagaggtacagaggtatatgggagcattctgtactatctgattagtttttctgtaaaacctaaagatgctaaaaaaaaaaaaaagaaaactgtttaaaatttttaaatatctagcttaatgttccccaatgggttcaaatcatacaaagttagtgtttaacctcctgacccttgcttggaatttctcagttaagatgagtccagtttgcagtttgagctgtttcatcagttccgtttgcctctcgcctgtgtattaactgtgctcttgcctttctccctatctgctggaacagttggaatgccaagatgccttggaaacagcagcccgagccgagggcctctctcttgatgcctccatgcattctcagctcagaatcctggatgaggagcatcccaagggaaagtaccatcatggcttgagtgctctgaagcccatccggactacttccaagtaagatgccgtgctgagtgatgacagtgaagcatcaaaggcctttttttttttttttttttttttttgagatggagtcttgctctgtcgccagtggcatgatctcggctcactgcaacctccgcctcctgggttcaagtgattctcctgcctctcagcctcctgagtagctgggactacaggcgtgcaccaccaccaagcccagctaatttttttgtatttttagtagagacggggttacaccatattggccaggatagtctcaatctcctgacctcatgatctgcccgcctcggcctcccaaagtgctgggattacaggtgtgagccaccgcgcccggcccatcaaagccgttttagaacattcaggctaagattagatcatctggggagactggtctttagctaagagctgtgttcactaaacagtgtccattaaacacgggctgccctctccgtgcgtgttgatagctttgtgatttcggttttctctccttagacaccagcacccagtggacaatgctgggcttttttcctgtatgactttttcgtggctttcttctctggcccgtgtggcccacaagaagggggagctctcaatggaagacgtgtggtctctgtccaagcacgagtcttctgacgtgaactgcagaaggtaggcgcctctggtccaccctcatctcccccatgccgggtgggcagggcctgagctaggagtgtgaagtccacagctctgtgtctttaaagagccgagctgtccagtggagggcgggcggcctggggatgactttctctttgctcttttgctttatctcctatttcacctttgatcctgttttaaccacgggctttctctctctctctcagccccgcttctcttcctgagtctgcagggagattatgttgctgccttgtgacagaatacatttttgtggtagctgattgtcatgattaaaatgtagtttacaactttacattttaccacaggaaccttcagaaagggttgggggcccctgaaaaagaaagttcttattcacaaattgcattcagggatcattttcctgggtggaaagaaaggcttttgctctcatcattttctgtatcctgggaggctccttatacagggtaaatgtgtagttccctaggaagggtattttttcccagaaggtgaagactatgtacataattttaaaggagagacttgtgtgagtggtggcaaaacctggagacaaaaagtggtggcaggcggggagctaggtgtgcctttcccccgaggagatgtgtaacgaggacgtgtgcccttgttaagactagagagactgtggcaagaagagctgaatgaagttgggccagacgctgcttccctgcgaagggttgtgtggatcttctgccgcaccaggctcatcctgtccatcgtgtgcctgatgatcacgcagctggctggcttcagtggacc

SEQ ID NO: 15304 - DNA, 34137 bp, Homo sapiens; identical to SEQ ID NO: 15299

SEQ ID NO: 15305 - DNA, 83961 bp, Homo sapiens
agaggcgcggcaggcgcgcggagccagcggagccagctgagcccgagcccagcccgcgcccgcgccgccatgcccctggccttctgcggcagcgagaaccactcggccgcctaccgggtggaccagggggtcctcaacaacggctgctttgtggacgcgctcaacgtggtgccgcacgtcttcctactcttcatcaccttccccatcctcttcattggtgagtgcgcgcagcgagccgcggaggaggggacgggagagcagggagggaggaggaggcgctgcgcgccgcaccgctcggcgtccccttccggcccgcgaccgccgtccgcctcgttcccggggtcccctgccctgtgtcctgcccgccggtccccgcactcgcacaccagctcatcccttcactcccccggtgcccccgatcccgcgccaaacacagcggacgtttgtgacccatgggatcaccaagttttgcttctgcagggccaagagctgggatggggaaaagggaaagaggaggtctcagcacgcagtgggaaactggagaggggtcgggcctcaccctccgtggcgcagcttagggagccgggtcacccctcccgcaaggcagcctccctgtcagccgcagctgggcctagggaagagggaagcctgtgctttggagtctgggatggaggcccagctaacccctatgctttcaccgggctgagccgcgcagtggtccgtgatctctgacagtcccaggcccgcgccctgggcgaggagaggcgagagctagggacttggattcccttcccccgccaccccacccgggcatgtgtctccagagcgcaacttctcaggctctgcgcaaagtagctccgactcgccgacgcagcgaccccggcgcccttgcttgcaaagttgggcgccacggccgggacaatcgtgcgtgcctctccactgaggtcccccccatctctctccaagaccttgactcttccagaccagtcaagtctatcaactcatagggtgtcccctgcatccccaaaacgtgttcattcactttaagaaaacaagcaaatcttaaaattcatatacagctttggggaagaaaggaaagattgtcacaaaattagatttacaagaggttgctgcagaagcagagttgctagttattaacaaagacagttagatagaaatagaaataaaacatacaaaatatgtgctcatatgtgcatcaaaaatcaaaaaagaacagcatttacacttctgttctcagccaaacggtttattaacctgatgacttgtcacacaagaagttagtatgtataatggggtaccttggcagggcacagtggcttacatctgtaatctcagcattttggtgggctgtgacaggaagactgcttgagtccaggagttcgagaccagcctgggcaacatagtgagaccccccccgccctttctacaaaaaattaaaaattagctgagcatggtgatgtgcgcctgtagtcccagctactcaggaggctgaggcgggaggatcacttgagcctaggagatcaaggctgtagtgagccgtgatcgtggcactgcactccagcagaggcaacagagcaagaccctgtctcagtaaaaaggtgtggtgggggaggtaccagcataggaccaggctgaatgagttggacgtttagtttgtgtgtaccagccttggggatcctcatgtgtaggtgtcaccctcaccatggacccaatgcccaagcacctttctggggttcatgcaccctcttcctcctccaagtgggcaggcatcctgcctctgactgtctctccctgcaggatggggaagtcagagctccaaggtgcacatccaccacagcacatggcttcatttccctgggcacaacctgcggtggatcctgaccttcatgctgctcttcgtcctggtgtgtgagattgcagagggcatcctgtctgatgggtgagtgactgtctgaggactcaggaaagtgaatctgctccagggtacttcctgaaaggcccaaggagatcctagctcacctatattccacaagcccatgtcttttgttactacatccagcagctcagtgtcttctatgtgccaacctctctgagctgggcactggacgcaagtgagtcccaggccctgccatcagtccaggagagcagagggaacacggacctgcatgccaagtcccagtgaaataatgctagagcctattagaatgccacaactccagtgaaaaatgtctggcctcttctacaacctgccggagttaccttcttggaaaaaaaaaaaaatctaaccatgccacccactcttgcataagacctttccttggttctcagctgttttgaagatgtggtctcagatcctcagcccaccattcaaggtcttcacagtcagccccacctatctctggcctcattccccatgcccaccttccgtttgggcctcacagcacactcctcacacctctgctacagcacagatcacactgtatgttaaagtttatgtctatttgcaaaactgtcttcagagtcagaaaggcctaagagttagaatctgagtcttgttcatctttgtgttcacagtgcaaggcatgtgataaacataaacattattcagtccataaacatttattgggtccttaggagaatgaatgaaaccatgttacaaataagtactctgggaggtgagaggaaggcagaattgggcaagctccatggttgagagggctttggagcggagtctggaagggtgactaggcttcagacacacagaggaggaaggagagagagaactggtggtgcctgagggaagggaaaaggcaccaaagagaaaagcaggtagggctagggagcagcgcaggggctggagcattaaacacaggctggggagcgatggaggctgaggctgggaacccaggttggggcatctcaggaggactgtgaatcccagcctgcatgtttgggtcggatttggtcagcagtttggaacagaagagagatgtcatcagcataacacttttaggtgggaacctgaggtgttcagcgcaggctggaggcagggagaatctagaggtataatagaagcaggacttagcattgactgcagtagtctaggtgagcaataactgcagacagaaatggtgtgtcagcagtcagggacagaagaggagcgggagcagccatctcactaaggaagaatccagtaaccagcaaggatgagagactgccaggagagggagtggtggaggagagggatatttggcttgagtatctgaggtccagcgccccctgagctggaatcagattatacccagactgcactcctgcagtgctgcctggctcctgtagttggatggcaggggataggctccctcatcctccctcccgttccccaccttcccttccccaatgtccctgcatcctggcttcagcagtgatctctaaaatacctgcttgacttggaggcagcagctctgcctgcttattaaagtccctagaccagcaagaagaccagaaggcatactgctacacaagcacgtgacaagtccgcctccacccccacccctacaccccttccaaagtagcacaaatgccacagtgagccctcagatgggaaatactcaccagatggtgacagagaaagacacctccgcccttggagaaggaagacctgggtcttcagtgagcactgctgctgtgtaccagctatgggactttgcacaagtcattcaggctttctgggcctcataagcatttataaacatacgataaaacattttagttgccaacttaaaaatgtgtgagaaagtataaggtgtttcaaaattatttcaaggagtaaagaggcaagagttttgaagatccctgggcagggtgttggctgttcccagtgtggccattcatgactgctctctggccttatgaaacaagcatcatagtccctggcttgcctgcttcatggggctgtggagggtgaaattcgagcatggacagggtgcagagcccggagtggcagagcactgggtagactgtgtattcccagaatgtgggaaactggaatgaatcggtccagggatgccctcctgctggctgtcagcagcccctcctgtgtgtggctgtactgcttcagctcagtgcaaagggccatctcctccccagggcacagatcagctcaagctgagtaattgtcatctggtctttgtgagctcctacccccaggcctgagtgaggggcaggaaaagagcagacaggagaagtcacagacccttgtgatacctccagtctaatccagcctgggttttcagagctgtctggaaatttagggggcaggtgggagggggctgattaaggcagccctgatttgatttagagtgagcctcatttagtgactaattaagccatcttaaacctgtagggcttcccctcttcctttgggtattatttctttctgtgatgttctgaattcagaacaatcaaaacagtataagttagtgaagaagatattttttaataactacaatattttcccagaccaccatacactggataaagcctgtatataaaactttacctaatttcttaactaattgaatgtgtattatttaacaaagcagctaaaaactattctatgaagccatgtcatgaaatatttagttcaattatggttaatcctcatcttatttcgtcttataaaattttaacatttctacctcctattgcaaaaaaaagcatttatatcagcatataataaaacatgtctagatgtcagcttaaaaatgtgtgagagagtagagggtgtttcaaaattatttcaaggagtaaagaggcaagagttttgaagatccccaggaagggtgttggctgtgcccagtgttgccattcatgactgctctctggccttgtctgtcttgtaccttctatattagtttgaagaccttttttggagaatattcactaaagaatatcaatatctaccatttcattaaaaaagaaatgtggagtttgccttttcaagttggtttgatgcttattgatgttttcagggacccagcctcttcccatctttccataccatcctgtgtgtgtgtgtcagcctatcttccccatggtcacaaggtggctgcctagctccgggtattgcttagcatgagcagagagggcatgctgccgacatgcctctcctttatgacagagatcattctttctttgacatctcactggccagaatacgtggaccaacactggcaaaggagtatggaattgcatggctgcttaaaccaatcaccatccattccctggggctgggtatattgctgctggagcaaacctgtggtcctcctggcacagaataaggggaagatactctttggtggacagcccacattgcctctacacttgcacctcagtcccaccagacccactgaggtcacaggatagctctcctcatgtccttcctccttctctgttgaactcttatgtatccttcaaagtccagcctggtgccacctcctctgggaagctgtccttggttgcccaccccctcctttgtgctctctcagtctctgtccatcggcagtatcacttccctagcctgctgactccaacagttagctctgagcatggcagccccctccataccatcagcttctcaagggcagggacccttggcacactggatagaagtagcctggtgggcaacagcagcactgaggcagcaagctgtagcaggccatctgggaatggagtgggtaccacagggctggagcagaaagggcaggctgggcagatctgataaagtggctggaggccacatagcctgggcctttcgttccaggctgagcagagtgggttttgctgtctgcaggagggagctgtggaagggcatgatcacgaccaactaaggtgaccctcctcaccaggcccagggaagactgaggcctggaaggaggctctggctgcctctgggtcttacccccaggccacagtccacccacttagaggcctctgtgagttaaggtggagagactatgagctggtattgactgctccattccccatcccgagagaggagacaaaatcagtgaccttggaaatgcctcttcgtgcctcagtttcctcaccccataaaatgggagactaagagtacccactcgatggggtttaatgaagattaaatgggttaacatatatcgcatgcttagaacagtgcctggcacagagtaaatgctccataaatactgactctcatcagtttgttatcacagcctctggggagggcgccagtgctgacttatgctgttcgtgttaaatggggctgtcactgggtgagttgtggcatacaggcccctgcactgttcaagagaccccagcaacccttgtgcttagggctcagcacatagtaaggcctccagatcatatacccagctctactccatgtactggcagctctgcccagcccataccccaaatacgcccattaactaaagggccctgcagcctataaagtgatgctataaaggttcagtgttcagcctttgaaattcaaggcctgggctgctctattgcagtacttagcatgtccccatcctgtctgtttctctctcccatctcagggtgaccgaatcccaccatctgcacctgtacatgccagccgggatggcgttcatggctgctgtcacctccgtggtctactatcacaacatcgagacttccaacttccccaagctgctaattggtaggtgaggtgtaggagggaggggcagtaccttcattcatttcttcagataatgtttactgaggactcattatgtgccagctattgctctaaacagtagagatttggaatagaaaaagaaaaaaatccctgccttcatggagcttacagtctggtgaaggaggatagacaggcaaagacagtgaataaacaagcaaacaaataggtggtggggatgctatgaagaaaatcaagctgagtaaggggtaggggcaatgacaatgttgctatctacacaggatggtcagggaagggctgtggtaactgtgggcatgcagatatttgggggaaggtattccctgcaaggggagtgacaagtgcaaagtcctctgatagggatagatttggcaaagatgtcactgtgggcaaagccaaatgagcaaggggaagagtgggaggtgagggcaggcgtcaggagaggagcgagcaagagtcccaggctctgggcctgagagcctgggtgaactgtggcatcaataactgatgtgacagaggagggggaggtgggctgtggtggggataaagttttctactgggggcatatcgagtttgagatgtcacagagacagccaactcaagtgtcaagttgggctttcatggggaggtcaggacaggagctacactttcaggaggtgggccttgtagatgacatctaaagcttgagcctggggctggctgccgtggctcacacctgtaaccccagcactttgggaggccgaggtgggcggatcacccgaggtcaggagtttgagaccagcctgaccaacatggagaaacccccacctctactaaaaatagaaaaattagctgggcatggtggcacgcatcggtggtcccaggtactcaggaggctgaggcagtcaaatctcttgaacccaggaggtggagattgtagtgagctgagatcgcgccactgcagtccagcctgggtgacagagcaagactccatctagaaggaaggaaggaaggaaggaaggagggagggagggaagggagggagggaggagggagggagaagaaagcttgagcctggatgaggtcacctggggagagaagagaaaggctctgggaccagagcttgaggtttgctaacatttagagagactcgggaaggactgcccacttagagcttctgagatgttaaatactgcaggactggggtcccaggcagaagcaacaggatgatggttggtgtttactgagcatgtgccatggggcaggctccatgccatgttccttacattcattgtcccacaggctaattcccccagcctccttattggtattgttaatatccccattttccagtgtggaccctgaaactgagaggttaaaaataataacagtaaatactcactttgtacttactgtatgccaggccccatcctacctatgtgatatattaattcatttaatccttgcaacaactctatgaggtaggtaccattattattttccctttacatatcagaaaactgaggctcagaggttaaataactggcactagtctagctcgtcaaggggcacagccgggagtctagcatctgtgcaatctcctaatcatttctgagactgcgtgtctaagggccctcagacttcgtccttggggtaaaggtatcaatccgcaggtctgcctctgtgttggggttcagcctgtgtgtctaaggctggggctgtacatctggcagttagactttgttcacactatgtccttaagtcagactgatttttaggtatcacagcatcgaattgacatttggagtctggcacactctgtgctaagccagtgacatcatggtgttgtcagggagtacagggtgtttcttgcactagtcacaggtctgcctttctgtagaaggtgggatctgagctccattaggattatccaggtgatccccctacccctagcccaggggcccccacatgagtatgaatgggagctgggggaagcaggttgagaggggagatgttaaatacaggcttcagagagccaccctgcttccatttctgaagtagctccttgtctgtagagaacccttcattaaccagggcctggctgaccagtgtcctctggaaacaccctgtctggacatctgaggagttcattttctcattctccagcaaacacataatgttctctctttaaagcacaagttatcacccgtggatggatttgtccttttctaaggaacaaagactaactccctccattccccttgttggagttatctccccttgaaaggacactccacagagccagaaattctagaacagggaaaagtggaggggacgtgcctgtgaactgcagggacagaaggaaatgggtattgggagaatggccagccctccaaggggctgatgtctggcctgggtatggagtcccacagaaaggggacctgtgatgcagcttacattgtcccgtgagggaaccatgatcctggaacccagatgaggccaaggaaatgttctctgaaaaagtcatatttgagctgagaactgaaggaactaactgggagaagggaggaaagagtgcttcaggcagaggaaacagcatgtgcaaaggccccaaggcagaaggaacaaaacacattagaaaattcagaagaagaagagtggcgtgggtgcaaagtggaggggagctggactttgggttttgtttgcttgtgcccaggctggagtgcagtggcaccaccttgggtcactacaacctccgcttcctgggttcaagcggattcttgtgcctcagcctgctgagtagctgggaatacaggcgtgtaccaccacactcagataattttttgtatttttagaagagttgggatttcaccctgttgaccatgctggtcttgaactcctggccttaagtgatcaggtctcaacttcccaaagtgttgggattacagccgtgagccaccgcacccacctggaaggtcataccacagatgtttgcctttatcccaacagcaatgggaagttgtgtgtgtgtgtgtgtgtgtgtgtgtgtgtgtgtgtgtgtgtggtttaacatgtttaacataaaatttatcatcttaactgtttttaagtatagtgttctgtggcattaagtatattcacagccgggcatggtggctcatgcctgtaatcccagcaccttggcaggccaaggcaggtgaattgcttgagctcagaagttcgagaccagcctggccaacatgccaaaaccccgtctctacaaaaaacataaaaattagctgggcgtggtaatgtacacctgtagttccagctacttgggaggctgaggtgggagtatcatgggaggctgaggagagaggatcagttgagcctggaaagtggaggctacagtgagccaagattgtgccactgcactccagccaagattgtgccactgcactccagcctggacaacagagtgagaccctgtctcaaaaaaagaaaaaaaaagtatattcacagtgctgtgtagccatcaccactatccatctccagaactttttcatcttcccaggttgaaactctgtactcattaaatgataactccccatttctccctccttacagcccctgacgaccaccattctactttctatctatgaatttgagcactctaggtacctcatctaagcggcatcatgcactgtctttttttttttttttttttttgagatggagtcttgctctgttgcccaggttggagtgcagtggtgcaatctcggctcaccgcaacctctgcttctctggttcaagcgattctcctgcctcagcctcctgagtaactgggactataggtacctgccaccacgcctggctaatttttgtatttttagtagagacggggtttcaccatattggctaggctggtctcaaactcctgatcttgtgatctgcccacctcggcctcccaaagtgctcggattacaggcgagagccaccttgcctggcctatttgtctttttatgacttgcttatttcactgagcataatgtcctcaaggttcatccatgttgtagcatgtattgaaatttccttcctttttaaggctaatattctactgtatggatatgccacattttgtttatctattcgtctgtcagtgggttgcttccacctcttgactcttgtaaatagcactgctatgaacatgggtgcattgaggggttttcgacataatcataataattgctttatggagaccagcttggaggagaacaagatggggaggaagtgtggaaaccaatgagaaggctctcagggtatagcgggaatacagaggacgcatgatgatgcctggacttaggtggtaccacagggatggagagaagtagatagagtcaagctatttaggacgtgaaatagacagcatttgttaatgggagaggtgtggggcgagggagaagaatagagggagaaggaggagtaatgggagctcaccagcagcccccatgttatgcctctttccttccttttccctcttctctcatcaggcattcagcttttgctgagtacttctgtgtctgacaacaggctgagcactcagcactgcaggacaggactatgcaaaaaacctctgggcctagtcctgggtgcactgctaattccctgtgtgaccttgcacaagacatccaagctctctgagcctcggattccccacctgggcaggaagagtaagtccctgcctaagtcatagggttgtaatgaagagcaaagcagaccatatctgttaagtgttagggacaagacaagcatgaggcatattttcaagtctcggctcctgtaggcagctctcactaagggctaaagggcttctgatgcctgggatagaatctgtccggcagagtggagtggaggcagggggacagccttcagctgtggaattcctccagtcctagagaccagcctgagctgggggacattattccagtcctgaggcatgagagcagaaggccgatgcttctgccctccatcctaatgtcctcctgcagggacccaaggtggatggcatcgatccccccgggtgagctcagccctgggcgcatggtggggcccaacatctcaacctgtttcctaaccctgagccaggcaggacagatcccagatttgtgcccaagagatgctctggcatccatgcccaggcccacatagggatagagggcagggtgaaagtctctctccctcactcgggtcctctggagaggggctctgtgtcatgaagctgaccttatccgcatctggtctaggagggaggagggaaggagctgccagtgctaaaatctcccccaccctcaaagggggacttcacaggttattgctggttttggttgttggaagctgacagtgatttattggcagattgaagtgagtgtgtgtgcgagaatttaggatagaatctactgatagcttctgaggtttaccttccccaggtcttaaatctggagataataaaaatataacagctaatgtccaaagagcacccgctgcgtgtgaggctcactgcactaaatgctttccatatgtttctcacaagaaccttctaggtagcactattatgattcccacttaatggatgaggaaactaagctctagaaggctaagtgactaatccaaggtcacacagctattatgtcacaggctctgagcccaggtgtatctggctgcggagccaccaccactaacccctgtataacgctgcctcacagaactgtggctggctctttccgtatcccccatgcccctgctccatcatcatgctgtggtgggctctgaactgtgaggacagggatccaggctttcaccctctctctgtccctagctgccagtgcacttgggcaaggtcacatcctatttctgggcctcagtttcctcatctgtaaaatgaaaggctggattgaatgacctttaagatttccctcacttggaaattccacaagtaagtcattatagcatggagcttgcatgcatgggctccagcgtcaggccagcccagctctgccagttaatgggtgtgtggccttggatctgttacctaacctttctgagcctcatttcctttgtctgagaaattgggggtgacggcagtgtactttctttgaaaagttatggtgaggaatagataagatcatgtgtttaaagtgcttacttggcacagtgcctgtaacttagttaaattcaataaataaatttcccattcttcccatgatcatttatttttaagggacatttgtctgaccagtttgatttatgagattattggtgtttttcatgaatgttaagacgtacgtgcgtcatcttagagtcatgtactctgatatattcacacgtgcacatccacttactcggaaatgtacacacccaggcacgcttattctgtctccttctctgccacatacttgcacacattatgtgagtgtacacacatgatgcacacacgtctctgcgatcttccatctctcctcggcagccctgctggtgtattggaccctggccttcatcaccaagaccatcaagtttgtcaagttcttggaccacgccatcggcttctcgcagctacgcttctgcctcacagggctgctggtgatcctctatgggatgctgctcctcgtggaggtcaatgtcatcagggtgagggtaagcaggccacctgggccagggtggggtgggaagcagaggctctggcctctgtcctgccctgggttcaggcccccaccctgcttctcagccaaactgagaagggatcagcttgttttacccgcccgtgtaaaggggagtggggccgtggcggaaatttcaggatagacactgcatctggcccacgtgtgctctaccccagggtcccagagggagaggggggtgatgggtgtgttcgctgaggttggcggatgactttccgtagaaagggaagataagcatcaggcactggcctctcctactttctttcttcgggggtgggggactttgctttaatgtattcatatcgtcacgctggtaaatgaatgagtaagtgttttgttttcctttctgtttgctcccgcctccctctctcttcctcaccccagactccaaccttccccttcccctgcccctacctccccaggcagcccagactaatgaactcgtttgtctttcccatgctttgtttttattagtataataccatatgtgtctgtctaaataaatacctattcaggttttttcctctcaacacaagtgaatatgtaggtttcccccacggtatttatcttgtaagaatgggatcatattatgcagttttctgcactgtgcttttctcacccaacaaatatctcttgggactccctccaagccatctgatatggctaattccgttttcttaatggctgcataatattccatcgtatggatgagccataatgtgttcagctatttctctatggatgggcatttactttgttgccaagttcttgccttcatgaataatggtgtgttgaacatacttatatatttatgtattgctgcttttatttctatgggagagagtccaaggaatggcgttgctgggtcaaagggtctgtgtattttaaattttgatcagtgttacatattgccttccagaaagactgtaatctgccagcaatgagtgagaaaaccctttccctgccttccaaccagcagtgagggctacagccctttcgaacttggactgcctgcatttctctgactcttctgcttttagttggtgatctgcagggcacaaagctccttatgtgtccccccatccagtgaccctcacaggaaccctgtgatgcaagcaccatcccctttatagatgaggaaacattttagatgaggcttgtccaaaaacaccttgctagtaagtggaggaggcaggattcaaaaccaggtctgcatgacttggagttctgtgaactgtatatgaaacatggtggtatccttagatctgtggagaagatagcatatgagagattcctgctcctccccaacccaacctaaacccaacccagcctagccatggggggttcaaagtcgacctcaatgagcagttacaaagtcaggatgccctgacattggtggccaagaagtgttggggaatccttttcctggtaataattacaggcgaaagatggccccatctgttagagatcaagtgtggaatatcacaaccccagatccttgctggggcaaggtagggagtggtgagaagttggacttacccatcccccatggcccatgtgccccacagagatacatcttcttcaagacaccgagggaggtgaagcctcccgaggacctgcaagacctgggggtacgcttcctgcagcccttcgtgaatctgctgtccaaaggcacctactggtggatgaacgccttcatcaagactgcccacaagaagcccatcgacttgcgagccatcgggaagctgcccatcgccatgagggccctcaccaactaccaacggctctgcgaggcctttgacgcccaggtggtcagtgggggcacagccacaccatctattcactgccttctggtttagggtcacagagagggacctcaaagggcattaggtcaaaatcctggtgggacaagaggggaaactgaggctggtgaggggaagaagcttgccttaagtcacacagtgaaccagggacaggtgcagggctgaggattcataggacaggcacagttggaatggcccttaccgtttaggtcgtctagtccaaagtccttatccagatggggaaactgaggctctgagaagggaagtgaccccactggactctcacatccctgtgctctttcctctgcagcttactgactataaaggttggagtgttcacttgatttggagcaggggtgttagtggcctgatccttatggtaactctatgagttgagccagacaggaatctccccatatcactgaggagcaaattgaggccctgagaaaggctgtgacctgcccagagctggccacagctggcaggcggcagaggcagtctcctggctcccagtccagtgctccttcacttcctctgccctcgcaccagggcagttgctgaggcagacacggtggcaggtggtaatgagtgagtgtggcacatggccacctcctcattccagtgctgtgctcatcacatagtccctgaccagctgtgtgaccttgagcaatcatctggccttagtttccccatctagaccatgttggtgttgatagggccctcccaactgtgcacttgctgattccatgatctcttcctggagttcacctatttgcagaggatgtgaccactgggtttccccagacaacaggagctaggggcatcctgggaggctaggcccagccgtgaattagccctcaggcactctgacctggccatggtctctctgggcagcggaaggacattcagggcactcaaggtgcccgggccatctggcaggcactcagccatgccttcgggaggcgcctggtcctcagcagcactttccgcatcttggccgacctgctgggcttcgccgggccactgtgcatctttgggatcgtggaccaccttgggaaggagaacgacgtcttccagcccaaggtaggcagccccaggggtagggtaaggcaccctctagatggttttcagttgtttctgagagtgcaacaggccaatgtgtgtgagccatggccacactggagtggctcctcacacatgcgcaaagcccatagcagtatccccaccacagaatactctacatctggtcaacagaaatgccagagggcgagcctatgccccaagggtatcctactctcctctcaccgtcactaccatagtacctctcccggtagttaggtcagtccgaaaactgcaggaagtgcttttgtttgtccagtgtctagagcttctgtgacttggatttgttggctttcagttcatgtcatcttagtaaactctttaaaagttttcaagatctgtcttcttcagtcctgtaaaggctggcacttgagctttctgcaggggcatcttgggagctactgtcagaggagagagaagtgggaaaccctcacgagtggagctttgtctctccccactccaaatttcattcaaagctgcccgtagttttattaatatgttggacttttccattaaaatttcttttttaagaaaagtttccatggcttaaaaaacactggagacttattagactagattatatccaatggccttggcagttgtaacgattctgcaaactgaaatttgttggagctagaaaacctttccccggggttatttgccctgcgtggggccgtagcatccacttcgggggctgggcagactgtgctctgttgtctgtttccttgcagccgtttaggtttaaatggccacaaaatgaaaactttttcacccctaataagtttcagagttttagtttccaagtgaggatgtcattataacattttaaccacagacagtctgaaaataatgcagagaatggggaattagggtttttaataatttatgacaccctttgcgtaacatttgttcatctcatgagctccaaaatcgcagccagcagttaatcctcaggaggtttatgttcatttttctggagacataattagtcagctgaacagttttggccacagatatgagatacgttgagtctgatttatgcagcaaactttcattgaacactgctgtgtgccaggcctgggttgggctgtgggaatatgaaagcaatagttatgatgaggatgattaacaatattaacagccacttactgaccacataatacatacctggctgtgtgcaggagttatccatgtgttatttaatccctaaaactatcctttggcgtgagtatattttgcaacatctttactgtggtatacctcaaatactgtacagtttatgagatgataggtattcttatccccattttacagatgagaaagttgaggctcagaaagtttaagtaattttccccagggtctctcagctagttaataacagaggcagaatttgaacacaagactcactccacagtctgggcatttacagccaggaagctaaattgactattattatcaagccatcacctctggctccaaggattatgaaatccaacagtgaggagagaaatcaaaataaaatacttttatgctatgtgttacatgtgactcttaggaggaatattcagggaattgtgggaaaagatagtgattaacttagccagtggtcatgaacagcttcatagaggaggggatgtttgaaaggggtcttgacggatgagtaggaatttgccaggctgccatgggaagatttcttgctcaaccaagaatgcaaggaccacttttgcttatttaaactttgatggcttttgaagccatatctggctttttgagcctctctactttacctggcccataaaagagaggggaagcggctgcttctcttgtctacaggagtgtcacctttggctctagcctgaccataggctaccccagaatacccccattggcgatcctgaagcagcatggagccagttgttaatatcagggggaaatggcacaggccagagcccttatcagagtgtccacaccacgctcttcttcctgtgtttcccaaaacccttgtgggattctgctaaggagagagctctgaggcaggacgtgccaaagagatggcgaaagcacttagaattttagttcatctgaacgttatcattgccgtttttttctctttgtttatacacaaaccctggggtttattaccgtctcattggaatgctcttgtcccagttacttagcacacaaatccctgagacagatggccctgcctcagtggcagtgggccttatcagatttaatattttttccctgcagcccaaacacaatcagaaaatttccgacacagaaacaagagttgaaagtaaatatagtctccagtgtccgcaacaaagaactctccatcatgtggttgcctgggatgtggcttaattctcatgtgggcttctgagctcagaaaatgggggaaagggatcatttactgagatcatttggttcatctcccagcccccaagccattctaatccagagagaaccgagtgctattctggtctttatgaatgacaaagaaggaagctccctagctacatgttgcagtgtttcacagtctgggagaggaagccgttttttctgcccagcctgaatccatcctgcagcagttggcacagcgaggcacctgtggtttattcatcatcactcttccttcctaagatactcagagttggcaagaaacatgtcatccttggtatccgcaaggacgaacatttctgatgtcctctttagttactgaaagtgtctgtgacttgccagatctttgatgctcctgtcaccccgctgccactccccagggaaagctgggacccaggttgggctctgcctatgatctatagctctttccagcctcctctccaacccaacccctactcccaatctgtcacctcccatggatgccactgatctggctgaaggacaagagaattagattcataatgagctgctggtgtctgaaacctgccagcactgccctgggctatcagttgagccaaaggaagaaggaacagtctgggtttgatcgaagggctaaagcttcaaacagcctctaagtctcagtaggaaaatgtgtaggtttgggagggtgtatgtgtttccgaatgagttcccctaagaactgcttatggttctatatgtgtgttctgtttgtccctgtgtcttttggtgtgtctttttctgcgtgtgtgtgtgcatgtgtgtgtgtctatgcccccgtttggattgccatatttgtggctatcattatgagtgacttaatgagtgtatatgcattggtgtttctgtgactttgtggttttgatgcatgggctggcctcttcataaccatgtccatgcagctggtctggcctagagtacctgccttcaattcactagctccttcttggccatcaagactctgctcaaatgtcacctgctccagggagccttcacctggttgaattagatgccccttatctgtgctcacataacatcctatcaaagcgccctgtttctttccctgacttgatcctctgtcccctattgcctgacctctgtgtgcccagcactcagcccactgcctgacacccaggagatgcacgggaaatggttctgcaaagaaggaataatgcagcaattactatatattgagtgcttacacttactgttttttcacatgcactgttacattgacttctcataacaactctctgaagtcccttcatagcctcaccttacagatgaggaaactgaagctaagagaggttgaggaacttacctaaggacacagtggctaatatatgatgagtcaggacctctaagtccaggctcttaaccaccgtgtcaaacagtcttgtatgaatgggtaggtgtgttggtctctgggtggccaaagataattttattctttacccagggcctcccggggctgggacctacggacaactcaccttttgacacctgccaaaataggaaacaagagtccaagtgatcccctctcctttaagcaccagagaacatgtgaaggggacctttccaatcatacctctggcctggcagagacaatggggctccaaactgtagagtcgggagtgctgggttttagtcctacctctgcagctaactcatttattctcctcagcagtcacattctgcaagcctcaaatgcaaaatgtgtaataacttctgtagaaagtacatgggggcatgaagatcattggcttgattgcttttaaaaaatcggtattgagcactactggggaaatccctggaaacaaacacaattcttccctgagagcttgtgaaaatgcaagactagggcctatgattttccaaagcattttcttccaccaagtgtcaggttgtaggtccttggtcttttctctcttgccttggtacctgcagggtgctgaccagtgctatcatatcccctccccgtttcctaggaccctcttctcggtagactccaacagggcctgccttccttgggcagcatggcaggcctcttggctagtctagtacccacttcttttttttttttttttttttttggatggagcctcactctgtctcccaggctggagtgcactggcgcaatcttagctcactgcaacctctgcctcctgggttcaagcaattctcctggcccagcctcccaagtagctgggattacaggcatgcatcaccatgtccagctatttttttgtatttttagtagaaacagggtttcagcatgttggccaggctggtctcaaactcccgacctcaggtgatctgcctacttcagcctcccaaaatgctggaattacaggcatgacccaccacgcctagtcaggtacccacttcttaactgaaacttagctattccaggttctatcccttttaaaccaactctttgaagagaggtctaataatgacccaatgacttatagctgcagtgagatttttattttaacaggtcacaaaattctcaatccacaaaagtagatttctgaccctaggttattttgttgggggcggagagaggaagtcaaaggttttgcagcctttagagctgcaaaaccagaatttgttgttttgttaaaaatgcacaaataccgacgagtatatttaagtaacacccatagtctaacgaacaaacatgatcagttggcttttccagccctcattctccagcctgtgtgttttctgctcattgtaacacagcgtgtgtgtggcattccatgtttctccagagctttcatgagaatcagtggtcttggatgcatagtgttcccatgagtaccttaattacctaaccattccctgtggttggaaatttatatgggtttttgcattctccttctgctctgaccccaaaataaatgtctgtgttcatacagctattaccttatgtgaaattattttctttgggataaattctcatgatgtgttgttgctttaaaatagtggactccagtctccagagctgcgtctctgcagaggacagtgggacagaagaatcccagggcatgttaaaaaggaccgggtcttcctaaacccacatgcctatatttctgacccagtaccagccaggggggcaagtttccatcccccacaagtcacaaacctgtaactgacactaggatgcttaaggtcaaaggcctggacgaggcctagacagtgggtctggggtagtgtttttgacatcactcaggttcatgttcacatgttgtccccttaccagcatgtgaccttgggccagccactaaccctactgaaactcctttttttcatgtatgaaatggggctaataatggtaccctcctcattagggtattgtgaggatagagttttgcacctgataaatattgtctcctgccccttcctcccctggaaattcaggtctctccctgcagcctaattttaaggcccatttttctgcttccagcccacccctgcccttctaccttcgacctcctccctctgcctctccctctggtgcactggcaaatgggacagagagcctcggtagggccttcctcttagagtcttgcacgcatccctcagtggtctccctgtggctgcttcctgctgccaccaacagatacagacccctgtcgcacagatcatggtagagacagtggtgagcaggaccagacagctccagggagcagtgagggctggcttagagaacctctgttaaactgagaggccaccatcaggaagctctgatccaagatccaggaatccctgactctagggaaaggcctccaatgagagcctgggccctctctgcctgattctgattgtggatgtgccctcaaactccttctcatcactttgttccatccctctttaccctgcagcagctcccacaccctgccaaacaggatgcacagtccagggcagtgtctgagaaagagcagagatctgtcttcatggaaatattgatgtggctctgctggggagcaatggatttatcaagatcaaagttttcctgggagttattgatgcttaatttggaaatagacacactgttgatccctggtatctttagcaacaaagttaaaatgtttgtttttcttcactggttgccatctgagatcttgccggaagtacacaagagaaccttaaatttaacaggaggccctgggagcccatgaggctggcgggcttgggtctgaaatcttttcagtctcttgtaagtgatgagctctcattctctcctgagagctctacggtgccatgttttccactggccttttctgctcagtaattgctacattacaggctgttggtaagttcggaacaagggagctgctgattccatttctgtagcagagaacatgcaccgtgagacttgttgtaccagttcaggttttaggtgctctatttattcttgccccattcagaatgctctcccctgggtctgtggccacaatgctaagagtcatatttatgggcctgcagttgtaattgggccccattctgttcccccaagtggaaagatgaacagggtgtaagcaaccttccctgtagttagaaaaacgtttagttggatttatcagtctgatttttcactcataaacaattgcacaagcctttgcaagcccagagggtcttgtaataatgatggccgtggtccattatggcacagtgatgtgttctacggtggtcattttgctggcaatgacagtcacctctgaacttctctttccaacagacacaatttctcggggtttactttgtctcatcccaagagttccttgccaatgcctacgtcttagctgtgcttctgttccttgccctcctactgcaaaggacatttctgcaagcatcctactatgtggccattgaaactggaattaacttgagaggagcaatacaggtacttggatgattattttttcactttgccataagaaccattattaggaataatgtccatgagtgttattcatcctcatggacactcaagaataattctgctgtaaatttattttttgttgcccattaacgatgttttaaaacagtaaccattgacaaggcagtgtgggatagtggaaaatatcttgggctgaacttgggagacagtgtagctctggctctggttctgccttggactgggtctgaaaatccagctgctcagcccttggcttgaaagtggtagacgtcactaattgatcacagcactctttctgaccaagggtaaatgcaaccttggaatcctctctaagtggctgttccagagttctgctaccagacagtcttctttgggtgtgaaaaaaggaatgtgcttgacatacaaggtctagatagcctctaagacagggtcccctctaagatggggtattggtccatggcctgttaggaactgagccacacatcaggaggtaagcagtgggagcaagcattactacctgagctctgcctcctgtcagatcagcggctacattagactctcataggagtgcgaaccctattgtgaactgtgcaggcaagggtctaggttgtgtgttccttatgagaatctaatgcctgatgatctgaagtggaacagtttcatcctgaaaccatccctctcccccaggtccatggaaaaattgtcttccacgaaaccagtccctggtgccaaaaaggttgaggaccactgctctaagttctatttgaacccttaagtcttgctcactaatgagagtgacctatttggtctgttgggtcacttaagtctaggctcttggtcctgccttctgtgatttccttcttagagtttctggaaagatgatcaaagccagggagtgttcagggcccctctgaagaaggtgatgatgagagttgtccaagtcccagggtcttcactaggattttggttcagctatcagactagagagacatcctgattgagagtagtttaaatgggatagaagtttgtttattcttcagatagagtcagggctgacacaggagctactcaatgatcagagacctggcttcttctgtcatgttgctctgccagccttcttttgtgacttttgtctccatagccatggtgggtattgaaactgccactatatttacatttaaactagccagaagaagggacaagaggagggaacgcattttccttttaaaatggtaatacctgatttgcacataccctctcgcatcccattggtgagaaagtggccaaatggccgtatctagagagtctagaaagagcttggtctttattcttgacagctatatatgcactgctagaaattctctgtgcaaagaggagaatgggcattgggaataactagatgcagctatgcctagtgatgtccatgaagttgtggtaaaatcctgaagctaccttgttctttggaaatgttcctcagaatcattaacattagtcatgtgggagacaggagaagaagctctgcagaaaagggaccgagaggacaaggatatagcttgggctggggacaatgtcagagtccaaactctggctatcttggaatagtctgtgtgaacggtgccctcccaagttgtgcagtgcacaacctgtgcagctatatatggcaaccctgcccatccccagtggtttctcactgggaaagcagagtatttcctcagggatgtcattatgtgacaatagtggaaaaagcccaggaaaatctaagaccttctaagactcatgggggcccagagctgggaggaaccaagctgttgctcagttcagaaaacttctctagaaatcccagcctctcctcacacccctccagtgacaggcagacttgcaccaccacaagcaacagccacttttgtggttgggcagttttgtaattaaatatactaatgtgtgtatgtcataaattacattttccaattatgccaaaagagccaaaaatggttttttaatggttagcatataatcgtttttatcaaattgcttgaatctttcatgttaataagagagattcattactatgccacaaaaagcaaatactggcattaattatagaaacaaattaggggggtggagcgcaatggctcatgactgtaatcccagcgctttgggaggctgaggcgggtggatcacaaggtcagaagtttgagaccagcctgaccaacatagtgaaaccccatctctactaaaaatacaaaaattagccaggcatgttggcgtgcacctgtagtcccagctactcaggaggctgaggcaggagaatcgcttgaacccagcaggtggaggttgcagtgagctgagatcgtgccactatactccagcttgggcgacagagtgagacttcatctcaaaaaaaaaaaaaaaaaaaaagtggctcatgcctgtaatcccagcactttgggaggccaaggcgggtggatcacaaggtcaggagatcgagaccatcctggctaacatggtgaaaccccgtctctactaaaaatacaaaaaaaaattagccaggcatggtggcgggtgcctgtagtcccagctactcgggaggctgaggcaggagaatggcgtgaacccaggaggaggagcttgcagtgagccgagatggcaccaccgcactccagcctgggcgacacagcaagactctgaaaaaaaaaaaaaggaaagaaagaaggaaaggaaaggaaagaaaggaaaggaaaggaaggaaagaaagaaagaaaggaaagagagagagagaaagaaagaaagaaagaaagaaagaaagaaagaaagaaagaaagaaagaaagaaagaaagaaagagaaagaaagaaagaaaaagaaaagaaaggagttagggagaaaaaaaccctttctttctttcttttggagatttccggaaaatgtacccttacggatgagagcctgtgtcttcatgggttagagaataaccacgctttgtgcataaaaagttattaagcacaattcctgaattatacataattactagctgtcagtcagttgtgcatttctgtgtatgctggtcttcacttaataagactttatttcacagatcacttggtgtccctacttcactgaaactaggtgattatcttttgaagtctcatttcacataacctaggaggtatatagatttctttaaaaatgtcattgccattattttaaaccttacccatggtatatataaacttacagaaagacagaataggttcattattttaaaccttgcccatggtgtatattagctcacagaaagacatagaataggttcctgccttaagaaaacctgacccacaaaaaagcctgggtttacacaaaagaggaattaagggcggggagcccaccttacaacagaatgaataatagaattttatccaagagcaggcatcctgaggacatttaagacccggatgcatttttccttgttcaagagcacacatccaaaaattgcagtctttctgcgagtcatgatcactctgcacataaagcgtttaggttcagagctcggggaggccattaccatggctgctctctgtctgccctgtgagggtccttggggtggctgcactctggggatggtgctggggctgactgactcacgcggtcgtgtaacacatcagaccttccaaagtcgaacccttgttttgtttcaaggctcaattatgacaggacttggtctcagagcagatcccctccctaggctggagaaggccactttaaaacagatggcctgccccacttcatcatttttatggctctgatctgtgttctccactggcctctggtaaatcaagaatacaagtggacatgaagatctgctttaaaaaataaagaacagaccgggtgcggtggctcatgcctgtaatctcagcatttggaggccgaggtggatggatctcctgaggtcaggagtttgagaccagcctggccaacatggcaaaaccccatctctgctaaaaatataaaaattagctgggcatggtaggcacgtgcctataattccagctactccggaggctgaggcatgagaattgcttgaacccggaaggtggaggctgcagtgagctgagatcatgccacttcactccagcctgggaagcagagcgagactctgtctctaaataaataagtaaatgaattaaattaaataaaaataaagaaccaattaagtcctgtctacaggaaaaggccttacttgctggagaagtagcttgctgtgctggagtagactagtaagttggaacggtgatacagtaccaccttacagagctgctctagggcaccatggggactgtctgagaagcccctggcacactgtaacaggtggcatctggtgtggtgatgatgatgagaatgatgatgaatgtgaaacactctgctctcatttctagaccaagatttacaataaaattatgcacctgtccacctccaacctgtccatgggagaaatgactgctggacagatctgtaatctggttgccatcgacaccaatcagctcatgtggtttttcttcttgtgcccaaacctctgggctatgccagtacaggtactagatgggctgaggggaagggaggggggcagcaggacacacaaccagaatctgctggtccatggccagtaactaggagcacaccgtcttccactccatgcttgcctgtacctttcacacacttggctataccacaggctgtacctctgggtccctcctgtcccatactctgcaagcactgaccatctctcttaatgaccagagaaggcagtatcattaagactttaaaaatggagccaactttataaactatagaaaaatcaagccaggttcaggggctcacacctgtaatcccagcactttgggaggctgaggcaggaagattacatgagcacaggagttcaagactggcctgggcaacacagtgagaccccttctatgcagaaaaaaaaaagaagaaagaaaagaaaaatcgtacatggaatgcccacagatcttaaaagctatgttgtagcaaaatatttaattacatcaaaaagtgttagtgatgtatttttaagcaaaaagagtaagttacaaatagtatatgttgtatgcttactactaaactggaatatatgttatgtatacatttgtacagattcacacatgaaaaagaattggaaaatcacatagtgggattataagtgatttttattttctttatgtgtttctaaattctctaataagcgtgtataagatttggaaatcaacaacatgatacttttagcctaggcaacaaagtgagaccctgtctgtacaaaaaattagctggaagtggtggctcacaactatagccccagctactcagaggctgaggtgggaagattacctaaagtccaggaggcagaggttgcagtgagctacaatcacaccactgcactccagcctgggcgatagagtgacaccttgtctcaaaaacaaacaaaacctggtgttttttagccagatgtggtggtgcgcccctttagtcccagctacctgggagtctgagatggaaggattgcttgaccccaggagttcaaggctgcagtgagcaatgatcacgcccctgcacttcagcctggacaacagagagactcctgtctcttaaaaaataaaaataaaaacgttaaaacatggtatttttttaaagcaagacaacctttggtgctggctcaggaagaggtacattaccccccaataatcagaggagaatcgtcagcatgattgatctgacctcgggcttcatgtgtcccatctcccacccggagctcttccaccacagagtctgatcctgtcctatgcctgggactaaatcttcaccctggtgttcaggccagaaaccgaaatcccagacccattcccagagggcgggaaggttccaccgggagagcttgatgtagcagaaagtgacttgggtgagacaggctgattcaaatacttaacctctctgagccttggtttctttatctatgaaatggggaggctgcccaccctctggagttgctatggcaattcagttagataatgtaagtaacacagcaggcagagtggcccccagagtcttcacttcgtaaatatcagatccctctaccttgcacatgtttggtatgagtgaggtgttaccaatccagaatccattgcttcttgggataaagattccataaaccttcatctccagtgatttgtattggtcctccttacttgtaaagcttagagtttaaaaatattaaaagaaaaaaaggggagaggctcccacagggacacagctagacaagatgagatgcagggaatctgatgttcttttttatgggaacagtcatatatgccatcccccattaccacctacccatgcccagactgcccccgctccattctgccaagacagatcaatgactataaaagctacaaaagggcctggagatctcatctagtttagttaccaaccaaccttttatgcacaagactttctaagctgggtgtggtggctcatgcctgtagtctcagccactcaaaaggctgaggtaggaggatggcttgagcccaagagttcgagtccagcctgggcaacatagagagacctcatctctaacacaattttttttttgaaacatgaaaaatgaagatttctgaccatgcttctctcattagttaacactttgggctgtgagggtctgatgcagagagacacagcctgggaggatcctaacatgtacacagcattcaaaaggctacaagacactttctgttgtgtccccttgaacaagcagtttgtaagattttgttggccaggcatggtggctcgctcctgtaatcccagcactttgggaggctgaggctgatggttcacctgaggtcaggagttcgagaccagcctgaccaatatggtgaaaccccgtctctactaaaaatacaaaaattagccgggcatgatggcgtgtgcctgtagtctcagctactccggaggctgagacaggagaattgcttgagcccaggaggcggagactgtggtgagctgagatcgtgtcactgcgttccagcctgggtaacagagcgagactcggtctaaaaaaaaaaaaaaaaaagaaatcaggttttgtctactaaacctgctgcacggttaccgttactagtactcacagggtttgttgcacatgcatcgttgctaatagtgctaactaatattaacagcccttgccctatgcctggccctgtcccagcccccctcccttgtataatttaacccttgcactgggggtagagattttcatatctactgatttcttacctttgctcatttatcatggagtgtcctttggttttctgtgtttgtatatacctttaccacttatagatttgaccagcactcaagaaccagtgttactcctgggagttaatacaatcccagccccatggcaaagaaactcatgtggttaggattctgtgtgcagcctggttagccacagggcacgtaaggctttttataatattgacatgagtgcagaagccccattcccgtgtaagccctgagggctcttgtttcataatctttttttggtcacatgcacacagctttattgagatataacccactcatttaaagcatacaaatcagtgggttttagtgtcctatattcacagagctgtgcagccatcatcacaaatgtggaagttttcatttccccaaaaagaaacccgtacccattggcagtcactcctcatcttcgcccccagcccttggccaccgtttatctacacatacttttgaaaggctagtgaaactttctcagaaaaataaatgcttgctcaaacatttgggctataatttcaggggcttcatgggtgcccccctgacatttatcaagaacaccaggttaaggaatttagctataatggaggcctctgtgtttcccagtctcctgggtatcagaggcccagagagggcaggtgccttaccctgggccacgcagtgaaccagtggcagcaccatactcacacatctcctttctgcggttccccagtgacagagttctcaggaagctttttcatttattttctgagaggagggtaggccatcttgtattgatctccaactatatgccagccacaattctaggtgcttatcataaaggttcatttaatcttcacaatagtcctgcagagtggacagagtccttcagagtgggcattataatcaccattttaaagatggagaagctgaaaaccagagaggttaagtaactcacccaagactgcacagcaaaaggctggggctttgaaactcagggccacagactccaaagactatgtcctccccactatgctagatttttttcctaacctgtgaataggagacaaaatagtccttttatttctcacagttgctttgcacactcagaatccatgatttcttctgcatgagggccattcagacctgtgcagaagagagtaatggaccaaggagtcttgggagcacctaggaggaggggatgggggagcatgaggaggagccagggaacagcagcagctgcagcaccagctcccaccccagcctctgccagtctcttggaggtggtgtgggtgcagacaccggctcacaaggtgccctgttagtgagcttggggtgccatgggagccttcttgttgtcaggcccaacccaagctggctgaagaacaccctgatggcctccatttgagcacaactaatgaaggactggatgccagagataagtccaggagggtgatgctgcagggcaggccagggaagagggtacttcatctctatcatggtcctctgcccatccatgccagcatctaacacctgttaaacactgggaggcaggtggtgaaggggccacttcccagcctctaagatacctcctaagccaggaggcattctgtgattaaattacagggcctcccacttactcctttatccttgaggcggtgctggaagcttaatgccaatctggtgtagggctctgggactacaggaccaaggcaagcagtcctttctctctctctctctctttttagctaaggaagccagcacatctgttctttgagaaaaagccctgtatttagaggtgtctgcctttgaaggcaacctgagaaactgtcatcttggcgctttggggactggccatttacacttctcataaatattcagaagtaggcagtcatttacataaagctaaatgcagaaggaattctcttttcagggaatacctggcagattcattaaaaaaattaaagaaaccaagagcataagaatgaaaagcgaattctcggaccccaggctggttttttctggcatgggtgcagtaactttgcctctttgctcagttatcacttttttccaatgacagtaaccataagccctgagagccagcaaatagaacaaaaggtgctgtcacaaacattgtgcaatctcatctctgagatttccatctggaaaatagactggagagagttaaggcttcaaccagccttgcagataaatgcagttagttaccagcccagcaaccctctgcttgcatgagagcccattatgctaacctccttttgaaattgctttgtttctcctccttccctgcactccactccccaagataatttggaaacctgggcaccaaggcttgtcccactctaggggactggggaaacagggattttgccagcacctcctggcagggcaaccatcaggtcaaagggacctgacccatgaccccttcctcagatcattgtgggtgtgattctcctctactacatactcggagtcagtgccttaattggagcagctgtcatcattctactggctcctgtccagtacttcgtggccaccaagctgtctcaggcccagcggagcacactggtgagtgcccaaaggtgtgtgtgttttgtccctcttcccctccttccctcgacagcagcaggtctcctcccacacacccacactgtcattgactttgactttgactttgagtaggccacttcacctgtccaggcctcagcttctttgtctgggaaatggagtcaatgggggaggaggctgcctcccggtgaggacaggaggcgggcatggcagtgacagtattgacactcaggccttcctctcgggtgggagacggagcagaagcctctcccctctgactcggggacccctgcaggagtattccaatgagcggctgaagcagaccaacgagatgctccgcggcatcaagctgctgaagctgtacgcctgggagaacatcttccgcacgcgggtggagacgacccgcaggaaggagatgaccagcctcagggcctttgccatctatacctccatctccagtgagttcaccccacacagccagccctgggtgctgctgcgtacatgcaaggagagggtgtcagagctcgggtaagagggggtgcagggacagaagcaggaggccttgagattatccgactcagtaggggagcctcaaactggctctgatagctaagctcccagaaatcaaagtactcttcattcatttatccaacaaacatgcatggaaagcctgctatgtgctggacactgtgctggccctcaggatacagtgatgaggaagagagatgaagtttcattcctcatggaactgatatgttattgacagacagcagcaagtaagtaaatgaccacagttttgaactctcctaagaatgaagactttttagtaagtcagactgagctgtcattgccctggggaagctacaagaaagcttccatccacttggggctatgcaaaagaaaaagactagttatccttaaatatcagaagcccaggctgaaggtactcacaggtgtagggactgaatttatattaaccaagtagtttgggaaccccaagccaaggaagaagaaaaagaccaaaactggtaaaagtcctagagtcccatatacttgaaaccattttactgagaatgtaaaacttttttttctttttttgagatggagtctcgctctgtcacccaggctggagtgcagtggcaaaatctcggctcactgcaacctccacatcccaggttcaagtgattctcctgcctcagcctcccatgtagctgggactacaggcacacaccaccacacccgactaatttttgtatttttagtagagacagagtttcaccatattggccaggctagtcttgaactcctgacctcgtgatccacccgcctcagcctcccaaagtgctggaattacatgcatgagccactgtgcccagcccaaaagattttttagaaattgaaattttagttatggaaattaattcagtgaacaatggtcccctggtcagagtgagggcttacggaggtcaggtgatccatggagtcctggcccaagtttatctcacagttggtctcgtggctccgtggacccatcccatggtggttacttcccaagtgcataattgggatgtagatatttagcaaccagctgacttcacactagttccctgacctgtccagtctaagagtcattatggccaagtggaagcccctggaaagaagaaaacaaaaaagaaaccaaaacttactcagtgcacaggttacatgaatgagtatagctgaagagagaatttttgaattagaagacagatgagtggggattacacagaacgtggcaaggagagtaagttggtagaaccattttacagatgggaaattaaggccagaggggagtgtgttcctgagatccctcctgaggttagtagcatggctcggactagatcctccaaagtctcttaactcctggtctcaggctattttccacaaagagctgggggcctctgtggggtgaagaagacttaggacaccatggggcaccattatgaggccatttcctcctaggagaaaaaaaatctctgggctctgaaaggagtagaattagggtaggaaattaagagaggctaccgaccacctcctccaactaaaattggttcttttggtgccaggaagagacacacctggtgggggagggaaggtggtaatggagggggtgctggtagtgtctcccagatagacccatccaacaagtctcatggagaatgagacggtcactcaggtcatctgcgtattcttggcattcttgctgcctagagagagagtctgatggagctaggtggccaccaagctgtcccactccccaagacagtttggaaacatgggcaccaaggcatgtccctgtctaggggactggggaaatatcccatagcagtgttctcacagtatggggctggccatgaataccccaggagtccaacctccctttgtccagctagaccatggtgtcctatgcctcaggcagggaatgtggtccagtcatcagtggctgggccgtctgccatacatggtgcaagccatggcgttttatgcagaaagtcctgctagcatttgattttctcagaatggagctgtgagcatggcaggcaaccactgtttcctggattcttcaccaagacaccccaagttcctggtctctccccgttatcctcatccctgaccctgtggttctcagagcctccaaacacactcaggctaagcactccatagacaggggaaatttggaaggaacatctagggagctcagaaaagccaatgtccctagccccaggcccacttcaaccttctctctgtcagtcctgcctgcccctggaggctggttacatgaagagtaaccccctgcttgtgtatagccccccagttttgtacaggtttagagacagttcccagcagtaggaacagctgccgaggtgggagagggcttctcccgatagccgggggacttcctctcccaggaacaacagggtggggtagagcaggcttgtcgttgctgagatagagagagggaagggaaacaacaaggaaagtgggggcactgggtccccaaggttcctggcacagcaagcagtgaagttggggcagcctcaggtcatgtagtgggggcaggtgacatctgctttgactgctcctaagagatatgtactcatctcctggattccaaactgcagcctgggacatgttttcttatataaacagcatcaaaagatgtgtgagttcccaggctagcccactgaaccctacctagtgggtgctcattgtcccccagagcccccagaagacaagccgtggctttgtgatgggcctggggccaggaggacctagggatatgttgtgaagagctgagaagactctggaaaaaaggggctctggagccaagcaggagcccgcccaggactcctcacgtgtccaagtcacctagggagagaaacagagcagcccaggttggtccctggaagagagcagcggaggaggggaaaggggagagcccctggggagagctttgaaagtcaagtgctgtttgctcagtgtgtttgcctttccgaggatgtgtttttttttccctccgttagtcagcagtgggagggggagagagacgggtggtagggtgcagggtacctcctggctgcaggcatatgctttgagtgcgtgttcatttacctcctctggacttcctgccttctgttaccagggatcaagacacaggtcattaggcgtgaggtaatggggcatctcttgttctgacccctggcgccagtcttggagtcctgacgctgcagaggagccccagagtcacatttcctgttggggcccatcctgctcatatgcggcaccatcagacttctgggcaggcaagattacctgtgactctgtctgatggtctcgccatcaatatcactgagagtagctgtgtatggagtcccgaactggtacaggataaaacagggggctgaaaagggaatgaatgggcacagtttctctggcatcaaaagtcacatccagaattgatatttcctgttgagtaaaaatagaaatataagttgctcagtggatgttgagtgagccctattcatgtgccccactctgtgccaagcaccaggaaggagggaagggaaaaatgataagatgttctccccgttctccaggagtttatgctccactaagaagtcagagctaacatgcacagaacagtgtggcagcgagagcagaaccgtgtggccagctccatgcttgccgcctagcaagcgtgattgcacttcatcctcataacaacttggtgaggtgtgttgctctgttgtcccattttacagcagagaggactgactctcagtgaattgaaatgtctcagtgaggtcttccacagcaaaaggcgaagcacagagaaggaagtccatgtgggctgggagttcacccagagattcatgtaggggcaatgtgggctgtaccttgcaagatggtgggatttcaatgaggagaagacaaagtgggaggaagctggagacaaggactgtggtctcttcctttagaagtcagttcaatctttttttccttgtggaagcagcataactctaggtggttcctctgtatctgaggacaagctttgtagaggtgacaaaggggtcctaggtcctatcaggcaagcactcgatatgctgccagttcattctgtccattgtgagatacccattccagagcgcttcctctgtgccaggctctacggaggttctggatgttaaagaggaagcaggcatggccctggccctcccagtcttgtgggagattgatcatgcccatgaatagtgaccatgtggtcagagccacagggtcaattccaaatgcccctgtttctcttttgtgttactcacctgactctgggtctttcgtttcttccattcattttttttaaacaaatatttcctgcccaccttctgtgtgccaggcctggggatgcagtgggagaagcctctgtcctcctcagtggaggcgctaactcagaacaggcagtggagaaaaacaacatgacctggagacctggtgccccttccttccccagcatctttgaaattcttttggttgttgttgttttgagatggagtctcactctgttgtcaggctggagtgcagtggcgcgatctcaactcactgcaacctctgcctcccaggttcaagtaattctccctgcctcagcctcccaagtagctgggattacaggtgctctctaccatgcccagtaatattttttgtatttttagtagagacagggtttcgccatgttggccagcctggtctcaaactcctgacctcaggtgatccacctgccttggcctcccaaaatgctgggattacaagcatgagccactgtgcctggcctgaaattcttcaatatctacctgcccttctgccagttggtgcagccacagtgggctgcttatgcatatcctggcctggcttggtggggagcatggctgagggagagccggggcacccatcaattaaggaggtaaagatcagtctgactgagatgcctcctgccacacttcctcagctgccagcaactgacaccattaacctgatttccttccccctctgttgactgcactgactattggactgaatgggaaacagccccgtgcacctcaaaatgcacttcccctcctgcagatgcatcttgcaattaggcccaaactgtgagcctgcatgctcctcccctggccctgcacaggcaacaaagctgaagttaatcagaggtacaaatggctggctatgcctctctgacacgtaacttctggaacatgtatcaatgctttggaaatgaaaagctcctggtattgcaatgccaggctggtgcccataagggccagaaaacattccttgggcaaagccagggggagtgggtgatctgatcccagctcaggtttgttgatttgttgttttgtttgtttcgttttgtatggggcaagggttgagggtatgaaaaacttacactatcatttactaccgtagtccccagaacccagcacaccagcacaaggcctggaacagggataccttttttgaatgaataagtctttttttttttttttttttttttttttgagacagagtttcactcttgttgcccaggctggagtgcagtggcgcgatctcggctcactgcaacctccgcctcctgggttcaagcgattctcctgcctcagcctctcgagtagctaggattacaggtatgcgccaccacgcctggctaatattttggtatttttagtagagatggggtttcaccatgttggccaggctggtctcaaactcctgacctcaggtgatccacccaccttggcctcccagagtgctgggattacaggcgtgagccactgtgcccagccttgaatggataagtcttaagggatatttttggaaaggatattctaaaaaatacccatgtctctacactattgcagaagggctttcagttttgatggcagcctttcaggccagcctacacgcaactaaacttttccataacagcatcacacttacacaagaagaaggttttataatccacttgccattatttaacatagttcttcctccttaactttcaagatctgagcactataatgttcttctttttgtttttgtttttttctaaatcaaattaaggtgagtcacctcaccttgggcctgagttggacagaaatctattcttggctatattccccacccctccaccaccttggaaccttatagaactttatgtggttcaggaaaatgagggcgaggcctcagatcttcaacccatgacagctgtatgcccagctccctgccttcctgtcttacccccagctagggcacaggactgactattgtgcccagagaggtgccagagcctgtaacaaccccagacttcccaggtccagccacatccaccccagagccccaaaagatgatcttcagagagacctttaaaacacaagtagctggtcacttccatccagaccagaacccaagatggctgtgctcttgctgagacatgttggttgtcattgcctccgagcccactttagccctcagctctgtaccagaaatgctgttcctttgggaatcacagccaaagaagagatggagcagttctggaataagaacacaagttcaaactgtcccatatctccccacatcactatctacagttggtctcttcccatggcgatgtccatctgccaccgtggcactggtattgctttgagtgcaggggtctctctttttggcatgttggccctgttactccctgggaactttgagtcttatttggaatgcgtgaagtccctgtgtccggggccagcactgatccacacagctaagtttgcactcatcttccctctcatgtatcatatctggaatggggtctgacacttgatgtgggacctaggaaaaggcctgaagattccccagctataccaatctggagtggttgtcccggttcttactgtactgtcctctgtagggctggcagccatgtgaagaacagaggttcccagcatcatcttcctacacattattacattcacccatctttctgtttctcacttttatctccagcctgggaaaagttctccttatttgtttaaatccttttgtgcttttagatccccttggagcagtagagtaccttgtagaccataagagtggaaaagggtctagttttctccttgtttctaaagatggggtggctgaaaaaactccccttttttgcctacagcttgcctctctgggcctagaagtggttattctgtctccatattggcctttgatttgtgctgagggtcagcttttggctccttcttcctgagacagtggaaacaatgccagctgtgtggcttctgccctgggggctgggggtgaggctttgggtgccactgcctgtgggttgctggcttaaaggacaattctgttcattggtgagagcccaggccattaacacctacgcagtgttattgaaagaagagaggcgggggtggaggggaattagtctatcccagctagagggagataaagagggctagttagttcttggagcagctgctttgaggagaaaatgtatagcttttgacacaacaggaagatccagaaaattatcattgaacatattaaaggttatttctttttcttgcaaaacacacacacacacacacacacacacacacacacgcgaacacacgcagctgatgattctactctcccagccccagccctgaaggggacccagaactccctgcacaaaggctgtccttcaaggggagggtgaaagaagtggaaaatcacattttcattctttagcgtctccatacaacagccagaactgggcagaagctaattatatcagaagcatactccatgttgctgcatcagctttgggatgttcatttttaaatttatttatagcttgtctcattcctcaaaggagttcagggagctacaaaaataaagacaataaaattgaaaaaaattaaattaaaaaaaccatgaccagggaaaatgtgcagtagaatgaagtgtcaattatcacgttttctgactgcaaaatctcccccacggctgatgcaccatcatttactacaacagcccctcttgttggacatttccagtttatttcgtttgggatggtttgttgctgttgctgtggttgtggttttgttttattgaattttgtgttagctgcagctaataccatcttgctgatggctttgcgctgctcttgaatgattactcaggataaatttcctggagacggattataggatcagaaggtctgaacttctgtgtggctctagctacaaagcaccagattgctttccaagagcgttgtagcaatttataatccaacactcagcctattttttggctgggagtcaagccccagaatgtgaaggaggggtcttggcctggagcaggggctgagggatgggtgcacaggacccctccttattggttatttatggggatgggccaggaggagcagaatagaggcccctgccctcccagttgctccttggagtgactgaccccataggggaggggcgaggctacctcacatttagaactatgtagttggtgatggtcaaggtcctaggtctgatgggcatcctcctccctctcctcctcagccagtaatggctgcactatgtcgtatgtcctagatctgggtcccttttgctgtgggaacaccaataatacttacgctgtttcctgccggaaacggtgcaggagggctgtggcatggtagtgggccctggaaaccatctagccttcatgaggaagggcagttaaagcacaggcatgtatgatgttggtattgattaaaagcctcacgggcagagaaattcgccatctgccagggccccagccatacgagggctccagccatacatcctccaggagactgggacctctccaattgcaggagccttgccttccccatcagattaggaattccccgaggatggggacaatgtccttcccacctgcttgagaactcctaaggggcatgtactctgtctccccattgtatctggaacttcctgggagcatagctcctgtctccgtcctcagactgggaatcccctaagggcagaggccatgtccttccacccacttgggattccctgaagttggggaccacatctctgatgtacaatgctttgtatgtactgactgctgcaggattcttggagtaaatgggcagtcaacttcttggactggtattgaccatctggacttcatcagagtgtccaagactttgccattcattagacaggggccatgtgcacaggcagagccctggcctctggcttctggctcctgactcctggtccctctgctttaatttggctaatggcagaaccagactcctttctgggctgccctggaaggggatccttgaatgaaagaggatagatgggaaggtggcagctgacatggttacctcttatgccatgggggggctgctctctctggaaatttaggcctggggtcagggcactgttgagcattttacaccctaggccagaggaggggtgacctgtggagcagggctaagctagtagcccatgaggtatgatgtgtaggcagcacctggggctcacagagcctgttacccatgttatctcctctgaccttggaaagagctggggtgtatgaacaagtatttataagtttacaaaaatcatatgaggaaactgaggcacggggaaggtaaatgacatgccctaggttacacagcttataagtagcagggattctgcccttctgtcacaccaagtcccactgtcttttcttcctggagtccctgtgactgatctaaaggccacatgtttaacagaataaggaggaggcctctgttgcagcaaaccagctaccccacccgcacacagactctaagggacatcctgctttaagctgtccttagttactaatacctcagtgagaatgagtttgaaattttctcaagagccatgggagactaggaagtctctaagcttcatagagagcctggcttggggggacacaggagccaaaggcagaggaagaagtggcagctttgtgcccccagaaacacgtgctcctgacctcacagttggccacagccagccaactctcccatccttctcccaccactttcccgtggggctaacttcaccctgtccacacggagtgacttaacagtttaagccccagagtcgggggccggggtacctgggacaagagtcctgagggaaatggggtgaggaactggaagtgccacagggctagagttctgcccctagcctactggagctgtgccccacaggctggccccactggactgcgctgcctccaagccatcctgggcatctccatgtgtagctgtcacgctcctcccactaaacgcctccctgtgcttcctctgcagttttcatgaacacggccatccccattgcagctgtcctcatagtaagtggatcctttctccatctcttgggggtagggtggagggggagggcgtctgcagtgacaggctgcccagatttggcctttctgcacaggggcctcagaagacaggctccacagccagactgaaaataggatcgaaagtttatagagggtgtggcccctccccaactccagccgaacaggggcctctgcctccaggcctggaagaccggaggcttagtatttagagaaattaaactttcttttaaaaaatagctatccaaatttttaatttttaaagtgaaacatgtgtattgtagaagtgatgggaaatccagaacagaaagctcaaagagaattaaaatcacccataatcccactggtaacatttttaatgtgtttctttccagtctttttttaaggcctatgatatgtcattttctacaaaaataggaatgtgctatgcatgcagttttgcaacctgctcttttaaatttaggaatatgccacacacaattctccatgccactgaatattatgatggtggctttctaaagcaattttgataaaagctgtgtgtgagctgagccatgggggtcaagcagcatgctcctacagaaaggcctgggcccctacgagcctgcagccccctcacccagcctcccatccccatcttctgtgatggctgcagttccttaaaaagatctgcttatttcccccggggccagtgtccctgagctgtgtagagttcacagcctgtcggatacacttgggaattcacttccaatgtgatgtattgagctggttcctggcctggctcctgggggaactgtgggtaacagaggccactgagccagccaggtggctggggcaaagcactgtgcagtttcgtaatcactctgtttacgttatcccgatgaggactggggagatgagcaccccgcctgctgtctgcagagggggccgtgctgacctaacccgagatctcctccctgcttattcccagccaagactgggcaggacagggagtcttggccaggacagggagggagcagcccctgctctccagcttgaagtcctgaacttgttggggacgtttccatgagatgactgtggggatgatgaaggtgtctccaactaaaagatcctcttaggagcctgctccctgacagccctctcatttcccttccagtgctgagcgtttccagtgtgggagggacccacaccctgggccaccctggcctcacttgtgcctctgtccacagactttcgtgggccacgtcagcttcttcaaagaggccgacttctcgccctccgtggcctttgcctccctctccctcttccatatcttggtcacaccgctgttcctgctgtccagtgtggtccgatctaccgtcaaagctctagtgaggtgaggggagggtccgggcgagggcactgggcaggcaggtcctgtgtcagcctcaaggcttgctcgagtgatggccaaaccacagctgtttggtcccggaacacacccccattgctgggccttgctgtagctggtcctggttggtcagagggacattggcctgtatggtttcccagctcgccatccctgagcaaggacttgcttacatacctcccaggagaggggactcactgtcactttcacgacaacttaaaaaaaaaaaaaaaccagtgttgagccaaatgtggaatcctcctaaattctacccactggtcctaacttcaccctccagagccaccaagaatgaggccatcccgtccccacgtggctgccccatggatatcagaaggcatccactgtgtctatctttcccaggccaagtatcccctaccctttccacagcccctgagccctcacagcctcagccagtgaaacagcttcccccaagcgctgggtcctgctctgattggcccacagctcttggaggctcccacttccaggctctagagcctcatggggactctgccactgtcccagaggcattgccctcttgggaatgaaagcctgaaggtagaaggctgaggctttggctgggaaatgccctgtctggagtgagaagatgtccttgggcctctgaagtagctctgcctccttgaaagcaagagcctgtcatgcctctatggagggctggcttgtccttacccatggccagagaaccagtcagtaacaaatgtcctctgtgtcttcagccttgaggaaggtgacacccctgtctcatgggaccctggcaggtactgggaagctggaaggaaggagtagctgttggaatgaagtagctgatagagagggtagcttgcagggggagactctagcatgggttcaaagatggaatggggcataactcagcaaaattatgctctaaggagtatctgaccaggcagtagctggttaaacagggattagctcccatttccacagtcggctgtgctgactcagtttcttgaccagggtgttgtggggtctgaagatcacccctcctcccaccacccactctccagccctatgattctgtgtagaaaccacagatttaagaacgctgcacctgcctgaaaactgttgcactgatcccaaagcgttcatattttcaaacactctggatcccactgtttccaggaatggaacaccagagtagcagaggccttttcagtgaggcagctcaggctctggctgaaggtgggcgcaggacactacctgaagcttcaccccaagagatgagggccagctccactcttcccagtcaccgcctgtgggggagggaggctggacagggcatgaaggcagagcctggtggtctgcccctcccatctaggggtggcgcacagaaagggagactccaggccacagctcacttacaccccagaataaccttgccttgagggtgggatggcttgtctgccccaggcctgttggacatttagcaaaagagaagaaaggggaatacaaacaatcctgagcttcccagaaagctttcacacctccaggatgggagagaatgaactagaagagtgaagcttccagtgcttcctcaggtccacagggaaatctggacaggggagagggtaggaatagccgcctcccccgtgagtaatgacacctcctccagcaggctgttatggggatccgattacataatgctacaaaacagttaacacagtgtctggcatttagtgtatgctcacaaaatactagctattgattctttaccaatcctagtcctaactaaccttaaccctgaccaatccaacaccaaccatccttcagtctaataacccagactaactaacttcaacattaaccctaaaactaaccaatctcacctccaatccagaccccagcctattccagctgactggtcaaccctagcaaaccctggtaacaccaattacctgcccccatgcccactggtctgcccccttcagtgtgggctttgtgggactatacttcaggcctgagatcctgctcagagctctctatcaggctgcgccctctcccctcccctctgcccctggcaggggtgaggggtgtctctgtgcttcccgagcagcgtgcaaaagctaagcgagttcctgtccagtgcagagatccgtgaggagcagtgtgccccccatgagcccacacctcagggcccagccagcaagtaccaggcggtggtgagtgcccggcctccccttgctactcccagcatggtcctctaaggcccaaaacttgggcctgctgtgtcggacttctgccttttttcccaggaagaggggctcccttccctacacagctcccagcccagtgggtcctcacctccaaaccacccccagcccctcagggttgtgaaccgcaagcgtccagcccgggaggattgtcggggcctcaccggcccactgcagagcctggtccccagtgcagatggcgatgctgacaactgctgtgtccaggtgagtcctgctgccccatgcctggccacccagcaccaactcccagagggagctcagcacctggaaagccagaaagctgcatgcttagtcctctgcagaggtcaccctgcctgcctgtacggtccataggagtccagaaaccagggaccaccaagtggggggacccccagccttaggcaagggtcagcatgagaaggccagtctcccactcccctgctctggaagtgatccaggggctggaatcagtgtcttttggctttcatggaggaggggaagccagagactattcactgggaactggctgcctttctgttctctcctgggcggtgggacacgcctaatgaagatcatgggaggctacttcacgtggaccccagatggaatccccacactgtccaacatcaccattcgtatcccccgaggtatggcccagtccacccctccagcatgcccctccccatgtcccactgaataacatagagataaaaagacaaagctgcatttattgagcacctactctctgctcattcttggtgtatgccctgggtatattatagaaggggaaggctacattctagaggcttccgtgtgctgggtgggagtgaagcactaaggacagggtaaaattgccagccttaatgtcaaaccatccattgcagacagtataggtaatgcacaaaaagatcagaagtgggtagccaaggaacgcaagtggaagtgatggggtttctgagaatggacaaaggccctgaggccatgaggcaggaggattttctggcagaggcagccatgagcaaagtatggaggtgggttggaggtgggacccaggatggtgtttcttgggaccacaaggagcctgggctcatactaggagcatgggaaaggagaagcgagtgcttaggaagggtggcggggcaggaaatcagagagggggaaggacctggggagccagaggaggatgttgatttccagaaggaaaggattaaagagggagaggacttgctggggattctaggtaggaagaaagaaaacaggggccccagggttgggtgcatctgtctgtctgtctttctgggtaatggttgttcagactcccccggccccactcacatctgccaccctccctccctgcaggccagctgactatgatcgtggggcaggtgggctgcggcaagtcctcgctccttctagccgcactgggggagatgcagaaggtctcaggggctgtcttctggagcaggtaatacatgtatcctcagggcccagtggaggggaaatctccttttaaccatcctcctcagttgaggatgcacacacatttattggagggcccactctgtgttcagtgaggactcaataaatgctgctaatggatattctcatcatcatcactagtacgtattcacctcttactatgcgcaggttctttgctaagtcctttgcatgcattatttcatttaatttttatgataactaacaaggtccatactgttctcaattctcatttatagaggaaggttaaactatttgtcctaattcacacagctaataagtggcagagctggaattgaaactcagttctgtcagactctgaatcccatggttactcagatgcacggcagtaatttcccagtgtgggaaattgcaacaccaacattggtttccagcttggtcctgagctgcactgacctacacaccataagtgggtgttctgaagatccagatgtaaccaataaatgttggtttctgggcaaagatcactgtcttaattaaagagccagaaccccaggctcagtcaatcacgaatctgttatttatacccacctacttccaagaagcacttgaaactagttgatgaaagattcatgtaaaaatcaaaaccacaatgagataccatctcacacccgttagaatggtgatcgttaaaaagtcaggaaacaacaaatgctggagaggatgtggagaaataggaacgcttttacactgttggtgggagtgtaaattagttcaaccattgtggaagacagtgcggtgattcctcaaggatctagaaccagaaataccatttgacccagcaattccattactgggtatatacccaaaggattataaatcattctactataaagacacatgcagacgtatgtttattgcagcactattcacaatagcaaagacttggaaacaacccaaatgcccatcaatgatagactggataaagaaaatgtggcacatatacaccatggaatactatgcagacataaaaaaggttgagttcgtgtcctttgcagggacatggatgaagctggaaactatcattctcagcaaactcacacaggaacagaaaagcaaataccacatgttctcactcataagtgggagttgaacaatgagaacacatggacacagggaggggaacatcacacactggggcctgtctgggggtggggggcaaggggagggatagcattaggagaaatacttaatgtagatgaagggttgatgggtgcagcaaaccaccatggcatgtgtatacctatgtaacaaacctgcacgttctgcacgtatatcccagaacttgaagtataataaaaaaagatgcatgtaaaataaaaccctttaaaaaggtaagaaaataggaactgagaaatgaagagggtaaaaagatgttcagcaacctgggcagaggacaactacagccatcaacataaaacctggctctgtgccctctggtagccaagggaaaaagggatctctgggctttggagtattcatttaggaataaaagttgcagccaatcagcagaagggcaagctttccctaccaatcatttctaggggaaaattattgaaggtgtcaggtttttcataagcatgagtacagaactgagcagggagaaagactttgggcccaatgtctgaatatcaacatgcacccccgtttcctgcatttccaagatgtccctgaatggtgtatccaaaagatggcaaatttccctcctcagtggggtcgtgggctagcagatgagccccttgggtttcccatcacctcccatcagggactgtgatgtctttgggggcagaggggtctttgcctccattcgccattttatttgggagatttttcaacatagcctgactgggaaggcccaggtattcggtttgagatcatattgccttattccgactgcctctccagcctttggagggaggagcccttttctgctgtccaactgcatgcctgcagcaagaagacaagagtccccagtgcactgtgagctgaagaaagtaaccaatatttattgggtacctcctatgggccatgccctttgctaagtgcattgtcaacatgatctcatcaagcctcctactaagtttaggaggggagtgttgttaccccatttcacagaagcagaaactcaggctcagagaagttgggtgacttactagtcagtgtgtggagcagagactctgcccatgttctttccctcaaacctggtcactgctggggcccccagggcctagtcctaagggttattgtccaagccccatgtagtggtcaggctggatctgggctctcctccaaggcagggcttttccagaaggattgcagggctcagacactggagctgcccctgccttgacctgctcagcatggatgtcaaaacccactctgaacctggtccctttgccctgctttcttctcctcccccaccctcatgccctcatgtggcatcgtgcctgcctcaggagctctccttgtcctatgtagatgaagcaggcatgattggcaggggtctgctctgccctgcctcagtccccacctcttctccaagctgtgccaaccctccgggtctgactgctgcccctctctcttaggaaacctctgccccagcccagggaacacaaggagcctctccaaggcagaggaccctaagcacttcttttttttattattttttattttattttaggttctgagatacatgtgcagagtgtgcaggtttgttacatagctatacatgtgccatggtgctttgctgcacctatcaacctgtcatctttttaagccccacatgtattaggtatttgtcctaatgctctccctcctcttgcctcccaccccccgacaggctcggtatgtgatgttcccctccctgtgtccacgtgttctcattgttcaactcccacttatagtgagcacatgtggtggttggttttctgttcctgcctaagcacttattataggccaggcactgtgcaggcacctcatcatctcagtcagtctgcaccgaactctgtgcagtagatattattatatcctcatttatcagattaggaaactgaggtgaagcaagttgtccaaggccacccagctgttaaatggcagaagtgggatttgcacctaggtgctcaagtgcattggtttgccaccatgtgctcaaagagaaggggcacaagagcctcatgaagaaggcatagctagcctgacagtccaaaggccagcagccgctgtggccatgactcacacacacctgcctcctcccagaactgccacgtgggtcctcacagctctgtccttatcaacacttactctcctttacaggtagcctaggccccagctcccagctctgttcgaggctcgcagaggggcggtagtgaaggggtctcatttctccaggatcctctttgctctctcgcccggtcctggtccagcttccctttcaagcatagtgaagtgcatttgttagcttgcagccaaccctgggaaatcatgagaatttgttcccaagtcaactcattctccagcgtccacagtgacgtattcactcacccagttgagcgcctagtgtatactagaccctgtgacagcaacaggagtgcaaaggtgactaagacgtggcccctgctttttttttttttttttttttttgagacggagtctcgccctgttgcccaggctggagtgcagtggtgcgatctcagctcctcacaagctctgcctcctaggttcaagcgattctcctgcttcagcctcccaagtagctgggactacaggtgtacaccaccatgccggctaattttttgtatttttagtagagacggggtttcactatgttggccagggtaatctcgaactcctgacctcatgatccgcccgcctcagcctcccaaagtgctgggattacaggcatgagccaccacccctggccggccccgcttttaagagaggggagagaagacctgggccttagaagagctcagaggaaccacaattgactctgcagtcaaggagaggaggctcactgcggatgtggtatttgagccttgaaggatgagtgtggtttcatcaagtagaaaaggcagggatgggaaagggaggtggtccaggcaggggtgatggtgtgggcaaagccttgctgatattaaagaacatagttctgtgcacctggaacactggatgcatggggtgcattatgaaagatgggactgaagaagtgaacttggcttagatcccatgtagtaggtctgagaagtaagatttaacccaaaggttgcaaaagaaccatgcttgtgataaaggatgatggattggggaaacagagaaaaagacagacagactgtaggaagggaggtattagcaaataatcataacacagtgtgaggtgtgcattaatattcactcattccaagtattgatcaagaagagaggtaggtactgggttaggaaacagcttgggcaaatgcatggggaaatgagagatgtcaagatgcattctaatggcagcctcttgaagatcttaagttgtttttggttcactcatttcgcaaatgaattcatttagcaaaagcactatggatacagtgcttacctctaggaagtaagttttagcccaaatgctgcagaaggatcatgcttatgacaaaggatgatggactggggagagagaaaaagaaaagacagacagactccaggaaggaaggtcagtctgcagctccttatagtggctaggagaaggagtctaggcagatacgactcaattagcttcatctgctgtttgtctctcaaaatctagacatgtgcactgctctggctggcccacctatcctgggcattgagttaagtgtgggggctgtgtgttgagagtccccctccattactggcaggaactccacacctcagacattgagccccaggtctgcagggagaagacgtgcttgcaaagtgagctaaaagcaaaacagcctctgacctggcaagcattcccaagtctgcacgcctgcagccagaggagagggtgatgccaggctgctgctcagatgcttttcagccatacccaggccaagacctggtgaccaggcagccagaaggagttccaggaggcacaaggcaggaagttgggggattaggaggtgtagaatggagaatgctctggggagatgggtgctttgttggtgcaactattcgtttattcctccagtgaccacgtgagcagtatggctgcacacacaggctctgcagccaagctgcctgggttcacatttggtctctgtgctttggaaaatttcataagctttctctaccagtttcccttattacccatgagattgatgtgaggattaacctagcatgtagtaaatatcctataaatattattattcaatagtgtacttctttgccaggaacaaaattcacctgttcctctttaaatgtcctccagtctgtctcctgggaaagattcttgtgagctccctggggacagggaccatattttgtttgtctcactgtatccgtagtgctttttgctaaacgaattcacttgctaaatgaatgaaccaggaacaacttaagaccttcaagaggctgccattataatgcatcttgacatctctctcctttccacatgcctttgtccgagctgtttcctaacccagtatttcactacccctcttctccatcaatatttggaatgagcaaataccgttagtgcatacctcacatggtattataattatttgctaatgcgtctgtctcctccatgactctgagctccttgagggattattccatgttgtaccccaggtgccccatgcagatgtgtattttgtgcactgttctgtgtaggctacaaaggaaaaggcctagcacctgcccttggggagctcacccacccaggatggacagaggtgtgcagacagagctgcagggtgggcacaaagggtccatctgctgaagtcctgcagatgcagccccgagcttgtccctcacgtcagcagcctggctcctggtctcagagagaactgtgtggttcccaagcattcactttaggaagaatcacttgcccctccctggctctctgcttcaaggaactgtgacaaccttgggatttgcaaactctctctttaatccttaagaggaaaatgttttggtaaaaagtcaagattagcagatacactcgggtgaaattctttccctggaaataaagaatagagccattaatatccacagtagagtgactttaaatgcccccggggggtcagcaggaaccagggccctgaggaaaggatcagcgtggggaagaggctcccacttccctgtgaggagctgcacatgcagtctcactggagctccctgctgcaatgctgttgcctgtggtggttggtgtggatgctgcctgccaagagccctgattccccaggaagagagaaaaaggcttctctcaggacggccctggtcgcatctgcctgtacaattcctggagcctttggggagctgaagtcaggggctcaagtgcccctgggtttcctggaggaggcaggtgtggtgagacagctgacagacaggagaagggatgctctgaggaagtgactgtccagccatgggaaccagatggcccctggctgtagtcctgatgctgccacttgctagctctgtgaccttgagcaggttacttcacctctctgagacagactcactgtctggacaatgagtaaaaccctacctttcctgtctcagagatttggcaatgggacccaatgacatcaattggaaaggatgctgtgggtgaaaggtaacctttcaggacagcgacaagcctgtctgggcaggatgaatgggctgtggagccctgtatatcctagctcactctttgaacctcagtttccacttcttccctttttatttattgccggggtcttaaatgagtgttgggggtatctgattctccctctgcctgtacttttggggccaagcactgagctgaaaagacaattcctcctagttctccaagcctacaacctgccccctaaccagctgtgagctgtaatacattctccagtgtcactgtgaggtttgtgccttcacccccattttatagatcaggaaacagaggctcctccaagtaaaggagcttgcctcagatttcacagccaatgagtggaaaagcctctgggattcaaatgtcagagcccatatttttcctacttctcgcacctgttatcatatgctgcctcttcctttaacctgcagttccctcccttcacctccaccgtctcaatccttcccactctttaaggttcagttcagctatgacttcttctatgaggctctactcattttctcagatttcttcctcctccaaatttcttgtaaaaattatgttttttctctgattctaaaagaatgcacattacattagaaaagatacacaagcatacagaagataaaaaccacctaatatcccatcacccagaagcttccagtttttctttatgcatttgcatatgcatttgtgtttacttttccccaaaagttctccgatactttgtcctacttttcttttgacccttataacttcctgacttcggtacctttctgatttgccctaccagagtgtgagcccctggaaggcagcctctgcaccctgattcaggttgccacacatatgccagctcctagtgggctggagggaaggacatgcggttggggaactggaagactcatgctttcagctgtgtgcttcctccctagagtgcaggcagaggaggaatcgaatcccctcagcactcttgtaaagaccacagcaatgagtgagagatggtgcctgccagacataccattctttacttttcagcttaaaacagatacaaagtttggggaggctcactggaggaggcttggggctacactggaaagagaagaacttggattcacaccccagcttcccctcttcccagctctgtcacatttgcaaactctgagtctcagtatcctcatgtgtaaaatggggatagggtttatagggttgtaaggatgagatgatgagttgtttgcaaacaacttctcacagtgcacagtgaaggtcagcaatgagagccagccccgccctttcttctttccaaatgattaatatatctgttaccagcctccattcattatatagctctgtcatgtgctaagcaccatgggggctgaaaaagatgttcttcctgccttaaaattccactggggatgaacaaattacacgggagctgatcagagaggaaggcagtccattatgagggctaattgagcagtgcagaccatgttgcaaactgagttagggcctggagagcttactgtgtgctggggtcctcaggaatgccacagatgcatcaataaccacctctgctactctggaagtagtcacatcaggaagactccagagataagcttatctgggctgtggccacagagctggaatttgtaagctttaggtttctatgtctcatgttaccagcttgtctataaattgtaaattacagccatctgatggttagggaatatgaagtttggttaagagaatgaaatgagaccacgaagattagagaacaggaaaagaggggactggggactacatacccatcagaatcttcattcagtcctgaccctcagcaggagggggatttcatcaggctcatttccatccttgatttcgtccatcctggttctcctgacaaggggcatttatcagagttatggcatgggaaatcacaggggagtaatgtaccatggcatttaagagtatgaacgttggagtcggagctattttctccgctacttactagctgtgtgactttgggcaagttacttagcctttctctgagcctcactttctttatctgtaaagtgagggcgatcagaataaacctccttcatatggttattttgagctttataaagagacaatactggctgagcacggtggctcactgccagtaatcccagcactttaggaggccaaagctggaggatcgcttgagcccaggagttggagaccagcctgggcaacatagggaatgagactcctgtctctacaaaaaatatacaaaaattagtcaggcatggtggtacgtgcctgtaatcccatctactcaggaggctaaggcaggaggatcgcttgagcccaggaggtggaggttgcagtgagccaagatcacgccattgtactccagcctgggcaacaggagtgaaaccctgtctgagagagagagagagagagaaaatactactatggtgcttataaaagttcaataaattttagctgttgttagtattattaaagtaagatctgtatgaaaataaagcagattttttcccccaaatgttcatgtcagaagtatatatttcattggcaaggggctgcttctggaaggttgagaggtatcctgggggaggggatagagcactggcaaaattggcatcacaattcaagtcacctcactcagtgttttttaagttatcaaaatccacagtatgaaaagcatttgacattacagtccactatatttatgcatttataaacaagagaaaaaatcacgaaaaatacagtaccacgtgcagtacacactgattccatctattctttttttttctttttcctcaaatgcacttgccgcctacttattccagacccaatgattgggtccctatccacagtttggaaaacactataagaaatgattgtgtcctctcactttccctctctgggatttagttttccaactataaaatgctcctgatgcccagccagcctcaccgctgctccgagtcaatgccaggaacgctgatttagcacatgctatttggagggtacccatccaggtgctgtgggagggacagagattgagaagagtgctttctgaccccacagaggccatttggaaaccctgggaatgggtgggagggttggaggtggggattgcttctcccctaagactcagcgtgatggaaaggcaatggggtgggaactaactggtgttggtctgtcccatttgtgtcccagcagccttcctgacagcgagataggagaggaccccaggtacagccttgggactgggtcagaagtgggtctcaacaaagggaaggggtagggtgggggtggaggacttgtgggtgggtaatgctgagtatggattcagggatgtgcagcctacatattttcagagacatggggctaaggcctgcattctcaatgagggcaaaatttggttcttggggacagaaaacacttagacattgcaatgctttgtggctgtccaaagtaccaaacagatgccagtatatctgtggtgctgaaatttcatggtgaatggagtcagaaaatagactagcgattgccagggtctggtgggagagagagggaagggactgccaatgtgtatgggatttgttttggggaagataaaaatgttttggaattagatagtggagatagttgcacaacctggtgaacgtacttttagtttcagaggttttctaaacctctgatttttttttaagtgacaggaaagacagaaaaaagtatatctaaaaaggctctaggggtgatcatggaaaagaaagttaagaaatatgactgtaaggaaaggagatgggtgtccctcaggccaggcagaaaattcagtcttgttgctttatgttcatgtgcaaatctaaaaaatccaagtgatatagattaatgaggctctgagtccctcaaaaccttccctccccttacctctccaaaaaacacttgagataccctagaggtggtatgaagtcaggatgggaaggttggctcagctttgcaaataagtttaagcctctggcctttgctctccaacaccaaagaggcttcactttggtatattttctctgccctttctccctccttgtccccaactgtcagtatgtgatgacaggctcagcctctgtaatggtagtgatcatatttcttgagccaaaaatcagacctcatggcatgtgacaagtttgcatatgtggatgagaacagagtggcagaatatttgacacgggagcagcttgggcagtccagggcacatggcactgcacctgacatccctggcagatcccccacattccgtggttgtcttctgatggggccatatggggctgcagatcatgcctggagccctcgcagctccagggctgcgggttcccagccccagagtgcaggtgctggtgtcagcctgcctggcctggcctggctctgtccagagcactccttgccccagctgtttgtgcagctgtatcagcctcagacctcagcctattcattccaacctgaatgcagaggctgggtctggaggagccacattgcgggcttcatactcctgatctgacaagttttccccccagagcctgcaccaatggcacctctccccattctccctcttaactgggtcctccagggccctcctcacacacccacgtggtcaggcagcagaggcttccccaagatgggcacaccccactctccacacctctctatgcagcatttgtggctacagactgggtccaggggattgtaaaggcatgctcatgttgggttggagggagctcaggatcttcctggaggatatggttcactcccatgagagctcagtatgcctttcctcccctgctgcagcccagagcgggagacagcgaccgacttggatatcaggtactgcgtcctgggaacattgccccccagggtcaactccctccagggtgctctcaggcccaagggagccacatcaccctgctgggcagcccccagaccccagccccagtgttgggggaggccagggagggcccctgtgctccaccaggtggctcgggagctgctgctgtttctgtgcatccatttactcccttcacataagatcatttttatctgggatctctttttcttttttcttcaaaaaccacatcactcaaaatgtggcttccttggctctgcttttaaaaaaaaaaaaaaaagttcttccatttggagaattacctgctgacttcaaagtccagtggcttgagggctacccaaagagggaggaagccagaagttgagtgttcccttggtttggtcacacttttgggctcctccctgactaaggaacaacagactgcagggctggggcaggctgggtgtagggcagggaggggatgaggtcctgctgccccagtcagttgagacccagacctctcaaacctgcctgggggaaggcaaggccaccagaggccacactaagcagatttctaccaactgcacctccccatccccttgcctccatctgagccatcagcttgacaactgcctctgagaacaagcccctgagaatgccttccgcaccccctactcccgccctgctttttccaggaagagaggccccgtggcctatgcttcgcagaaaccatggctgctaaatgccactgtggaggagaacatcatctttgagagtcccttcaacaaacaacggtaaaagcctgtcggagggaggcaggatgtggaggggaggaactgtctctggccagcctgccccagttccgggcccctccatcgatcacccacacccagccatctcactccccaggtgcttacctgcactccagcctctccatatggtgcacctggagaggggccaggtgtgcctgagcattggggcaatccagctcccataggggagagggcaggaatggagggaagggagagagccccgctgccttttctctagctggtgggagggctagctagctctctctgtgagtctccattcgcctggctcctgcactattttccctccaatgataatagttagggctagcatcgactgcgctcttactacataccaggcacagtgccgagctctttgtacacggaatttcctctcatgcttacaacaacctcagtaggtagatattattgttattcccactctacagatgaagaaccaagtttcagaaaggtcccaaggccacccagccagtaagtgaccaagatgggtctcaaatccaaagctgcctaacacctaagtacatgtttgtcaccaacatactctgatgcctccatgaactctggctggcacctgcccaggctaagggctggctggggaagtatgagaggaacaggctgggcaaatatttgaccagccatcatcattactgcctaaaccaaccagcagtggttttccctgcagtgccccaagcacgggttccggctgcagcttttcccactgcacagagatcatgagcgccctttcatcacttactctgcatatttgttcccaaccaattccatccttctagtatttaacctgcccaaacgctgtgtgaagtgctgacctcagctcttttcaagctcacacggtgtttgcttgcacccaagcgggaggcctattaaagccattgctcaccctgggcatagctacccagagactaatgaccctctgcaagtgctcgggccaactctgaccaggctgaccagctgcatcccctgcctctacccacgccaggtacaagatggtcattgaagcctgctctctgcagccagacatcgacatcctgccccatggagaccagacccagattggggaacgggttagtagcagcctctgaggggttttttcaaagccaggacccccaacctaccatgccctgagacactactcaggacaatgggtaactaggaaataggagacattgaaggctgaagagttgcctgcagtaaggtcaaacatgttgttcttgatgatgtcctttgacaggttttcagtcctgcttggagggcaaggtcagcttagtgccctcccaggctggggatcttcttcatttgcaccccaggtatacactgagagcccacacagcactgtgctcagcctggggttgtattgttcctgttcatcctccagatggggtcccctccacaagcttagacgaacaggattctcctgtgactgtcctccttttgtgtgattttaatccctgctgcctctgtctttgtttgtactggtcagatggtccctagcgcctacacaatgaatctttaaagacttggggctcatgctgccctcttctgaatgaattcagtaaacacgtgcaagttccttctctatgcaaggtgagaagcaggcaaagaagtggatagagccaggcctccatcccaaagagctcatagtccagtagggtacaggacagtgtctcctgaatggctgagggcatgatgtgttcctcctctttggtgacagggcatcaacctgtctggtggtcaacgccagcgaatcagtgtggcccgagccctctaccagcacgccaacgttgtcttcttggtgagtgcaagttcccttggggtcctggtctctggctgcctcccaggcctaactgcccacctccacctccccgcaaccccaccatcatccaacaatctccctctccaggagtaaatccctcctgccagagatattgccttatcatcctagtgatagggaaactgaggcaggcaaggatagcacaaatgacccattgcagacttcagatggagctctgcagtagccaatgaggagaggcaagctgtagttataggctgcctgtctgtgggacagcccaacccctcaacacttatgcagcccgactataagaatggctgataacagaatgtgtgctgccacttcccatcttatgcccagtgcagacattgctaattgttcacagcattatttcccatggaacttaactcatcctcagaatccttctcaacacagcactccaggtaaccactagccatcaaacatgagataaaactaggccaggcgcggtggctcacgcctgttattccagcactttgggaggccgaggcaggcggatcacgaggtcgggagatcgagaccatcctggccaacacggtgaaaccccgtctctactaaaaatacaaaaaattagctgggtgcggtggcgggcgcctgtagtcccagctactccggaggctgaggcaggagaatggcgtgaacccgggaggcggagcttgcagcgagccgagatcgcaccactgcactccagcctggggacaaaccgagactttgtctcaaaaaaaaaaaaaaaaaaaagaacgtattcgcaatccttacactacttcatgtcaagttctgttgtgtcaggtgccttgactgacactgaagaattctaagaaccagtccttggcctcaaagatttagaatctgattagggagacagagctcacccagttcaagaggcccagcccggttcaaatccaaactgtgcggcataaactatgagggggccttgtccagggagacaactgtgagggctggagtaatcagggagggcttcctggaggagagcctcaaagggagagtcaattaaacagaaggaaagagggaggccatttgcacagtgagttggaagaaggaagctcaagtctctgattccagctttattccctcccctctccctacaccacacgcacaagcactcctttactaaagacacttcacagtgggaagattcagtctccgttaccgtctgacacacacacagcgttttacaaagcatgggtgcattcgcgatctctcatgagatttaaacaaccctgctagagaaaagtgaagtggacattttatttcagtaaacgtttatgaagcgtctactctgtgccaggcactaaacgtttatgaagcgtctactctgtgccaggcacaggcacaagaagtctcagttcttgggagtgccataatcaggaatggacaaacaatgatcagatctggctttgcgccagtgtcacgggaatagggaggaaggaagggtaggcgtgggggtcaggacaggatgcaggaggaactggtgcttaggtgagcgaaggatgggtgggagttcacaaggcagacaaaaggcagagcagcactccaggcagaggaacagctcaggagaaggcccagacggcaggcttcctgggaacctggaatgcagagtgctgggaaagcacagatgaagcatgagtctagaagggaaagcgagaggttataaagcacctggaacaccagcccacagggtttgactttagagatgatggggagccgttgaaggtccaggagtcaggcagtgaagtgattagatctgtttgagagtgatatctgacaactgccccattttaaatgaggtaaccaaggcccagagaggttgggtgagttgtccaaagccacacagctaactagcttcagtccctagagcagagttgatagaactctaatgggttttatactcattgtcacccctccccaccatgcctttccctaccctctactctcttcctctcccttctgcccaggatgaccccttctcagctctggatatccatctgagtgaccacttaatgcaggccggcatccttgagctgctccgggacgacaagaggacagtggtcttagtgacccacaagctacagtacctgccccatgcagactgggtgagggggaacaagggggtcaggctatagggggcagggctggggaggctgtcaggcatcttggcaggaaccaatccgttgtcttggtagcaactgctgagggccacaaagcataagagaccagcactggatggctttatgcatgctgggcatttcagggagaccctgtacaggccaggggtttggtatcacctagacccacagacactccccatcctggcccgggccccccatggtacactcaaggctggcaccaagaagtctcaggaataatcaagtgctcacttctcaccttctgattcctgcccttttgatgacccatccccgcagtcatggggagtgcccatttggatggaaaagccctcttcccaccctatgaccttcccggggtggatggatgcaccaccccgggaatcatatgggaaatatggaaccaaacaatagcagtagtaatagaaacttcaggctgggcgcaggggctcacacctgtaatcccagcactttgggaggccaggacaagaggatcacttgagcccagaagtttaaggctgctgtgaaccatgatcatgccactgcactccactacagcctgggcgacagagccttgtctctgaaaatttgaaaaaggaaagaaagaaagaaagaaacttcaatattatcagtagagtccaatgttgtgaaacccctcattaactaaatttccatactcttcagtaggtagaaaataattactttttgattcattagaaagcacttaatttttaagatggagatcatgtaattttgaactctaggtcttgcctactcctatataaattctcctctaaacaacagccaaaattgaggccctctttgagcttcaggctggtgccaaatggctctgcttattttccccaaaataaatcttccttccatgtatgatgagaccccctccagtataaagaagacccaaagaaaatcacccaaagaaaaaaggcccaaagataagacccaaagacctaaagatttaaatatatatacagatacagaaggtttgtttctgagtttctgtagtgaccttggcaataccttgtagttcaggacaatcctgaggaacacagaagtgctggcttccttgaggaatcagtgatcaggactctcgagccccttgaaccccagcatagggcgggagggggtgagggcagcaggggtgggtgtctgaattaatgtcaggtctacgtgatggtgtcatcaagtgttccagataaaaagttttattgagccgggcgcggtggctaatgcctgtaatcccagcaccttgggaggccaaggcgggtggattgcttgagcccaggagttcgagaccagcttggggcaacatggtgaaaccctatctctataaaaaaaaaaaaaaaaattagccaggtatggtggcgtgcacctgtggtcccagctactcaggaggctgaggcaggaggatggcttgagccaggaagcagagattgcagtgagctgagatggtgccattgcaccccagcctaggcaacagagtgagaccctgtctcaaaaaaaaaaaaaaaaaaagatttattgattccaaagaggcatggccacacacacttagaccagcaggtgctttgctaagccctgatggaggctgccagacccgccgtcaagaggagctaagggtagtgtacaatgagcccacttagtgtatgacggccgctgccgtgggtggagtccttgtgagtaaccagccagcttgagcaggatgcactaatttgctctgcaaacccagccattgagaaatacgcctcagatgtaccgaactctaggtcctaggagtatgttggttggggtaggttatcaataccagcccacttgcagtggatgagctggtggccatttgtagtgaggaaagggatgtgtcaacctccatcttagactccacaattgagggatgtgaccaccattcctccccagccagcccccaaaccacgtttgttgctgcctttccagatcattgccatgaaggatggcaccatccagagggagggtaccctcaaggacttccagaggtctgaatgccagctctttgagcactggaagaccctcatgaaccgacaggaccaagagctggagaaggtgggtatatccagggatggccaagcagccacccctggatgcaaaggttctgctagaacctgaactcataaaggtcttcctgtccttagtgccccaggaagccccctaaagggcagatgtgggagctgggcatgaactggctcctaccagaggagagacagtacctgtgccaggtgcccagggcagaatcaggtgggcaccttcgccttatcctgaggtagtcagatactatttagttgcaaagtttcagaaaatcaactcaaactggcaaagaaaactaagcaaagaaaacaagagggaattaaggatttattgacccatgaaaccaaaaagtccaggtgtgtcatagctttaagtgtgctggatccaggtagtcagtgtaatcagaaatctgtttctcccatctcttgactctgctcccctcaaattggctcagctcccctcaaattggctccattctcatggtatcagtgagggccaccagcagtcttaggtttacattctcccagctcaacaactctgccagaaaaaaagtgcctctttccccatagttcagcaaaagtcccagggctgagtctcactggtccagtttggtcatgtgcccacccctgaacaaatcactgtggccagcggtgtggaatgtgaggattggcctgtcctgggtcacgtgccactttgggagccagatccacctgaatcacagagactaaaaacaggggaagagtggttccccacagggatatgggggtgctattatctgatgaaggggaaggactaaatcctggcaagatgaatgtgtgtctgtctgcccctccctcaggcagggacaaagtagaaatctgacattggtcatcaccagagtagttaccccttaacttccccttcccccaccaaccatatatcctgaagacattgcccaggccacatctgtcttttaggagactgtcacagagagaaaagccacagagccaccccagggcctatctcgtgccatgtcctcgagggatggccttctgcaggatgaggaagaggaggaaggtacaggcaatgggactgggagtgaaattatggcctgaggtctgatcagccacagagaggctaaggtttggggttctgggtgtggtgcagtagtgtgcctttgattaaatggcttccctctgtgtgcccccgttgtcccctcagtaagtggggataaaatgccctgattcaccctcagagggatggaaatgtgtagccacagagtgggttcttgcggcctgcagaggaggcagctgagagcgaggaggatgacaacctgtcgtccatgctgcaccagcgtgctgagatcccatggcgagcctgcgccaagtacctgtcctccgccggcatcctgctcctgtcgttgctggtcttctcacagctgctcaagcacatggtcctggtggccatcgactactggctggccaagtggaccgacagcgccctgaccctgacccctgcagccaggaactgctccctcagccaggtgtgactggcggcccatggcagaggttgggagtggggatgggggaagggctgagcccatgggcaccctggaactccaaatcactctctgcctgtgaaggagtgcaccctcgaccagactgtctatgccatggtgttcacggtgctctgcagcctgggcattgtgctgtgcctcgtcacgtctgtcactgtggagtggacagggctgaaggtggccaagagactgcaccgcagcctgctaaaccggatcatcctagcccccatgaggtacccgtctcccctggccaggctgggactgtgagcaagtcactgttctctgagccttagtcttcccatctataaaatggggatatacaacctgtcacaagcttgtgggggtgactcaaggagacagtgtgtgtaaaagtgccctccttgtgcaagaagcagggagaaactggcatttactcagccagatactgtgataggcattgtgtgtggttagctcatttaattgttaccatggccctttaaagtgagcgtctgcacatccaagtaaagattgttttctcctccctaagtgggtgtaatttgcccatccccacccatgagttcagctccctgccctcccctcactctctctccctcagccagcctcaggttttgacactgggggaacaggtagctgttctattaataatttcctgtaatgggatggataaaaatctcaaaggccacttgatgtcaaagaggtttaaagttgtccctgcccaattggttggccaacttggcttaaaaacacaacaggcaaacagattttctggccccttgtcgaggctagacctcacaatctaactgcactttttactttccagcctcatgagttttctgtggcccacagatatggcctccaagtttatttacttttactctctatttgccccagctctgtagttctgaaactccctggttggggttgggctgactctgggtcagccagccggcaggctgtccccagggccctgttcctcttggcaggttgtccctctggagaggactctgtgtcccaggaggacagctgctgagtcaggccgagccggcagctgagaaaggcggcagtcgtcagatgggcttgagaaactgaaaggctaacgaaaggccagcgcccctttgggcagctgcaggaattcacggggatacaggccagatgtctacaaattggcagaggatgccagacccatgaatgactccagagacacttacatgaaataattaactatctcattcagtaaacaggaagtaaatcaatggacaaatgagtaactcttcctctggctgcctcttaggttttttgagaccacgccccttgggagcatcctgaacagattttcatctgactgtaacaccatcgaccaggtacagaggaccgtgccacactatccccccttccagagacacctcggacccctgggggcttctcctgtctgaggctgggttccccagatcaggtgatcacagccctctgggaagaagccagtgtccccgatccgattataatgctgcttcagggctggggcctccctcgtgggagcctcacagtaaggctgagggaaaccagatccctttagcttccacctgagatcccactggctttctctagtaaagttccagcatattctgaaccaaggtggctgattgtatggagaatattcattttgattcagcctgtgttctttatttaccattgtaccagatggtgtgaaaacaaaatcttgattcctacctcagggagtttaccttgtagctggagagatgagatacgtgcctataataaagggagagcaaggccgggctcagtggctcactcctgtaaccccagcactttgggaggcggaggcaggcggatcacttgaggccaggtgttcaagaccagcctgatggccaacatgatgaaaccccttctctattaaaaatacaaaaattagccaggtgtggtggcaggtgcctgtaatcccaactacttgggaagctgaggcaggagaatcatttgaacccaaggggcagaggctgccgtgaaccgagattacgctgctgcactcaagtctgggcaacagtgagactcagtctcaaaaaaataaaggatcaaaaaataaagtgagagcaaaacatggcggccagtagcactctaaacacagtcaataccaaaattcacctcactctctccccctcgtctccctcagcacatcccatccacgctggagtgcctgagccgctccaccctgctctgtgtctcagccctggccgtcatctcctatgtcacacctgtgttcctcgtggccctcttgcccctggccatcgtgtgctacttcatccagaagtacttccgggtggcgtccaggtgatggcctcaggggtgaggggtgggaggtgctttgcaatgtgcagtttggtgtacttgctagactcatcgttatgagagtaatagggtcgtgttccctccaaaaaataaaaacaaaaaacagaaatgaaggaaatagaaatatccacatcttattccaccgccctaatataatagtctgccaacacacgcacacactgaggttgacatctgaattatttccttgggcgatatggtcaggactggaattgctaggtcatgataaatgcacattttatgcccttcattcattttgccaacatgcttcccaggagggttgcatcattctagtggtcaggctgattgctgatgcatgaaatcggcgggcacctgattcaagcagtgttatgataacacctcccagcccacgtgagtccagagtgtagctgtaagccttgacttgagggagcctctcacagccattctcatggatcacatttgccctcatgagctttggatccatgcacgcctctttcctcctcaaaattttctaagaatgttctctagggagttctttctgggagtgattctcccagattcatagaaactcatagattcaaaaaattgtaggaaaaaatttaaagaacgtctaggccagtgtttctcaaactgccaattacagcccatcagtgggtcatgaaatcaatatcatggatcacaaccagcatttttttaaaaatgaaaaaaacatcagactgtattcatagagtaaagcaagctttgcttcatgaaacctttgtgttggtcatggaggtgtgtgagtactgatttgtgagataaaatatatttctgactgcaggttgtggtcagaaaggttaagtacctttcccaagtgcacatagttggctagaaactagagttgagatacttattagcaataataaaatttagatgcattttggacacaattacctgccccaaaggatcaacatttgtataaatggctttttgcttggatgatccagaatggcccgacacccacacgaacaacatagctttttgacactcaaaaaattcaaagtgctgcacaagctgttctacaaagttcatttcttctgccagagaaacagcccagtctctgtggcacccagtctgaccctggagatggtttatcagggaaatcaacttcctgcatcccaaactggcctccctggcactgatgtgcttgtcgaggtgcagctttggggagcaggaggcaattctgttgccatggaaacctctggccttaccccgagacgaaacctatcatttcagcacatcactggccagggtctaaagagctccttgatggggtaagcggaagacggggttgaacgctttgagtttggtcttctgttcctttggccagctgtctcaaggttcagattgttcacctgtaaaatggaactagcactgcctgcccagccttagctcagctccaggctgtgcagcagaagtacagggacagatggcgacctggggttgacaatgcccaggacagcagtaattgtgccccacatcaggctgtgtctaagcattgtacataaacgatctcattcagtgctcacaaaagctcaatgggctggtggcattgtcttcccccttcacggggtaagaagctgaggcctagagaggtaaggccattcacccacacagcggtagcaggtggagctaggcttcaggcccaggccgagccctgagcctgccctcttaactgttccactctgttccccgccacagggacctgcagcagctggatgacaccacccagcttccacttctctcacactttgccgaaaccgtagaaggactcaccaccatccgggccttcaggtacgagtccacattcccccaaggtaggagtggaacaggggtggggccagggggcacaggccatgagatttgattctcaggactccacttgggaaggccaaggacacgttctctctcaagctgcctcaggtcccaaggcccaagggatatccaccagcagggacaggccaggtgggctcccactgaatgttctagagaggaaaattccagctctgtagacaagcccaggacctctgtgaggcagagcatgaaaagagacaaagctgggacaagtcttcatgtatcaacgctagaaagggccttaggtgcgggccaccctaagcccttcttttattaaggagcccctgtgtgccaaacactatgctgagtactgtacaggccaatcccactcattctgcactgcaaccctcggtgctgagaatggtcatttccattgcacagacaaggaaactgaggcacagagacgttctataacctctctgtgtaaggtgccacaaagcccagacttgaacctatttgttcatgcaacaaacatttactaagccccgactatgtgctaagccccatgccaggcactaaaaagatgagtcaaataagccgctgccctgcaggcgtttacagcccagactttgagcaggccaggataaatccacgtgacaagtattctgaaaaaagcggattcaagggctgtgggagcatagaagagagacagtccgggaaggtttttgtaccagaggtgtcatcagaactaggactcaaaggaggggcaggagttcaccaggctgaggaattcctgaaaacttcagtgcccctgccatcgtctcactaccctgagtggtgatgttggggtggacaggagcatctgaggttgcctggggaatgagggaagctgttgtttcccactccccaagagtctgtctgatctccagaggcatctctcttccagtcaggcaggccagagacccctgacacacaaagttgggctcttttctcatcttcatccagagagtgataataggttatttttagggtggcacagctgcacgaagtatgacagtaaccatgagacaccaagcactgtgtccaggagtaaccatagggcacaaggaccagccaagggccagagaggcttacatctcctccccccaacccctgaagtccagcttcagccctggagaggtatccaggcccctctgcccaccctggagcacctagggccagtggaaatccacctcttagggatcttgtctaagtaaagaagagcagagcaaagctctgccctggccttggcgctgctccctggacatcccttgcccctggacaagcctatgctgtgtcttccacaaagaagcttgctggggactggattatgactctagagtctcctcccagcctcctcttctcaagcctgaacttctcccgttccttcaacttccaggtccctcgacattactgagcctagcctttgctctaagttttggtgatttccctctctcaattggtgtctcagagggccctggggtagagagatggtgactcttctagagtgggccacagccccttgtgtgcagatcccagcttcctgtaaacagcctcagatcaggccaaacctgtggtcagccagagccactgctacccagtgaggtcttccacaccctactgacacggtgaatgatttttaaatttgaatgaaaggctttttaatcaaccccatacacatttaatgcattggctttaatccagcagcctgttgagagctattagcacttattgattgcccacttactgtatgccaggcaccgtgctaagtgttgtatgtgcattattacatttaatcctcacaaggaccacataacataggtacgaatcgccacattctccagatgcagaagcgagacccagagaggctgggtaatcaatccaaggtcacacagactgcgggggctggcgctgagcttggaacccaggtttgcctgaccttctgggctttcctaagagatcttattttttcccaaaagagtttcaagagtgcccagcactgggctcagtggcgggctcggaggttgttttcgttcatgtaggaactatcacttccccatttttttcataagaaaactgagtctcagtcctgatacacagccaggaagttgtgatgttcaggctccaacctgggtttacatggctccgaggctggggctcttttctagtcctcagacacactgtcgcacgcctgtggcagaagctcccatctcacacttgccgaccctcaactcacacagtcctgagacccacatacgctgagcgcctcacactcctataacacgcacatgccctgatgcacacacattttcaacacgcacttactctacccttcaggcatggtttcacactcactgcagacacgtcaccctcccacacgtctccaccctgggggtgtgcagtagcatgctctctcccacctcagaacctcccttcagtcccctcagacacatgccctctctccacgcagagacaatcaaagctgaactaacaccttccagggtgaaaagcaaatgcccagtaaggtacgtcttgggtgcctccgtgtcccctgagtttggtcctatcaaaccagcgatgatgaggcagcttttctttcgttccttcctccatcatcaaacaagtgctcctgcatctcctctgggccgggcctacgtcagcaaggtctgagggaagcggccaaggagagtgatgacggcagcccaggttgatcagagaaaggaggcaggtccatgcgcagtaactcagggaaaacatgatgaggacctaaggatgagaaagaagcctccagagttccctgtgcagagagattccatcaatttcagagggtcaggggagtgccatgcattcatccaacaaatatttattgatagtgccaggtgctggggtatattggtgaataaaacatcttcatggaatttgcagtctattgagggagatgattataaatagctagagaaatgcatgtacagcagatactgtggagcaaacaggttgcagacaataataggggaaacctactttatagtaaggtagtagccaggaagagcctctctgaggaggcagcatttaaggcaagccctgaaggttgagttgagccagccttatgaagagcaagggcaaaagccttccaggaaaagggaatagtgtgtgcaaaggccctggggtagggaagactttagtattgtcacagagcttttaaaaagctgagtggctgcagcatagtgtgtggggtgtttgtggcaggaattaggttggcaggagggggttcttcatcctataagcagtggaaggtcattaatattcttttttatttgtttttttttttttttttttttttttttttgaggcagagtctcactttgtcacccaggctggagtgcagtgaggtgatcttggctcactgcaacctccacctcccgggttcaagcaattatcctggcttcctcagcctcccaagtagctgggattacaggtgtgcaccaccatgcccagctactaatttttgtattattagtagagacagaattccaccatgttggccaggctggtcttgaactcttgacctcaggtgatccgcccgcctcagcctcccaaagtgctgggattacaggggtgagtcaccgcatccggccggagatcattaatattctaaacagtgggggagaggacacagtttgcgatttagatagattaagccagccactgtgtggagcatggactgtagggagacagcaggtagacgtattcaggaagctgatgcagtagtccaggtgagagtttgtggtgggcaggaagcaggatagagggggagggaggcaaggactcttttagagagagacataagaggacttgccaaggggctgaatgtgaatccaggtgattcctgggtgagaaactgggtaaagggaggtgccccttattataatgggaaagacctagagaaaatggatcttggggtgaaaacaagagtttggaggaggtggggattctggacaggtttgaataagcagaaaggagtggggtggacattccagagagggatagcttacatgaagtggccacggtggcatgtctggggactggaggggccctggagcctccctctgcaggtagggagactcctaggagctatgtggaccaacactgttcccttaggagcttctcatcctccctccaggtatgaggcccggttccagcagaagcttctcgaatacacagactccaacaacattgcttccctcttcctcacagctgccaacagatggctggaagtccgaatggcaagtgctattcccctctaccctggcctctgataggagggtggggccagagcaagagcacacaggtacctggggatgaaagagaggataggataccagatcgtgtggacaccaagccttcctgcttcccccagccctggtggtcctcctagtgtctagcctgtgctccttttccccatatcactgcctggaggcttgtgtatctgaggtgtgtgccagtggcaagaacagttgtggtgaatgtgtatctgcagtgggtcatatgacacccacattgtgtgtgtttgtgggccagctgaggcgtgcatgttaaagggtgtgcaggggctagggggtaggggagcatgagcttgtgggacatgttggctcctggggctccagccttcgcagcccttgtgtgtgtctggtgacgtgtgcatgagttgcagggctggagtggaggcctggctgagctgctctctgccccgaaaaggagtgaggtagaacaggggcctgtggctctaacccctgagcgcccaggtcagctcctctccctccccaggagtacatcggtgcatgtgtggtgctcatcgcagcggtgacctccatctccaactccctgcacagggagctctctgctggcctggtgggcctgggccttacctacgccctaatggtgagcggcagtgggctagggcagaggaggggtcagacaccagcactcccggagcaccttcgtcactggagacatgagacactcccaggccttaccccaatttcatttgcatctgatgccagagggacagtgcgggcaggaaggctgaccagcaggccccagggcccaggccccagacaggtggaggttggggagccacatgactgaccctccctgtgcctccagggagggctgctctgagcaggcagtggatggcagcaaaaggaatctggggccctggcccctctccagccttaagaagagccattctggtggctgaggacagaactaagcgaccatggagtgtgcgccactggcttgctccccacaggtctccaactacctcaactggatggtgaggaacctggcagacatggagctccagctgggggctgtgaagcgcatccatgggctcctgaaaaccgaggcagagagctacgaggggctcctgggtgagaggctcagggagaggggtggggaagagtccaaggaggagtgtgtctgggttgggggccacaagggagcctggggatggggtggcactttcggatactagctgtggcccatgcctggtggctgagcccagcccggcccccagcaccatcgctgatcccaaagaactggccagaccaagggaagatccagatccagaacctgagcgtgcgctacgacagctccctgaagccggtgctgaagcacgtcaatgccctcatcgcccctggacagaaggtcagagcacgggcccaacccaatgctgcaggacaggcgtgagcaggggatggggcatgcacggagctggatggcttcgcagtcacctcgtggccctccagggccgaggcctctcactattcagacatcgcagtctcctgccctgggcctgtgggggcccatctttcctctccttctattgccttcccccagtgctgccctcaggccttgtcttctcactcatccaccaaggagaccgacactctggactcccccagctcacacgggctttgtcagggcctccctctctgcgaatggtcaggggctttccctagggcactgccccgagcttcagggcagggacctgggggcagacagcgaggccacccttgtattgagggtgagcccctgcctatggccctggcccagctctcctctcgtttcccactctgtctctttgtctctgtctcactttgctgtggctgtccatgtcattctctgaccttgggatgtacctctgtccctgcctctctcatccttctatgtcactatctgtctccgtattgtaatttctgttggtacccaagtgccaggaagcaacgggatcagaggtggctccattgtagggcggggcacacagacacatccatgcataccactctcagctgcccctgtgtcctcctgccacacccatgcccatagagacacaccactgccccccagctctccttcagccaagtacccggcacacccagacccacaccaaggcccaggcaaatggacatccatgcctgcacttgcgtgccggtccctgtgtaagccctctctggacccactgcaggaaacaagcccaaacctgtggtgtccaaagagaaactagtcagaaaaccaggccaaaaagataccctgtgacctcccacacctgcacacacacccagagctagcatagaggctattcccagcagccccagagtcccagtggcggtgcctgcttctctctttccagatcgggatctgcggccgcaccggcagtgggaagtcctccttctctcttgccttcttccgcatggtggacacgttcgaaggtgagttgtaaggcgggcaccccacgtgtacccacagccaccagatgaggcctcagccctggcacgtggtcagacatgacaggaggcccagcagtcaccgccttcccctgcaccctcactgggacccatgcagggcacatcatcattgatggcattgacatcgccaaactgccgctgcacaccctgcgctcacgcctctccatcatcctgcaggaccccgtcctcttcagcggcaccatccggtgagccccaccacccctcaggcccacccagccccaggccggctcagttccatcagatctggagcacaaagaggagggggttgggggagaccaggatcccagaggtgtttcctgctcatgcccttctccatcccatcaggcccaggcagcctctggaaggggatcccccacccatgggtctaagatgctgtcccccacccactgccaccacctcggtgcttctcccagccagacctccaactcagtctgctctcgctcactgccctctttgccgcctggggatgcaggcaggaccctgctccctccctactggggctttctgtgccacttccagatttaacctggaccctgagaggaagtgctcagatagcacactgtgggaggccctggaaatcgcccagctgaagctggtggtgaaggcactgccaggaggcctcggtaactactcctggctatgcagctgggttggttgggcactcaaggaccctgtaaggatggcagacagaagcccgtgtctcaggtttgccccaagtttggagtctgaagcctggcaggaccatttagtcctacttctcactatacgggggcccagagaggtcaggtgtcttgccccaggtcacacaactggtcagttcagggtctggctcctcctgcagggtacagcgggtacagtcagggatccttgtgagacagagattgcgagtcccccatgccaagggggcatcttcagccctgccctgccccatccacctgcatgcccagttctgccttaggggaggagaagatggactgggcaatcatagacacgggtcactcatcaaggccaccggtgattggcaaagccttggtatatttgctgcagctcctggagcattgggggtggccaagccttggtttcaatgaatcaccctaccaaggccctacatacacactcagtgcacccctcagtgcacacgccccctcccagaactgcccagggccacagcagcacacacctccaggggtgcccttctcgttgcagtccttgcagacggcctccacattgttgtgtcaggtgcaccagccctgcacacgcctgtgctcttggacacacacccacctatttgcccccatgcacacattttccaacagccccccaagccatcccatctgctccactcacagcacaagattaactcagtcctacttcatctccccgggctgttttcagatgccatcatcacagaaggcggggagaatttcagccagggacagaggcagctgttctgcctggcccgggccttcgtgaggaagaccagcatcttcatcatggacgaggccacggcttccattgacatggccacggttggtcctgggcccctccatgggaccatggtcttggaaagggtttagtgggatgctagggagaaatttgcacgaagtagtcctgaggctcaagttgcctctaacatcaaatgctatgtgttgcagaaaatgaaaagagctggggggaccctgactctgtctagtcttagggaatgttacacacacacacgcacacacaaaaacactatgcaaacacacacataagctgcacacacagacccacacagacttcacactgtcacctatcacaacagcacacacacagccacaaccacaacctacatacacacacagagctgagctcccaacaggctgagtccagtccctgagtgccgggaacctgttcagtcctgtggggtgggggtgggactaggatcggggtcagatgggagctgagccacagacctgggctccacatcccccaagccaggccagaccccatccactgggcaggtgagccaacagctgttgcccccacttggcaggaaaacatcctccaaaaggtggtgatgacagccttcgcagaccgcactgtggtcaccatcgcggtaaggggcccattgatggggtgcagagggacacccagggacaggactggcctgttgtggccgtcatcagtgcacagcccctgggcttgcctggtcccagtaatcaagaaagaaccctgaagcaggcagttcagggcaaggggcctggagggcatgcagggagcctgggttgcaggatttggggtggggggttttgcccctgtgcttccctcagacctcccctctccttctccaggttccaaggcctgcccctgtcccaaggccttatatgttaggctggcgttacttctccataggaagtgggggaggggttgtggagggtctctgagccttgaagcctggaggtggggtagagttgggacttggagaggagagaagggtggtattagcagatggagagcttgtagtcacatccaccccaggaaagtgcagtccccacagtgacaggacattctggccacatgcctcatcctcctcctccaagccgcaggagggccaccctcagctgtggcccccaccgcgggtggtattcccaccatcctgacccgccccctcctgccctgcccagcatcgagtgcacaccatcctgagtgcagacctggtgatcgtcctgaagcggggtgccatccttgagttcgataagccagagaagctgctcagccggaaggacagcgtcttcgcctccttcgtccgtgcagacaagtgacctgccagagcccaagtgccatcccacattcggaccctgcccatacccctgcctgggttttctaactgtaaatcacttgtaaataaatagatttgattatttccta

SEQ ID NO: 15306 - DNA, 83961 bp, Homo sapiens; identical to SEQ ID NO: 15305
